United States Patent Application Publication US 2026/0092266 A1 - sequence listing, part 2

SEQ ID NO: 302 - DNA, 24260 bp, synthetic construct
  source 1..24260: mol_type = other DNA
  misc_feature 1..24260: note = Synthetic
gagctggttctattgttaccgtaacagaaattgaccctatttgtgcgctgcaagcatgtatggacggttttgaagtgaaaaagctggaaaccgttatcgggaacgcagacattgtaattaccactacgggaaataaagatattattagagctgagcatttcgaggccttaaaggacaaggccatcgtttgtaatattggtcattttgacaatgaaattgatatggcgtggttgaacaacaatcatggcaataccaaagatgaaataaaaccgcaagtagataagtacaccattaatggtaaggatattattattttggccgaaggccgattggtaaatctaggttgtgctacggggcaccctagttttgtaatgagtaactcctttactaaccaaactttggcacaaatagaattgtggaaccataaggacaagtatgaaaacgatgtgtacatgctaccaaaacatttggatgaaaaagtggcgaaattacacctgtcgcgtttgggagcggaacttacggaactaaagaaagaccaagcagattatattggtgtaaccgttgagggaccttttaaacccgagtattacagatactaagccctacgctcacatagctaatgccataaaaattgtacaacccttacgccttttcttgaaaaggacgtaagggtttctttatttagtgcgatatttacaggctcaacggacttgctatgcaaattttacttaccggtgccacgggaactttaggctcccaaattttgttttccttattggaggagaagttcaccagcattcaaaacatatacttgcccgttagagataaaaaattggtttcttctaaagaacgtattcgcaaaatgctacaaagtgattttgctcctaaattcattaagaacaaccttactgctatacgggctaaaatcacggtagtgtccgcaaaggatatgctatatcctgaacgttttttaggcggagtgcgaattacccatttcatacattccgctggttttgttaacctatctacctcgcctgatgcgaaagatgagatttttagagagaattacgactttacaaaatccctctttgaggcccatgccgagtatatagacaagttcatttacataagtaccgctttctccgcaggaaatgtggggggattgctaaagaacgactatctacagaccgctcctacagcacatagaaaccattacgaggcatcaaaatacgcatcagagaagtacttgacccaagcaggagcggctgcagacattcctgttcaaattttaaggccaagtgtacttggtggtaatattatggatacgccaaatttctttatttctaaatatatggtgttttatcttttcgctaagttctttcatagaaacacctccccggataccgttcgtattaccgcgaacacggaaagtggtttgaatataattccaacagattatgcggccaaagttatcgtggctgttttagataccgctatagaccaactgaacatcgtacattctaaaacaacacatatcactaagggaattacaaaaatcttagagacggtagcttttgacaattttagcattacgcagaatttagtaaacgccacctctggttttgagtctaaactagaacagttttattacgacaccataggcgtgcacttaacgccatacctcacctccgaaccttgtgaatgggacaccacattactgcaacaaatattgcccatgccaacttataatctcaacgactatttaggagaaaccatcaaatttgccaagattaatggttttaaaaatcagcagtggtagtaccccaataagattggcactttaatttaaatttatcttttgtgcaatctcttctaatttttcacggttttaccgttcttcgtactaaataatatgaaatggttgtatttgtagatatggatgaggtgctagcggacacctacggcgcacatatagaaatttataatgctgaatttaacggaagcctaacttcagaaaaatgttcaggaaccgaagtatggaaaatggttccggaagcccatcaagaaagtgttcgcaagcatgcggccaggagaggtttcttcagggacttaaaagtaattgaacaaagccaagaagtacttctaagaatttccgagatacatgatgtatacatcgcatctgcggcaatgcagttccccaattcactggaagaaaaaagcgactggttagatgagtattttccttttataccttggcagaacagaatactatgtggccacaaacacgttttaaaaggagatgtcctaatagatgaccgtagttataaccttaagaattttgatgggcggggaatcctttttacctcacctcataatgtgaatacagaaggttttgaaagagccgattcttggttggagcttggagagttattaaaataatatttccttaaacgaaaaacagcctttgccaagaaacaaagactgttttttatatctatgtgaatcgatttaattttcggccaacatgccttctaagtaaaaacaatccgcatgctcacttaataaagctaaaccttgctcctttgaatctaagggatttattttaacctcttttccattgggcatatatacaatgtagaacccttcttcgaaagatgacagcttaataatttcgccatttggtcgtattgcgttccaggatttttcatctggcttgtataccaaatcaatttttttgccctcttttggtccttttaccacggtaacctgaattctatttttagttgcaaccatttcaaaggtgttaccatctttttctaccatctgtaattcttcctccccttcttccatggctatgggatttgtaccgtcccaaaactctattacattaaaaataatagtatcccctaaaaagaataatccataaaccggtattatgttaagaccccaaaagaccaaattattaacgaatttactatcggaaacaccttggttccattcctttagattattaaatgcgctaaacgagcctaaacagctagaaaataatgttaaactggccatagcgatgcaaacgattgattttttcatttttctgtgtgtttttagttgagtttaaaaataaactagtatcgcgtaattaactaatccttatactcctaattttaatgctattataaaatacaatggtcgaaaaacgaaaaaaacccccactatatagtgagggtcttaatttttaagaagtgtactattaagcttcgaaaggctcaatagaaacaaaggatttacctcctgctttcttttcaaattttaccataccatctacacgcgcgtgtaatgtatggtctttcccggcatatacgttttcaccaggattatgtcttgttcctcgctgtctaacgataatgttaccagcgatggcagcttggccaccaaatatcttaacgcctaagcgtttcgattccgattccctaccgtttttagaactacctacaccttttttatgtgccattttgttacggttttaagttcccgctcgttgtcgggatataagttatacttaagcagtggacaattatgccttaccgccgtctaattcatcttgccatttcttcagctcgtcccatttaccttcagcagctaatttagcttgtgcaggccatgtatccgttacgtggttaccacgaacatctgctataatttctgagattttagccggttttgcttttgccaattcagcgaatgttgaaatacctgcagcaattaacgtctccgctattttaggtccaataccttcaaccttcttcaaatcgtccgccttagctttagttgcttttggcgtagcagcttttttgggagcagcttctttcttgggggctactgcttttggcgcagcctcttttttaggagcggcctttttaggctccgcttttactttctttgcacctttcgcaacaatactttctattacgatttcagtcaatgactgtcggtgtccgtttttctttctgtaacctttacgtcttttcttgtgaaagacaattaccttgtcacctcttaggtgcttaatgactttggcctcaacagcggctccgtctatagccggggcgccaatggttacgttcttaccgtcgtctaaaagaagaacattgtcaaaagttaccttttttccttcttctgtttgcaaacggtgaacgtacactttttggtctttcgcaactttaaactgctgccctgccatctctacaattgcgtacatattgttaaaaatgtataattaaaacctattggattttttccaaaggcggctgcaaatatacttcttattgattaatctacaaggctttttgttagaatttacgcgcttttagactttaaattattagaggatttgaaaagctgcataaatgacagtgttaataccaaagtggtactaaagcccattatggcaacgaccaagaaaacaatggcttcaaagctctcatattccttggcccatttggtagaaagttcttctagaaaaccaggattcaactcggtagcatacaatgcaaagaacaaggtaaaaatgagtgtcgccacaccccctgttatcaaccctgcaataaatccatttccataactaaaagaagttccctttttcaatttgtaatatttaatcgcttcataaatagcgaatcccgttaccacggcattaaaaaggctgtaaaaaacgtttgtgtgaatccccaatagagaaagtattaaaaaatatgcaattaaacatccggaagcggcgataccaaatctaatgggaagcgcgtaatttttcatagtctaagatttttgttcatcagtttagaagaagttaatgaataaggatcttaaaagtatctaatttcttgttaaatgaaaaagcttctttaattaatcttcccacaaaaccttaaattcgtgtaacaattaaaacaaacttcatccttatgtgaagtatgaaaattaaacactagacaaaatgaaaaacaaactactcatggcctcggccattttattttccggtgtagtaagcattgcccaagaggtaaagtacgaagagtacgaattggacaatggcctacatgtaatacttcataaagataatagtgctccggtggtaacaaccgcagtcatgtatcatgtgggaggtaaggatagaacagaaggcagaaccggattcgcccatttttttgaacacttattgttcgaaggaacagaaaacatagagaaaggtaaatggtttgaaattgtttcatccaacggaggtaagaacaatgcgaacacctctcaggacagaacgtactactatgaagtttttccctccaataacttaaaactaggcctttggatggaagccgaacgcatgttacatcccatcattgaccagaagggtatcgatacccagcaagaagttgttaaagaagagaaaagacttcgttacgacaactcgccctacggtcaattattaccagtacttggggcaaacctctttaaaaagcacccctacaaggaccctaatattgggtatatgaaagacttggatgccgctacgttagaagatgttgttgcctataacaagaagtactatgttcccaacaacgctgctttagttgttgcaggtgatattgatatcgcagaaactaaaaaaattatcaacgactattttgcaccaatcccaagaggtgccgatatcgttagaaatttccctaaggaagaccctattacggaagaggttagagtaaaagcttacgacgccaatattcaaatccctgccgcaggtattgcttatagaacaccaggatttgcggaacgcgatgcttatgttcttgatatgatatctacctatttaagcgatggaaaaagttcaaagctttacaagaagatggtagatgagcaaaagcaagctttacaagtaggcgcttttaatattccacaagaggattatagtatgtatttggtttttgcccttcctgtaggtgaaacttcattggaaactttagtggcggaaatggaagaggaaatcgctaaagttagaacagaacttatctctgagaacgattatcagaaacttcaaaataagtttgaaaaccaattcgtaaattctaattctagcgttgaaggaattgccaattcccttgctagatatcatgtgctttacggtgataccgaacttatcaataaagaaatagaaatttaccgttctataactcgcgaagaaatcatggaagtagcgaaaaaacacctgaacaccaatcagcgtgttcttatagattatttacctgaagaaaaacctgcaaactaaaattgtaatgaaaaaactatatatattatttatcgcggctttggccacatttggagtgcaagcacaagtagatcggtccataatgccgaaacctggtcctgccccagaaataaatttagcagaaccagaaagctttgaactgagtaacggccttaaagtgatggttgttgaaaaccataagttaccaagggtatccatacaactcaccattgacaacccacctatcctagaaggagataaggcaggggtatctagcttaacaggcagtcttctcggtctgggttcaaagaacattagcaaggacgacttcaatgaagaaatagattttttaggggcgcgtttaagttttggttcccaaagtgcctttgccagttcgttatccaagtatttccctagaatgatggagcttatggcagatgctgccataaatcccaactttacgcaagaggaatttgaaaaggaaaaagcaaaattgattaccggactaaaagccgaggaaaaggatgtttccgcgattgcaggaagggttcaaagggcattagcctatggcaaagaccatccttacggggaatttactacggaagagaccgttaacaatgtaaagttgaccgatgtgcttcagttttatcggaagtactttgtgcctgcaaatgcctacctcgtagttattggagacgtaacctttgatcaggtaaagaaattaacagaggaaaattttacctcatggacaaaggccgtaccaccatccttaagcttttcgcaacccaatgatgcacagtacacgcaaataaattttgtagacatgcccaacgcggtacaatccgaaatagcggttcaaaatttggtagagctgaaaatgaaagatgatgattatttacctgcattggtcgctaaccaaattcttggaggaggaggagaaggacgcctgtttctaaacttaagagaggataaaggctatacgtatggttcttactcggcaataggcaatgataagtatgaagtttctaggtttcgtgccacagctagtgtaaggaacgtggttaccgatagttccgtagtggaaatcctcaaagaaatcgaccaaatagttaatgagcccgttacggaaaaggaattggccaatacaaaggccaagtacaccggaaggtttgttttggccttggaacagccccaaaccattgccaactacgcactgaatattgaaaaggaaggactaccaaaggatttttacaagacttatttggaacgtatagacgacataagcattgaagacgttcaaaatgcggcaaaaaaatactttagtaccagtaacgccagggtagttgtagccggaaaaggaagtgaagttttggagaacctagaaaaagtcagtgtaaacggaaaaaaaatacctgttctttattacgataaaacagggaagaaaactgcaaaaccagattacaatgctgaaatgccagaaggattaacagctacagccatcattgaaaaatatgttgatgccataggggggaaatcaaaattggagagtgttgaatcctatgcaatgagcgcaactgccgaaatgcagggtatgaaactggaaatggaaatgaaaaaaacttccaaagaccagtttatgcaagacgtaaaaatgatgggtaattccgtaagcaagcaagttttggatggcgataaaggatacgctgttggtcaaggacaacgcaaagatttgtctcccgaagaaattgaaaaagttaaagcggaatcagcaacgttcccggagctcaattatttggcggtagggggcatagctttagacggtatggaaaccgtaggtgacaaaaaagcttacaaaataaaagttacagacactaaaactgtttattacgacgcagaaaccggtttaaagttacaagaagttaccatagccgaaatgcaaggtcagcaagtaaagcagactttaatgttcgatgactataaggaagtatcaggcattctgtttccttataaaattacgcagagcatgggaccacagaacatagaattcatagtaaccgagataaaggtgaacgacggcgtgtccccagcggatttcgaatagaacaaacatttactcgataatcgagatttatatgctcgggcgcttgcgttgaaattaaatgtgattttcctttgaatgcctcgcgggcttgccccgaggtagtgtacagaaccaaaaaaaaacccgctcaaatgagcgggtttttttataaacatgagtaataaacactatccaatctttctaacttctgcctctccgatcactattcccttatccacattggcatctccggtataatttatcgttgtttctccgtaacaagttacctttaacctatcggaaacgtttacacgaaaattactctcgccataagcagttatttttgtctcgctatttcccatttcaagtgcatttacctcactctcgccatacgccctgaacacttgtctctttacctctccttctgctatctccaagtaactttctccgtagatggcaacggttaattcctctaaattaagatggtcaaaataaaccttcgactccccataaatggataactttaaatcttcttgctccataacgccctttaccttaacaacttcctctcctcgaatagacaagttctttaaggtcttgtacgtaatcttcgcagttgccatagtaccattataaatagatttttttcctttccatttgtcggttgaaacacgttcggatttggtcactgttttagccccgtccagatatacccggagcgtatttccttctaccttgatattaatcttatccaaagcaaccttagcattttcaatacgaacggattcctctgaaccctgtaccaattctacctctatatggggacttataataactttttcaaaggcgtctacttttaccgttttggtttgagcaaaagctcctaaggctaagcaaaaaagtgctataaatattacatttgattttttcatgactgttcgttttcttaagatgatttatttttgtttttgattggacttccccttaaagactgcatgaaacttattttgttacaccttatttaaaattatgcggttttcattcgttttttatttaccaaatacactccgaccaagataaataatgaagctcccagttgcttaatactgaaagttgcaccatctaccagcctccaacaagccaacgaaaagtgtaaataaacgaaaagtgtaaatagaggtactaaagaatttagtaccgcggtaacaccactatctatttcggtttccgcaaatgcaaaaagaaacaatcagtaacataaataaaggaattgctccccaaaaaacaaaatcttgtatatctttctttgaatactgtaggggttatcttatcttctccgaagctttgctcttaagcttttaaaaaaccaaacaaccattagtaacctagaacctaactcatgaaatccaaaaagtcctttaattggctaaaagccaacaatcaccctgagcaaaaaccttgtagactaataaaacttgtctgcgaattttaggctcaacaattttctattcataaggctacaaaacgaaaaaatcccgcggagtacgcaggatttaagatttttcttcggcttatagccttattgtgaaaagctttcagattataaatataagtaaaaacaaaatatgagcaacttaactttaggaattgaccttggcactaactctattggatgggcaataagggacattaccgctagtgacaaccaaataattaaaaaaggcgtattaatttttgacaaaggagttggcgaagaaaaaggtatcgagtttcctaaagtaaaaaaacgtacagaaagtaggggaaaacgtagaaactaccaagcagaaaaatatagaaaatgggagctgttagcttttttaataaaacaaggcatgtgccccttgactttagacgaattaaatgattggagaaaatatacgaaaagaaagggacgtcaatatccacaaaccgaagcatttataaattggttacgttttgattttaatagtgacggaaaacccgactttcatttgtttggtagtgataagcacgaaagttattatgtatttagagcaaaagcaattagcgaaactgatactgacaaaggtgtttttattgacaaccccgaaatattaggacgtgttttttatcaacttgttcaaagacgtggttttaaaggcagggatgaagaagaagcaaaaacaatgctcaaaggttctaaagatggcaccaccaaaggtagagatgctattgccgaatatatagttcaacacaaaagtttaggagcagctttatattattatcaaaaagaaaaatctaaagattcagaaaaaattagaattcgtcaacgatacaaccttcgaaaagactatgaaaatgagctgaaattaatttgtaaagttcaaaaccttagcgaagaattctactcaaaactacacaaagcaattatttggcaacgacccttacgtactcaaaagggtttggtaggactttgcacttatgagaaaaataaaagaagagcacctgtaagtcatccgttgtatgaagaatatcgcacttgggtttttatcaataatctaaaaatacaagcacctgacggatgggaacagggtaggtatttaaatgaaataatttatccaatattctataaatcaggtaacgattttagcttaaacaccatcttgaaacagctaaataaggacggtgcgatcattaattctggttattccaatcgagacaaaacaaaagtgctttctgcaaaattgcttaaaaattttaaagacttttttggtgaagagtggaaaggtaatcttggttgggaccatgcttttctaagacaagaacaaccaaaaaagaaagcaactgccacctatagttttgaagatatttggcatgtactagcaacctttgatagtggagaaaagttaaaagaatttgcattggaaaaattaaagctcaatgaacaaaaagccattaaattttctaaaatcaaactgcaacaaggctacgccacattaagtctttctgccataaaaaaaattcttccctaccttaaaaaagggttcatctattcaaaagccgtgtatatggcgaatattcaaaaggttttgggaacacaccaagtgtccgctgcatttatagaccattttgcaagtgaaattgatgttatatacgaagaagtcgctactaaaagaaaactcaataatgttctaaatggattattcaaatatgaattaatatcgaatggggattatcatttgaataaaaatggagatttagatgcatctgaccatgccctaatacaacacaaagtaattgaagaacttggtgaaaaaacttggaaagaaacaaatatagaggaacagaaaagttacttagattacatagctaatgagtataagtcttttttacagaaaccttttcaagctaaaaaaggcgcatttattgagcagcctcgtattcatcaacatatttttaattacatacaagagcattatcaagttgccaatgagaatataaagtatttatggcatccatctgaacaagagaaatatcccaatgcatcaaatcatgagaaggtaacactaaaaaataaaacggtctatgtcaatgaaaatgaaatggaagcctttttaaaaaagaatccgaatgctgagattgaaggaatttcaatcaaattgttagaaagtccggaacccattagtaaggggtttaaaaatcctatggctttaaaaaccctgcataaactcaaacatttattgaattatttgttacagaccaaccaaattgatacgcacaccagaatagtggttgaaatagctagggaattaaataacgcaaattatcgcgtagctcttgaaaggtggcaaaaacaaagagaaagagagaataataactttaaaaaaattattgaagaaataaataatgaatccggcacttcttataaccctgaagacaaacacttaataagaaaaattcgcctatgggaggagcaaggcaaaaagtgcctgtatactggggagactataaataaaagcgacttactcaatggtgaacattttgatattgagcacactattccagcaagtatcagttttgataatgagttaaaaaatctaacactcgcgaataaagattataacgctaatataaaaggaaaaagatatcctacacaattaaataattacaatgcagatggtctatttaacggcagaccaatacaacccatcattaaaaatattgaagccatttttggtaaacgaacggttgaaaagaaaaccataaaaaagcgtggtaaaaaagaagatatcagagtagttaagtggagtaaaattacagatttagaaaagcaaattgatgaatacgttaaaagaacaagctatgccagtactaaagaaataaaggattcttatattcaaaagcgtcatcaattaaaatttgacttagattatttaaaacaaaaactaaacacctttaccattgaagagtataaatcgaagtggcgtaatagccagttgagagatacacaaataatgaccaagtatgctgttccctaccttaaaacagtgttcaatagagttgaggttcaaaaaggaaatgttgtaaatatcttcaaagaagtatatcgtgtaaaggtgtcaagcgataaaaaagaccgctctaaacatagtcatcacgccatagatggtgctattcttaccttgatacctaaaccaatatatcgtgacgaaatcataaaaaaatatcaattagaaaaagataaccgtacaggtaaaacctatcatgaacaaccgcaaaattgggaagactttaccccaagctttatcataaatattgaaaaagaaacctttatcaataacttaaaagactaccgaacactcactccaacttttaaaaaggttagaaaacgtgggaaaatagattatgataaaaagggtaatgttaagtgggcaaaaggcgataccataagagggcaattacacggtgaatctctttatggaggaataaaacaacccaagcgggatgatttgggtaaaatcattttcgatgagaataaaaaaatgctacttgaaaacgaggtaagacttgttataagaaaaccacttttgtacgccaaagatgccgctagtccaggttttaaaaagctagaagacatagaaaaagttatcgtagaccaggcactttttcaaagaataaaaggtcaggtttcgcaggctgaaagttttaaagatgccttagaaaaaggcatctatatgcttaataaaaaaggaggcagagtaaatagaataaggcacattagatgttttgagaggttaaagcacgcaacggcagttcagcctcataaacatacttttgtttcaagtaaagaatacaaacaaacaacctatgcccaaaatggtgagaatgtttactgcttgtattataaaggaattgtaaaagggaatgaagaacgagctatcagcattataggaatttttgacctggctaaacttgacatacaaagtgagaaagatttttttgaaatcccacactttaattcagtcattaggaaaaaagtacagttgcccttatatacgatattaaaagctggacaaaaagcaattttttataaggaaagtttagatgaacttatcgagttaacaaaagaggaattatctcaaagaatttataaaatgtatcagtttgaagcggactcaaataaaataaaattcaaacatcacttagtttctggttcaaatactgacatagttaaatctttaccgaaaggatataaggaagctgcattatttggcaaatatgaaaatcaacctctaatgagattgacatctggaaactggaattttgcaattgaaggcaaagattttgaaatgcaattagatggcactataacttggaaattttgagttatgataaaacgcaccctctttttcggcaacccggcctatctgagtacccgcaacgaacagttggtggtcaactttccagaggaagctaaaaaggaagccaccatccccattgaagacttgggatatgtggtcttggaagacccacaaattacgataaccaatgggttgttaatgaagttggtacaaaacaaaacagccgttatcacctgcaaccaacaacatttgcccatttcgttcttacagcctttggtgggccataccgagcagaccgaacgcatacggtatcaattgaatgccagccaacccctcaaaaaacaattgtggcaacaaacggtcattgccaaaattgagaaccaagccaaccatttattggcccgttcaaaaaatgccctaaaattgaaacgctgggccaaggccgtaaagaccgatgaccatgaaaatcatgaggctttggcagctgcctattattttcaaaacctgttcgacgaggtggggggttttagccgcaaccaaaagggcgtacctcccaacaatttgctcaactatggttatgccattttacgagcggtaaccgccagagccttggtcagcagtggcatgctaccttcggttggtatcttccatcgtaataaatacaatgccttttgccttgcagatgatatcatggagccttaccgaccctttgtggatgccatggtctatgaaattgtagaaacgggcgcccaaattgcagaactgaacaccaatataaagagtgaactgttatgcatacccgcaatggacgtgaccattgacggcaagcaaagcccgttaatgaatgctatgagccgtaccaccaatagcttgtacgaatgttttttgggcagtagccggaaagttttgtatccagaatttcagacaattgggcctccctcctaataaggaaggattgagagaggtgtaaaattggattcttgccaaggcaggaatgataaagatcataaaatgaatcaaaaccgtttaagccgtttaaaccaataccgtagtatgtgggtacttgtatttttttttttaccgaccgaaactttaacagagcgaaagtatgccgccaggtttcgtaaagatttattgaatgatggctttgccatgttccaatttagcatatacctacgtttttgcccaagcagagaaaatgccacagtacatataaaacgaacaaaaaatgcactccctaaaaaaggcaaggtgggcattatgcaaattaccgacaaacaatttggtatgatggaattgtttcacggtcaaaaagaagtggaaccagaacccccaagccagcagttggagcttttttagaaaactgattttctggtcgagcacagtcgagacctcatcatggcggctcatttttaaatttccatccaatcccataaaaacaggatatcagatagttacatcaagtatcctgtaaatcatccttacccttcaactttgctcaggacaagaattaaagaactggaaatcgagtttacgggtttcagcgaatagcattaaaaataaaattcacatgagctaaacaactcttttggagcattacttctttttttagcatcacaaaaacaaaaaaagcgtttagttaaaaccgtcaaataaagcttaatttcactacttctacaactaaccataaaaaacaggataccagccaattacaacaagtatcctgtgaatcatccttaaaattaaagaactgaaagcaattcacaactacattagttggtaaacatattattttattcctgtgaatcatccttaaaattaaagaactgaaagcaattcacaactatttgtccagttacccaacccgtttctaacctgtgaatcatccttaaaattaaagaactgaaagcaattcacaactttctttctacaacaatgataatacaatagcctgtgaatcatccttaaaattaaagaactgaaagcaattcacaacttactgttttctacataatcacaatgtttccctgtgaatcatccttaaaattaaagaactgaaagcaattcacaaccaacgtgcctttgcttttcttgcaggctccctgtgaatcatccttaaaattaaagaactgaaagcaattcacaactataatcattccttccctgtcacagttcaacctgtgaatcatccttaaaattaaagaactgaaagcaattcacaacttacaaacacctcctacacgaccgaaaaaacctgtgaatcatccttaaaattaaagaactgaaagcaattcacaactactaacgattttaatatttaaataaaatcctgtgaatcatccttaaaattaaagaactgaaagcaattcacaactaagtcggttcaactttcttacaatatccgcctgtgaatcatccttaaaattaaagaactgaaagcaattcacaactaaaggcataagcacaaacactaaaacttcctgtgaatcatccttaaaattaaagaactgaaagcaattcacaaccggccttgagttcatcaatactatttttaacctgtgaatcatccttaaaattaaagaactgaaagcaattcgtaactacgttagttatatacaaggctacattaagcctgtgaatcatccttaaaattaaagaactgaaagcaattcacaacggtgaccccgtccatgcggttaggcttaccctgtgaatcatccttaaaattaaagaactgaaagcaattcacaactaaaggcataagtacaaacactaaaactttcctgtgaatcatccttaaaattaaagaactgaaagcaattcacaacggtgttccagtctaaaaatacgttcatattcctgtgaatcatccttaaaattaaagaactgaaagcaattcacaaccttgtatctgaatgaaggatagttttactacctgtgaatcatccttaaaattaaagaactgaaagcaattcacaactcacggaaacgacacgttcacgaaaacgtcctgtgaatcatccttaaaattaaagaactgaaagcaattcacaacttaactcaaataaacgcatatgaaaattttcctgtgaatcatccttaaaattaaagaactgaaagcaattcacaacctatgttagcccccatattcatgtgttcctcctgtgaatcatccttaaaattaaagaactgaaagcaattcacaactaaaccattacaacaacaaaatccctacatcctgtgaatcatccttaaaattaaagaactgaaagcaattcacaaccctattcctgtaaaactgttattcctaacgcctgtgaatcatccttaaaattaaagaactgaaagcaattcacaactattaaacctttaaattacttcaactacttcctgtgaatcatccttaaaattaaagaactgaaagcaattcacaacccctaggccgtaaagtatcgacactacaacctgtgaatcatccttaaaattaaagaactgaaagcaattcacaaccaggcccagcaacataattgtctataccaacctgtgaatcatccttaaaattaaagaactgaaagcaattcacaactatagggggtgctgaagattttacatataacctgtgaatcatccttaaaattaaagaactgaaagcaattcacaacaatagtagtggtatacaaactggagcaaacctgtgaatcatccttaaaattaaagaactgaaagcaattcacaaccgaaaaccattctaacgtttctttcctcgacctgtgaatcatccttaaaattaaagaactgaaagcaattcacaaccacagaacatgattaccaagttcaggtctgcctgtgaatcatccttaaaattaaagaactgaaagcaattcacaactaaaaaatggacgaaaaatattttgtgattcctgtgaatcatccttaaaattaaagaactgaaagcaattcacaactactttttttatgtttcaacacttgattttcctgtgaatcatccttaaaattaaagaactgaaagcaattcacaacccgcagaggttgggtttacccgtatatcctcctgtgaatcatccttaaaattaaagaactgaaagcaattcacaacttagcattacgtacaacgtgctttgtataacctgtgaatcatccttaaaattaaagaactgaaagcaattcacaactaatcacgggcggtactgtggtggataattcctgtgaatcatccttaaaattaaagaactgaaagcaattcacaactaacgccttagcttctttggtcgtctatgtcctgtgaatcatccttaaaattaaagaactgaaagcaattcacaactagttactagttttatattaggtagcaattcctgtgaatcatccttaaaattaaagaactgaaagcaattcacaaccttcggatagttcaaatcttgctttcttacctgtgaatcatccttaaaattaaagaactgaaagcaattcacaacaaggaggctacaggggaggtaagggattttcctgtgaatcatccttaaaattaaagaactgaaagcaattcacaactacggacaatattatacctgacaacgtaatcctgtgaatcatccttaaaattaaagaactgaaagcaattcacaacaccataggaacgcagtcgttagagcctcccctgtgaatcatccttaaaattaaagaactgaaagcaattcacaactagtgagctataaccttaagcatttttcgtcctgtgaatcatccttaaaattaaagaactgaaagcaattcacaactactctggacaatgataggtttagttgtatcctgtgaatcatccttaaaattaaagaactgaaagcaattcacaactagcccttctttaaccgtgttcgactcgccctgtgaatcatccttaaaattaaagaactgaaagcaattcacaaccagttcatgcaatccgacaaagcttataacctgtgaatcatccttaaaattaaagaactgaaagcaattcacaactctaacacgaacacctgctttaaaccccctcctgtgaatcatccttaaaattaaagaactgaaagcaattcacaactacaacggtactttaagagttggtaatttcctgtgaatcatccttaaaattaaagaactgaaagcaattcacaaccaataactcctttgttgttcgtagcgtagcctgtgaatcatccttaaaattaaagaactgaaagcaattcacaacttattttattggaagtaataccagcgttgccctgtgaatcatccttaaaattaaagaactgaaagcaattcacaacccactatgacccacagttataccgtttcccctgtgaatcatccttaaaattaaagaactgaaagcaattcacaactctaatagataactaatatgatgaatatttcctgtgaatcatccttaaaattaaagaactgaaagcaattcacaactagtcatcgtattttgtgtttagtattttacctgtgaatcatccttaaaattaaagaactgaaagcaattcacaactacagggcggtaagaatgtaggcgaagcgtcctgtgaatcatccttaaaattaaagaactgaaagcaattcacaaccgtaacaggagatataaacagcccttacatcctgtgaatcatccttaaaattaaagaactgaccgagcgaagcgaccgatgaattcctataaaaaacaataaacaagtccaagaataaagcaatctagtgagctcagtaaaatattgctacaagcgttgtaaattactttgcttacctaggctttttatttaccaaatacactccgaccaagattaataatgaagctcccagttgctttatactgaaagtttcaccatctactattccccaaaaaattcctacaatagggataaggtaggtaaccgagacggaaaatatgggagaagaaatctgaattaacctattgaagataaccttggcaatacaggtacttataacacatagaattacgatgtagcccaacgaactccagaaaaagctcccatctagaacttcattatccagtgctccagaaaaaggcagtagcacaaaaccgggaataaggatacagacaaaatttccgacagcaattcccatgggactgacctcctgtaatttgctctttataatattagcattgcaagcataacaaatagtggctatgagcacgaaacctgtataccaataattttggtccggatttatactactcccgaacaacacaagcaaactagcccccagtaaaccgattaaaaccccaatgaactgatttctgctaaaggatatcccaaatgcgaaaagcccaacgaacaaagtaaataatggcactaaagaattcaaaactgcggttacactactatctatttcggtttcagcaaatgcaaagagaaacatagggaaaaagctacctataaaaccggatagcgctaaccatttccagtccttctttcgaatagtttttaaagaaccatatcctataatcaataaaagacatccagaaataataatccgtaaggcacctaattgaagtggagtaaaacccaccagaccctttttaatgagtatataggaagttccccaaataagggacaatactataagataaagccactttcggtttctaattttcaagtctcgcaattttactgcaaaaatgaggttttttagtgagtaaaaaagaaagcttttttattaaccgacttcttaggacgttttcaatatttggtatctttacaaccttgtagggaagcagtcttaatatcctgacctgaaaaaagattaattgttctaaaaggatttctatactatgaagctattcttatctcttcttttacttgtcatcatgtccaattcaatattaagacaagacgtagtagagaaaaacacgagcattgagcacaatcaaaggaccagcactgccatagtaggtattgatggtatggcctgccaggaaggatgcgcggataaaataggcctgaatttacaaaacacccctggggtcattgctgcagaggttagttatgagaaaaaagaggcccttgttaagtttaaccctgaagtggtatctatcgcggaattagaaagtgttattaccagtaccaaggttaaaacgtatgtttactctataaattccatcaccataaaagaataaataagatgaaaaaatatctcctaatactcgcctgtgtgccttttcttctatcttgtaacgaggaaaaaaagaatgaaaaagaggagtctacacagatggaacatgtgatggccattcacgatgaagtaatgccaaaaatgggaaaacttggaagtttagtaggcaaattaaagcccatggcagattctctcggtgccgaatcgccagaagcaaaaacaatgcgcgaattacaaagagccaatgaatccatgatggattggatgaaaggttttggagaccgatttgattctgaagaaatcttagagggtaaagcgcttactccagaaaaacaaaaatggcttaacgaggaggaagaaaaagtaaaagcagttaaagaacaaatcaatactagtattgaaaaggcggagaaactgctggccgactagactctaaagcatttaaaacggcaaattgtttaaatctacatttccgccagatataatgatgcctatttttttctctgaatactgtttgggattttcggacacttctcgtttcaaagcagctacggtaaccgcactagacggttcaatgatgattttcatgcgctcccataccaatcgcatagccagaactatctcctcttccgtaaccctgactatcttcttaacgtgctcctttattatagggaaattattgtcccccaaggtagttttgagtccatcagcaatggtatttacgctattattaccctcaatttttccacttttaagcgagcggtaagcatcatcggcctcaaaaggttcgcctcctaatacggcacaattcgtgccaaaatgcttcgccgcaatagcggaaccggctatgagtccaccgccacccaccggacaaaaaatagcattgatatccggaatttgctttaagagttctaatgcggccgtcccttgaccgattatgacgtttttatcatttgatgggtgtaaaaaagaggctccggtatctttgccaatcttatcggccatggcctgtctagcttctagcgtaggagcgcattcgtaaataataccatcatattctttaactcctattttctttacctcaggagcagaggacggcattacaatatgggctttgatatctaaacttttggctgccaatgaaaccgcttgtgcaaaatttcctgaggagtgggtaaccactccattttttctttgcgcgtgggtcaactgcaaaatggcattcgtggcacctcttattttatacgctccggccctttgaaaattttcacatttaaaataaaccgatgttcctatttctttatcaatcaatcttgaagttaggacaggggtatgatgtatgtacggtattattctttcatgacaatccaatacatcttgcttttgcatgattgaagaatttattctttccatcgtaatgtttccatgattcgacggatatcgttttgtagatatgccgccgcaggcaaaatagaatcgtagttcggttttgtataaaaatacacagaaccggttaaaaagtgttctacactatccgtgacaaagaattgagactgtgatgcggcatttccctgtacttcaaacaatgcaccgtaaacaccggcttccggattcacataaggctgctccacaatgttatctgccttaacagcgtgttcatagcttaaacgtttggcatctatgatgagcttgtctatattgttcgtcacttttttataactgatgaagattgcacccttcatatcaggatacgttaaggtaaaggcctggtccttattcgcctctgcttttgacaactggttgtactgaaagctaaaattttcggtttctaaagtagctggttgtccttgaggatattctaaccgtatttctgccttaggctttggaataggctcattcttgcaagcacctatgacacacattatggtgattatagcaatgacatatctacgcttcatgtggcaaaataactttaatttgctttaacctctttttatccagactttctacaacaaacttgtaattctcaaagactacttgttctccccttttaggaaaactccctgctatttctaacacaaaacccgcaatggtttcagattctcccttattctcctcgaatggtgtttcgtcttccagttttacaaccctataaaaatcctttaaagctgtttttccttcgaagacgtagttaaagtcgtctagcttggaaaagattaaatcctcatcatcgaactcatcgcttatatcaccaactatttcttcgatgatatcctctagggtaacgattccagaggttccaccatactcatctaccactacggccaaatggtttttcttctcttgaaattcggatagcaaatcatccaactttttattctcaggaacaaaataaggctcacgaataaggctggtccaattaaaggatttacggtctaaataaggaagtaaatctttaacataaagtactcccaagacattatctatattatccgaaaaaactggtattctggaatatccgttctttttaatctcttccaagacctccggaaatttcatttggtcgttcaatgaaaaaatatctattcgagggcgcattacctgcttggtatccgtattcccgaaggaaacaattccctgtaatattttttgctcttccttggtggtatctccatccgaggtaagttccaacgcttgggatagatgatcaacgcttaaactagatttttcctttccaagtttattatacagaaatatggttcctgctcgcattggaaggctaaaaggcgagaataaaaaatctaaggtttttaacgggtaagccata

SEQ ID NO: 303 - DNA, 24260 bp, synthetic construct
  misc_feature 1..24260: note = Synthetic
  source 1..24260: mol_type = other DNA
agaaaggaaatataaataacagtgaattttacattagtgtccccaatcaggataattcaaataatataaccaatgaaaaaggagattttacttatgagtataaatacggccggtctgaaggagaaattcaggaatacgtaaaagttgtaccgtttagcagaagaagcatctcggcggatatttttgcccgattggaattccaacttccctttacttataatttaatagaagaatttattggagatagtaccaggattagcagatagatttatattgtcaatttacttttttcatctagagcattttcctttttcacgtcgaaaagaagtgaaataaagagaaaacagagaaatataatagttttgctcctttatttcatttacttctttcagcgccctcacattccctttttcgatgcatttattttacaacatccttgcctggtgaagggtataaaaagagtaggcaaagccgaagcggctttatgccgctgtccaggaaaggatgttgttatttgcatcttaaaaaggggagggcttatggttgacgtttaggtatggtttaggaaataccactattttgttgggaaagaaaaactaggatttgaagttcaatttagcggacttcattgaaaaattccgagtggaatgaagcgttccgatttttcatcgggttagcgtaagggaagtcgcaatttctttgatggtgtccaagatctttttatagaagcgcttttcccgaaatgaagctcttgcgaaatgtagtgggaacgggctaaacgtgtattaatttagtcgctaagcatttcacaaattaatagcattcttcaacttcttatttcaaatttacaattgttcaatttataattttactgcaatgaaaactaaatatgagatagagaggagtcttctaacctgttctgaaaaaagagtattttttggtttcgcaaaaactatataataccctatcaaaaaattaaaaatatctatactaaatatcaaattcctttaccgctactttttaaaccttgattattctacaatattctacaattgttgtagaatattttaacaatgattttattagtcttatgcatttcttcaaattttgaatgatggagattagttcttaaacgccaaaatctatttatcagggtaatatagcgtggttaatgcttttaataaaaaattaagaaattttggatcgtttcgtgcgttaatgcctacgaaaattggtagtcaaaaagtctaagctaccgcgcttcaaattgaattaataattaaatgattaaactatgttaaaaaagaatttaaacaaattggctttagtattaggagttgtattatttgcttcttgttcagaagatgatagtattgacaacccagataacaatactggtgaagaaacttcagtttatattactgactcaccagttgatcaggctaatgttgaagctgtttttatcacggtatcagaagttaaattaaacggtaaagctattgaaggtttccagaaatctacaatcgaaattagtagcttaactaacggaagtacagaaatgttgggaaaattgaatctagatgctggaacaacttcaagtatagaattggtgttagcagattccgatgatgacaataatgctcctgggaactatttagttactaaaagtggtacaaaacaagaactttcaggtgttactcagattcagcttaacgatcaagttgagatcaaagaggatgggccaaatgatattgtacttgattttgatcttagaaaaagcattaaacaagagggtgatcagtatacatttgtatctgatggttcacttcaaaaaagtttaagggcggtaaatacttctaatgttggggtaattgaaggtaatgttgaaaatagttctgatgctaatgctgaaacagtaattgcttatgcatataggaaaggtgagtttaatgaatcagaaaaggatggtgaccagggggtaaggtttaataatgctgtaagtagttcggtagtttcagaatctaatggtgattttgaaatacattttctggaagaaggtgactacgagatgtattttgcttcctattcagacgatgatcaggatgggaaattagaattttctggtttaatcagggctgaagctattggcgggcttaacctcaatggagtttctgtagatgctaatactacagtaaaccttgaagttacttttaaaggtatattagatttataaataattttatttataaaagtttaataaatacttattagacactatctcattaagtgtgtaaataaaaagggagttttgactttaattattaaagttcaaactccctttttaaatggtgacgttgccgtcacattacctttttcgatgctttagttttacaacattctggcctggtaaagcgtatagaaagagtaggcaaagctgaagcggctttatgccgctgttcaggaaaggatgtttttatttgcatcctaaaaaggggaggggattaaggatgatatttcgatatggtttaggaaacaccaccactttgttatgaaggaaggactatgatttggagttcaatttagcggacttcatcgaaaaatttcgaacggaaatgaagcgttccgatttttcatcgggttagcgtaaaggaagtcgcaatttcttcgatggtgtccaagatctttatagagaggcgcttttcccggaatgaagcttttgcgaaatgtagtggcaatgggctgaacgggtattaaaatatttcgctaatcatccgtatacgaatagaaggataagctttttcttctaacctttattaaaagtaaaaagctgaacaattaaaaaaattcaatttaaaagctccaaggttttttctcctacaaagtggctttcaaaggtaaaccttactttataatttccagtttttgtataagtaaatacccggctacagataccatttcccatgtaaaggttgtgttgatgggtagtgggaatataagtagtaagcttttcgccatcggtatttgtgaaccccattcgatttaggaaatcttttaataagactgtaattttaaggttgcttttgttgaaaaaaacaactaacttcgcttacaccttgtaatcgcgatgaaatcgctaaaaagattacaaggtgtaagcaataaacaagatagtaaagggcagttaaaaagtgtgaaacactttttaactgccctttacatttcttcaatttaaattactcatctttaatagttattttgtcacaaatttttaagatatttgtgacagaattttacataaaaaatgcctgaatccattgaaaatagagtgaaaaataagattagtaattataagagaggaaaaatttttttcccgtctgactttactaaattaggttcctctacagctattagacaagccttaaatagattagaagaagatgggtttttgacaagactagctcatggaatttatttatatcctaaaaaacatcctattttaggtgaattaatacctacaacagaagagattgcattagctattgcaaaaagagataaggctcggataattcctacaggaaatcaagcccttaataaactcggtctttcaactcaagtacctatgaacatagtctatctaaccgatggctcttcccgatcaatcaagattaataatggtagtattaaatttaaaacagcttctcccaaaatattttcagtaaaaagcgataagatcattcttataatacaggcattgaaacaattaggtaaggaaaacattacacctaaagtcaaagaaaaaataaaagaagtattaaaacaagttgactctgaggtgatccaaaaagacattcaattagtgccggtatggatcaatcagataattaaggagtctgttgaaaatagcgatgaataaatggaagaatggtttaatctgagtgaaaaggatcgaaaattaattatagatcaagttagttcgaaaaaaggtttactccctgtggctatcgaaaaagatctatgggtaatgattgctttgaaagcaatttttagcactgaattaaaagactatttggtttttaaaggtggaacttcattaagcaaggcgtggagtataattgaaaggttttcagaagatattgatttagcaatcgatagatcattttttggttttgaaggagatttaagtagaactcaagtaaaaaaattaagaaaagcatcctgtaaatatgtaagtgaaaagtttgaagaacaattgaatgaagccttgttaaaacagggtgtgaaagaatttgaaataagcattacagaattcgaagagtcagatactgatccgctagcaattgaattacggtataagtcgctagtagaaaagcaggaataccttcatcccagaatattgatcgaaattagttcaagatccttgatcgaaccttatgagttgagagaattaaaatctttaattagtatggtttatccagatcaaaaatttagtggtgataaaatcgaaattcctacggttcttccatctcgaacgctattagaaaaaatgttcttgcttcacgaagaatttcaaaaaccaaaagatcgaaaaataagaagtgctcgtatgacaagacatttatatgatatttctaaattaatggaaacaaaatacttagatcaagctttagaagacaaagatttgtacactacaattgttgatcaccgaagtaagctcaccaaaatttcttgggtagattattctaaacataattatgaaaccttaaaattcacgccaccagaaagtattatggaagaatacaaaagggattattctgcaatggaggaaagtatgttctatggtaaaactgaaccattcgaggatttaattgataagttaaatcaattaaataaacgtataaataaaattgactaaaaatcaccgattgaattttagcaagagggtgtaatctcaagtctgtctagactttgaaaattaaattaaaatttttagactagattatgacacaagaagagattaaggaattaaaggaaaaagcattaaaacaatttttatcaggagaatccctaaccggcaaaaacggcgcttttgctccaatgcttagggagtttatggaagaggccctggaagcagaaatgtcttcgcacctttccgatgaagaaaaaggctcaaaagcaggtaataagcgtaatggcaaaggcaaaaagaccctaaagagcagccaaggggacgtcaccattaacacgccccaggatcgtaacagtacctttgagccggagatcgtagcgaaacgccagcgtatcctggccgataatttagaaaagcagattataggcatgtacgggatgggcaatagcctgcgggatatctcagctcatatagaggaaatgtatgattccaagatatccacacacgttctaagtgatattacggaccgggtgattcccaaggttaaggaatggcaggatcgccccttggagccggtatattgcatcctatggctcgacgcgatgcacttcaaggtacgcgaagaaggcaaagtaaagcacaaggccttgtataatattttaggaataaataaagctggaagaaaggaagtgctgggtatgtatatctcggaaagtgaaggggccaatttttggcttcaggtgctgacccaattaaacaaccgtggcttaaaagatattctgattgcctgtacggataatcttacgggctttagtgaagccattcattctgtttatcccaagactgatattcagctatgtattgtccaccagatccgcaatagtatgaagtatgtggccagtaaggatcaaaaagattttatgaaagaccttaaactggtgtacaaggctgacaccaaagaccaggctgaatcggctttactggatctggaagaaaaatggggcaaaagatatcccatagtgatccgttcctggaatgataactgggaccgattgagtgcttattttgaatataccgcacccattagaaaactcatatacaccacaaatgccgtagaggcttttcaccggcaggtaagaaaagtaaccaagaccaaaggcgcttttaccaatgatatggcactattgaagctggtttacctagctaccagaagaattgaaaagaaatggaacgccccactgcagaactggggtttggtagttcaacaattagctattaaatttgaaggtcggctagagttggacttagccaccaatgaaacgaaaaactaaaattttcttctcccgggggtacccccgggagaagaagcagacagagttgagctaacactccctttagcaattgttctttggaatagcttttttccaattaaaagaattcacgcttcgatatgcctatgcattcagagaagctaaataaaagaacacctcgaaggtgtataaataccaaattttattcttctaaataattctattcctagtctaaaaactttttaacagttgatgtgagctgaatccaattcgtgcaattaaaataagaaagcccacgccgttgtatatgcttcgtgcatttagtgagcgttattcaagacctcaccttacgggtgtacaagtaccctcatcattgaatttaatctactataagttcaatactggctttctcggccttgtattttattttggtcaacagttcgtgataattccagctcctctaatcttaaagggaagggttgtatatgctgcgtgcatttagtgagtgctattagggacctcaccttacgggtgtacaagcaccctcatcattgaatttaacctactataagttcaattccggctttcttggccttgtattttatttttgtcatcagttcgtaataattccaattccttaaaagaaatccgtcttcttttttggcaatttccattttatcttcctggtttaacaaaatgagtgtccccgcttgatttttaatgcaaaaatcaattagccttcggctgtatacatgcaagcggttacttacatagtttttttcctgttcgtggaatcctcccacagcttttgttttgcgtttacgaccttttcccggtctgcaataggtggctccgctttgtgcccttttgcgagcagcctgtatggctagccttctatatagaaactcttctcgactgccaatactaagggttttctttccggatttcactataataggatgctcaatagataaagaagcttctgcaataacttccggttttagtttatgcttttctttttcaatttcaaatacggccaaccaataaattttttgacctttcagttgaattttagaggtacatagcttgattttgccggctactacttgttccagtaaccgtcgtttatccgtgtaatctttccctagatacgttttaaaggggatggaaaacaaacgaaaacaaaaggcttttttttcctctttaaaagtgaagcctagaatacatattggtccaaacggaaaagcgatatcccttctgaaatttgccagggaacgttctccgctcctatattccagcaagttgttacgaaagttattgattatattatagttcaggttggctaaaatgttggtaggaatttcccctttaaaacgatcggaaaccacccggtaggtacagttgatttttgaacgattgagtatgccgtcttcagcttttttttcatccgctaacttatattttattccttccgataaataaaagaattccttgatcctttcctgcacgtagaggtgggaaacaataaggttggccgccctgaaacttcggttttgccagcgatacagggcatcataagcctcctttttttcttctttggtaggggcgtccacctgtagctggatctttcgggtgagttttatggtatcttttcccatgactaagctgattgttgttcgtaattaagctgtgtcagtttataggcagccataaattccttgtgcacttcctttttggaaaggttcagttctttggcaatagccgcaaatgaatattgcttttctgtacgcagctgtaacaccttttcctgttcccaggtcatagtaccctggatctttaccgccaacatcggttgtggtttagcttcgagcgaactccctttgttaatgatatttttaatatcattaatggcgctttttacttcggtactggttttggtgatgctggttcccattgtctgggcaatggccttatactgaaaaccgtaatttaaacagagttcaataagtcgttttctttcactactaagcaaagggaggacattctgaatccgatcgaaagctttctggttggcttcctgcatcattagatgctcatctttttcttccggatcatagccgtgcatatattcctggtagtcctcgtaatattctaacctgcctatgccccggtaaaaattatgccgggggcgacaataataaaaggtacaatcccttttcatcacataacgaaggaaaaagtaaatatgttccgggtgttcaatcccttccctattctcccatagttttaagaaagtatcctgaaggatgttttctatgacaaattcatcctttatcaattgcttccctaaccaatagattcttctgtggtatctggtatagataatcttcaaagcatcgggatggccttgttgtaataattcaaaaataggctgtaacataagcagtcgttatttagccggaggtaattacctccagaattaaactgaatttagctaaagcgaattcttataaggtataaagagaaggtagctttgagaacaattgagaagaaagcctgtttttacaaacaaaaaggcgtggagactcaacttatcgaacagaggcactggtataccttaccacgatcaagtaagcccacgcccgggtcgtgagcatttacacttatcatcttgtggtttgttgaaaattaccagttttctgttcaagactcaaagcgaatgcttctaatgttttacttaaagaagtatcgcaaatataaaaattaaatcattttgatctaactatcagctaagtaatgaaaaatatctttttgttacaagaacttgtaacattttttattcaaaaatttcttgtatttaccttccaaggaattttttatggaggaattagacctaaaacgacaacaaattttcgggaagcatgttaagaggcttcgagaagaaaaaggtttaagtcaagatgatattgccgcaagatgccgagttacaaaaggtagcttaagtgttattgagaatggtaatagaaatttttcctttactacattattagcattagcaaaggctctggaagtagaacctaaaacgcttctcgatattgattttgaattattttctgaataaattcctttaattcgcctctctttacggttttccgtatttttctctttttcggtttttgctgataaagcattttaagccaattatagagtgagaactataagcttaaaacaacaacataagatacgtggcaaaagctagctatcgattttgtaaaagaactttgggacctggagagcttacttagccgtgccgttgcagaaaacaattacaaaaagaactacgggttttcccttattttttataggaaattataattatttttagtaattatgttaagaatacttaggttaccctacattcctaatgataaaatcaactctgaacctttatttgctgattaaaaaataaaaatcccacggggtacgcaggatttaagatttttcttcggcttatagccttattgtgaaaagctttcagtatttcaaagataaaaaataaaaagcaatttacaacatacaacttgtgcaggtgctatttaagtctgcatagagtacaaaaaaaggagataagtctaataagaccagaaagtgggtttggaccaccaaattcaattattagtgcactaataactttctctcttttgaacaaagtaaacgcaaatataaaagagatacaagttatatagaacctatttttattaaatttgaatttaaaactcaaaccatgagtaacttaactttaggaattgatttaggaacaaatagcattggctgggctattcgagatgtatcagcattgaaaaatcaaattataaaatcgggtgtattaattttcgataaaggagttggggaagaaaaaggtatagagtttccgaaagttaaaaaacgtacagaaagtcgtggcaaacgaagaaattatcaagccgaaaaataccgtaaatgggaattactggagtttctaattaataaaaatatgtgccctttaaccataggggagttagatgaatggcgaaaatataacaaaaacaatcctagaaaatatccccagactgaagccttcatcaattggttgcgatatgattttaatggagatggcaaaccagactttcatctcctaggaggtgatgcacacgaaaaccattatttattccgtgctaaagcaataagtgaaaatgaagctgataaaaaagtctttcaggagaatcctcaaatcttaggaagggtattttatcatttagtgcaacgccgtggttttaaagggcgtgatgaagaggaagctaaaactatgttagagggcagcaaaaataatgacacgcctggcagaaatgaaattaaaaattatattataaaacaccgaagcttaggagcagcattataccattatcaaaaagaaaaatctactaatggtgaaaaaataaggatccgtcagcgctataatcttagaaaagattatgaaaacgaattaaaggaaatctgtcaggttcaaggcttggaaaaaacatcttatgaaaaactttggaaagcaattatctggcaaaggcctttgcgtacccaaaaaggttcggtaggattgtgtacctatgaaaaaaacaaaagacgcgcccccattagccacccgttgtatgaagaatatagaacctgggtttttatcaataatttaaagattgaagctccggaaggttggaagcaggaagattatttaaaagaaaagatctatcctgttttttataagacgggaaataatttcagccttaaatctattctcaatcaattagacaaagatgaggcaacaattacttccggttatgcaataagagaaaagacaaaagtactttcaacaaagctactgaaacaatttgaagatgtttttggtgaaaactggaaagaaaatttaggttggaaagaggcttttgttcgaaatgctcaaccagcaaagaaaaattcaagttactatacttttgaagacctttggcatgtattattcacctttgatagtgaagaaaaattaaaagaattcgcgttagaaaagttaaaactcgaaaaggcgaaggcagagaaattttctaaaataagacttcaacaaggctatgctactttaagtctatcagctataaaaaagattctaccttaccttcaaaaaggctatgcttattccaaggctgtatatatggccaaccttcaaaaagttctgggaacatatgaaatctcagatgagtttattaatcattttgctgttgaaattgatgaaatttacgaaagtgtttctacccagcgtaagttaaataatgttttaaatagtttattcagaacagagctggtggctgagggagattatcatttagccgaacaggaagaattggataactcagatattaatttgattaagcagaatataattgatgtattaggcgataaaacctgggaagagattaatgaagaccagaaagaggaatatgtaaattatgtaaaagaaaaatataaaggatttcttcaaaaaccatttcaagccaagaaagggagttttgtagaacagcctagaattcatgacgctattttcaactatttgcaggaatattatccagaacaggttcccaaaaaaaacattcaatatttatggcatccttcagaacaggaaaaatacccaaattcagatacttatcaggaaataaatcaaaaaggcaaagtattttatattaaggaatacgaactcaattcttttttacaccgctaccctgatgccgaggcagacgggatttcattaaaacttctaggaaatccggaaccaataagcaaaggttttaaaaatccgatggctttaaaaagcttacataaattaaagcaattgctaaactttttattacaaacacaactaattgattctcatactaggattgttgttgaaattgcaagggagctaaatgacgccaattaccgtaaagctctagaacagtggcaaaatgaacgagaaaaggaaaaccaaaagttaagtgatactattgaagaaatcaaccaagaatgtaacacaagttttgaccctaacagtaaagctttaattcgaaaaatcaggttatgggaagaacaaggtaaaaaatgcatgtataccggagcgatgatcaataaatgcgacttgttgaatggcgaatactatgattttgagcatactattcccgcaagcattagttttgataatgaattaaaaaacctaacactggccgacaaaaattacaattcgaatatcaaaggcaaaaaattccccacacaacttgataattatgattcagaatgtgattttgatggaaagcctcttcagcctatcctgaaaaatattgaagccttattcggcaaaagaagtgtagagaaaaagactttaaagaaaaaaggtatacagaaagaaattactattgaaaagtggagcaagattgcggaacttgaatttcaacttagtaaattaagtagtctaagaggtgttgagccaaaagataaaagggatagccttatccagaaaaggcataagttaaagttcgaattagattatttaaagcaaaaactacaaacttttactattgaagagttcaaagctggctggcgtaatagccagttacgcgacacccaaataatgaccaaatacgcagtgccatatcttaaaacagtttttaatcgtgtagaggttcaaaaaggaagtgttgttgatatatttaaagaagtgtacaatgtgaaattaagaagtgataaaaaagatcgttcaaaacacagtcatcacgcagtagatggagctattctcacattaattccgaaagctgcccaacgggacaaaattattaaagaatatcaattaaaaaaggatgaaggcttcggagaggtttatcatgaagccccaaaagagtgggataactttaaagtctcatatataaaaaacatagaagaagaaatactcattaataatcttaaagagcatagaactttaaatgctacctttaaaaaggttcgaaaacgaggcaaaatagataaaaaagaaaatggaaacccaaaatgggcaaaaggggatactatacgaggtcagttgcacggagaatccttttatggggcaattaaacaaccaaagcgggacgataacaataagatcaaatttgataatgggaaaatgcagttacacgaggatattaaattagtaataagaaaacctctcgtgtatgctaaagatgctgcatcgccaggctttaaaagtttagcagacatagaaaaagttattgtggataaagcattatttggtttgattaaagaacaagtagatgaagctgatagtttcaagtcagcattagccaacggagtctatatgctaaataaaaatggagaaaaagtcaacaaaataaggcatataaggtgttttgataggttaaaacactcaacagccgtaaaaccacacgaacacgattttaaatctgaaaaagaatacaagcaaactacttatgcccaaaatggcgaaaatgcattttgtttgtattataaaggagatataaaaggtaaagaggagcgggctattaatatagtaggtattttcgatttagctaaattggacattggaaatgaaagtgacttttttgaaatacccctgttcaatttaattaaaaagaagagttcagaaatttccttatatgctgttctaaaatctggacaaaaagctattttctacaaagaaaatatagaggaattaaaagaacttgatgaaaaggaactttctgaacgaatgtataaaatgtatcagtttgagggagattctaataaaataaaatttaaacatcatttagtatcaggtccaaacaccgatatttctaaaaaattaccaaaagggtacaaagaagcttcaccatttggaagcttcgaaaagcaacctttgatgcggctaacagccggaaattggaattttgccatagaagaaaaagattttgaaatgaacttagatggttcaattaattggaatttataatctatgatcaaacgcactctctttttcgccaatccagcttacttaagcacaaaaaatgaacagttagtggtttctttccctaaagaaggaaaagaaaataaaatagttcccattgaagatattgggatggtagttttagaaaacccgcagattactctaaccaacggactaataaccaaacttattcagaacaaggctgcggtagtaaattgcgataaacagcacttaccctgctctattttgcaacccctcgtgggacatactgaacaaacagaacgcttttcggcgcaactcagtgctagtttacctttaaagaaaaatctatggcagcaaaccattagtgctaaagttagtaaccaggggcaacacctttttaagagaaataaaaaccataaaaaactggtgcgttgggctggagaagtcaaaagcggcgataccgaaaatcatgaagccgttgcagccgctcattattggcaaaatctttttgaaatagaaggatttactagatatcggcacggagaccctcctaacaatttacttaactatgggtatgcgattctacgagcaattactgcaagagccttaattagttccggcttactgccaggtgtgggaatctttcatcataataaatataatgcctttgctctggccgatgatattatggaaccttatcggatttatgtagatgacctggtttatgaaatagtggttgcagaagagaatattgacgaattgaccacagacttgaaatcccaacttctaaaaattcctgctttagatgtttttattgatggaaaatggagtccgctaatggtagcccttagtaggacgactaattcactttatgagtgttttgctaatctaagccgaaggattctttatccagtttaccagtaataatattcggtttggataaagttgaaaattcaatagtaactatatggatgaaaaattttcacgtttaaatcagtatcgaagtatgtgggtattagtgttttttgaccttccaacggagaccagggtagaacgaaaagctgcagctcgtttcaggaaagatcttcttgatgacggttttggaatgtttcaattttcaatctataccaggttttgcgctagtcgtgaaaatgctgatgtccataccaaacgaaccaagagaaacctaccaaaaaaaggaaaggtatgtataatgcaaattacggataagcaatttgggatgattgaactctttcatggaagaaaagaaacagcccccgaggctcctatccaacaacttgaacttttctaggattttaaatctcctactgaatactgtcaagacatctcaaaagcttcttattttttaattctaatagatcacttaaaaaacaggataccagccttttatagcgggtatcctgtgaatcctaattaaaaatacaattctgaaagcaattcacaactaggcgccagggggtacataaggtcgtcgtcctgtgaatcctaattaaaaatacaattctgaaagcaattcacaactcgcttcccaggttgaaaggggtttttgttcctgtgaatcctaattaaaaatacaattctgaaagcaattcacaaccgtatgttggcgcggttgcctgtgattcaccctgtgaatcctaattaaaaatacaattctgaaagcaattcacaactgatgattacctacataaatcatgtgttgacctgtgaatcctaattaaaaatacaattctgaaagcaattcacaacttaactcaagattggctttatccaggaaatcctgtgaatcctaattaaaaatacaattctgaaagcaattcacaacccctgttgcaaacaggtgggtagcgctatgcctgtgaatcctaattaaaaatacaattctgaaagcaattcacaactgacaagacagcttccaccctggacgctgcctgtgaatcctaattaaaaatacaattctgaaagcaattcacaacttctgaataagtttaggttttggttagtagcctgtgaatcctaattaaaaatacaattctgaaagcaattcacaactttttaattctttaatattcgcgacctggcctgtgaatcctaattaaaaatacaattctgaaagcaattcacaacttgtagtgtttgaaaatttcgtttacaagtcctgtgaatcctaattaaaaatacaattctgaaagcaattcacaactggttctttaattcctaattgaaaggcggccctgtgaatcctaattaaaaatacaattctgaaagcaattcacaacaatggtaacatttatgggattccttttagccctgtgaatcctaattaaaaatacaattctgaaagcaattcacaacgagatgattataagtcacgcaggagataatcctgtgaatcctaattaaaaatacaattctgaaagcaattcacaacttccacgtgttcgtgtcccggatcaaaagtcctgtgaatcctaattaaaaatacaattctgaaagcaattcacaaccgttaaattttggttcacaaattcaggtttcctgtgaatcctaattaaaaatacaattctgaaagcaattcacaactaacgaagccttttcttcaaaaattaaaacctgtgaatcctaattaaaaatacaattctgaaagcaattcacaacctaagccttgctgtgctttttttttgcttcctgtgaatcctaattaaaaatacaattctgaaagcaattcacaactcagttttagacaaatataccgagctaaaacctgtgaatcctaattaaaaatacaattctgaaagcaattcacaaccaactatcccgaaattgccaatgtgattatcctgtgaatcctaattaaaaatacaattctgaaagcaattcacaacccggcgtcgaaattagcgacggcgatattacctgtgaatcctaattaaaaatacaattctgaaagcaattcacaactaacggccgcctgtaattcttcattggcttcctgtgaatcctaattaaaaatacaattctgaaagcaattcacaactactggctttttattaatagctggttaaaacctgtgaatcctaattaaaaatacaattctgaaagcaattcacaacccgtcctcaggagtttcagcgtgaataccgcctgtgaatcctaattaaaaatacaattctgaaagcaattcacaaccaagaatccctacttcttttttgtattttccctgtgaatcctaattaaaaatacaattctgaaagcaattcacaaccttaacggcttcgtcgatgggaaaacaaaacctgtgaatcctaattaaaaatacaattctgaaagcaattcacaacttgcgtccagtgaataatcttcccggtaaacctgtgaatcctaattaaaaatacaattctgaaagcaattcacaaccttcggaccttaacagcctggccgaactttcctgtgaatcctaattaaaaatacaattctgaaagcaattcacaacttaccttcctttaggaataaccagtttagacctgtgaatcctaattaaaaatacaattctgaaagcaattcacaacttgcgttggcttcaattataaaaaaagtccctgtgaatcctaattaaaaatacaattctgaaagcaattcacaactatctttcccaggtcttcgcgtatcgcttccctgtgaatcctaattaaaaatacaattctgaaagcaattcacaacttcgatcgcttcttttaaatctctgtcggcctgtgaatcctaattaaaaatacaattctgaaagcaattcacaacccaaaacaacgcgccaaacgccgacgctggcctgtgaatcctaattaaaaatacaattctgaaagcaattcacaaccccagaccattctaagaagaaaggaatatccctgtgaatcctaattaaaaatacaattctgaaagcaattcacaactcttctggctttgtcctaaatagaacatcacctgtgaatcctaattaaaaatacaattctgaaagcaattcacaactcgcttattaaggtgataaggccgttatttcctgtgaatcctaattaaaaatacaattctgaaagcaattcacaacttgttgccggaatgaagttccgcaacgaacctgtgaatcctaattaaaaatacaattctgaaagcaattcacaacttttgaatggccttgtaacccggcgatattcctgtgaatcctaattaaaaatacaattctgaaagcaattcacaacccttgaaaggttcaacccttagccgtcactcctgtgaatcctaattaaaaatacaattctgaaagcaattcacaactatttggcggaaatttaaaaatgcaaattgcctgtgaatcctaattaaaaatacaattctgaaagcaattcacaacattgtaaccaaattggtttacgtaaatcctcctgtgaatcctaattaaaaatacaattctgaaagcaattcacaactgcgcccgaagatatggtaaagccatttatcctgtgaatcctaattaaaaatacaattctgaaagcaattcacaacgcagcagctatggatagtctaaataaagtccctgtgaatcctaattaaaaatacaattctgaaagcaattcacaactggtttagtaccagtgaagatgtagcagagcctgtgaatcctaattaaaaatacaattctgaaagcaattcacaactgatcccttcttgtatttcgtcttccataacctgtgaatcctaattaaaaatacaattctgaaagcaattcacaactcataatgagtgagtattaattgttgaagacctgtgaatcctaattaaaaatacaattctgaaagcaattcacaactgctaagtggtaatgatggagaaagcgcgcctgtgaatcctaattaaaaatacaattctgaaagcaattcacaacaggatattcattataatttttatcagccttcctgtgaatcctaattaaaaatacaattctgaaagcaattcacaacttaagagcgcaaggctttcataagaatttccctgtgaatcctaattaaaaatacaattctgaaagcaattcacaactatacttgaagtataatgacatatctggacctgtgaatcctaattaaaaatacaattctgaaagcaattcacaactcaggagctctattctcttctttccatactcctgtgaatcctaattaaaaatacaattctgaaagcaattcacaactgcgcccgaagatatggtaaagccatttatcctgtgaatcctaattaaaaatacaattctgaaagcaattcacaactctatggttttagtattatcaaaaacaaatcctgtgaatcctaattaaaaatacaattctgaaagcaattcacaacctacttcttcagagttaggatatttagaatcctgtgaatcctaattaaaaatacaattctgaaagcaattcacaacccccgatttcgctcttttattgattttttaacctcctctttcttttgagtggttttgaggttcagaaactcttccaggttatagacagctcagatttcgcgacagagaaagttcctttatcatatttttgctttacacgttcagctgctaccgcaaagagagattgagaacctcctggccctttaagtttgtttttaatcttgaaattaaaaaaatttacctttaagcacttggctttaaaattctaatattagcagtggtagattattcacctacttggttgttttatgatttgggaacaaaaatgatttcattagattgatctgaaattcattctactaagtctgaataggggcttatttgttcttctgaaaattcatctcacaaatgataatccgaattctgtaagatttctttgattttaatgtctaaatacttgaatattagtacctttgcccaagacgatacaaatggcatcaaaatttaggttcacaaatcgtcaacatagaaaataagttatcagtatttataggctatttgagaaatcggtgaatcctggcaaggtcacaaaataaaatcctaataggcttatttataagatgttaggatttttttgtttttaattgtgacagttatgtgtcccttacaatagataattcatgcttcaggttaatatcatggtcttttgcagagccagggtaatttcaatgccgtccagctcacctttaaggttgatatccagtagcaatatatcaggtggttgatatttatgtgtgctaaagcttcttcaaccggggaagaatttcggtaactttttatcccagtttagtacgttgtaagaagatatttgtagcaataaccatctcaacttccacaatcaatatcttaatgctttcgctcattatgcgcttttttggagaagaaaatcaaattcaatatgagttccttgatcactgcgttctctcatcttcccatttagttgcagggttaatagttctaccaattgcgaaccgaaaccggtgcctttgggagcaagacctgctgttttcccgacaccattatctgtcacctccagtcttaaattttgattactgtcctttgccagacttatatgtataacaccctgttgctgttctggaaatgcatacttaagggcattagtgagcagctcgtttacaataaggccaatgggaacggctgtatcaacatccagttccaggttatccatagcgcattcaatttttacacgctcttctgcattaaaactgtcgagaataccttcacttaggttgatgaagtaatccttcatttcaatacttcccagatttgtcccttgatataatttttgatgaataatacccatcgattgtactctgttttggctggcgatcatagcgtctttagtggcagggtcatctatttgagccgactgcaaagcaatcaggctttttaccatttctaaattgttcttcacacgatgatgtatttctttaagaagcagttcattttctgcgttgtgtttatcaagcaacacatttttatgggctagctcttcatttagtgcttttagtttttgattactcctttgtttaagtctgtaattacgatataatagtcctagcaataaagcaccaataattaaggcaacaatataaatagtttgttgttgccgcttagcagtaagctctttatcttgcttgagcacattcacctgtaattcattttcacgaaggcttctttcgtttctttctacttcgataacgttgttagcttccgaccactctatatgatattcaagagcggtcttataatctcctttgagggcatacaatctggataattcttctataaagtaggctgtatttaccttagtatttatcgcgattgaggagttcttggcaatttcataatattctattgctttatcgtatttaccttctgccttagcaatcttgcctaacagaacatgcgcgaattgataaacatcaatagttcgtaggttatactcctccaaaaattttatggttttatataagtaaggtttagcctcttcgtatttttccttttgaataaggctgctacccattgaataagaatgccaggtatgatgaaagggattagtgatttgaggtaataactcttctatttgatgcatataatagtcacttgaatcaggatctgactctccgtaatggtaaaataacaatttgtaggcaacaacaagagcctcattcttttccggataatctgaattctgatagccaatcatactttcctttaaaaattgaaaagatttttcttgctcttccggcaacccatattgataaagaaatctgcctctatctttcaatatcttaagctgaatctcaggccgattatcatcttttagcaagtccagggcttttacaaaaagctcgagccccggttttggctctcctcttataatttttatcaacgcccaattaatcaatagatcataacccaaaaccttatcttttttgttttccgggattttttcataataagcccaacctatgggtgccagcgaatctactacgttaaagttatgagacctattagctctatctgtgatatcacgatacaaatcagccaaacgttcatattgtagaggcttgctattttgcagtagtagcgcagccctatcaaagtaaaaaacagtactgtccctgttaaaatggggcatttctttaaaccacaatgccttgtcctggtaggctctactcaaagcagcaacttcatctgaagaaaggtcctggtcaagacttatttcaactgcagtttttgcactatttttaacccggggactttgggaaaatccgctcacatgcaagagcaaagcagtacaccatataaaggatttaaacaaggagttgatcatcgctttgcttgttagattgatatgagtgattccttttgtcattagattttaaatgatacacaacagaactcggtgaaaacaccccattataagaatgcccgttggctagagattcgtgaatttgagcctgcgaaaagctaaagccggaacaaatacaaccagtactatggcggaaattattttatacatatcactaaataaactgggggaagaaaaatattctagtaattagaaatatacgacaatcccttcaaaaaaattatgtttaaatcatttaagtaactgaaatacaaaaaattagtttgttaaagaaaggttcctttttaattttgggaaatttaaactatgggtgctttatgtgtttccataatcagactcggctaaattttaatatttttacaaggaattataacaattgcttttatccttgtaattagctctttattattgagagaagtataagatataacaagtcgtagtaaataaataggttgaagaaatttttcatttttatatcagtcttgacattgctttatagttgcgatgaagaattcaagcctcttaagtttgaaaaacaagtagcatataaaatttttcctcaattaatagattcacttcatagagacgtaagagttccaattccgccacctccttttatacgtgataataatgcggatattttagcattagacaccattgaatctaaaaaaaaatgggaggaatatgaattactgaaaaagaaatattataaagattcagtaaaattggttatcgctattagtgactccacatatttattaagtaaaaatgataaaaaagcttttctaaaattctataagaaggagaatattgaattagattcaacaaaagttgattctagatataaaatcattttagatagtctaaacgcagataaaaagctaaaattgaaatatttatcagaatttccggaaggatcagaaatatggagtcaaaaaaatgagtatgatttctttttaaatggagctactggatttagcagaataaaatttgataaaacatattcttttggagtgctaacaagtaattattcaatgggaagattgaacggatttggagtaagaattttcataaagaaggtcaatggtctatggataattgataaaatagaaacaacaactatttcgtgacagcatacctgcaaaaacaccacatattcgcaatttcggctatcctgcgagaagagaatttatagaaatcaggcagttctaattaggggaagtttgcaaaaaaaaatcctaaaaatgcttcctgtaagtttgtcaagcgcttgtttcctgaaaaatttccaaatattagttttcctcattttccaggcgataaattatttttttcatttgagcaatctctcttttttgagctgcaataatttctttagcgagttctttggttttaggatctgttttaaactatttacagaaataagaataagaagattaatcaaaatgtttttacctttagaagtctgaataaaatttgtaagagcctaaattgatgtctggaatattattatttattggaattgtcttattgctcctcgcaattcacgacttttttttcacaaccctttcgggtagcggtacagggttcttatccaggaa

SEQ ID NO: 304 - DNA, 24254 bp, synthetic construct
  misc_feature 1..24254: note = Synthetic
  source 1..24254: mol_type = other DNA
tctacttccggccgtaatgagagatgaggtatttataaacaatattaagctgacttccaaaagatcttcggaacccagttcttttaatacagcaataccaggtgacttactgatgcctcaaaagctgatactccggactatgcaggaggttattcgtgagaaaggagcttcgcttctccggtattatccttctaatggcctggaaccattgagaaagcttattgcaaaacagatgagaatgaatggttgtgctttcaatcctgatgagctgattattacagatggtgctttgcaggcattgaccattgcattgcagtctgtaacgaaagcaggagatgtggtcgctgtagaaagcccatgtgtattttcagtgttggaagttcttgtcaatctgaatctcagagtagttgaaattcctgtgcattaccgaagtggttttgatcttgaatattttcgtgaagtatgtgctgaaaatggtatccgggcacttgtggttactccaaattttcataatcctaccggcattgtgatgagcgatgaagtcaaaaaagaattattgaagattgccgggatgtatcaattgtgtattatcgagaatgatatgtattctgatctttattttaatgagaaaagaccgcgttgtatcaaaagttttgataaaaaaggattggtgatcacctactcgtcattttcgaagacactagcacctggtattcgtttaggatggttgcatgcaggtaatttttattccaaggcggaaaagtcgaaatttattttagggcgatccgtttcacccatctaccaggaacttatccttaagctgttagaaggaaacagttatgaaagacatcttcgttccttccggaaaaaattgaatcaacaggcctttcaacttttagatcacttaaggaaatgcttcccggaaggggcttattttcataggccgcaaggtggatacagcatctggggacaacttccggaaaatatcgatatgaaagaattttatgagtattgcgaaaataggggagttctatttactccgggagatacattttcattcacaaaccgatataatcatcatttccggattgtttttgctgaaagaattactcctgaaagtttacgcttattggaaaaagccggaagaaaagcttatgaacttctgctttaacgatgatgaatcttcattttaatccgttttacccaagattttgatgttaaaactcgttttaggctattttattttgggaatagatgtagagtagaaaaataatcatggaaataagaaaatgtctgaacatttgtcatacgaatttggcctgaagttaagtggaaataaaatctatagttctaatatacttgttgttacgtattttttgttgctggaatgttgatctatgcagggtttatggtataatctcaattttatttttcattttaaattaaatccattatttgtgagttattttcaattaattatcattttttttctggcacaattaggctggaatcgccataaaacctatatttgcagcctaaatttttaaataaatgaaagaactaattgaaaaaatcaacgcagaattcgaagcgttcacaactgaggcaaaccaacaagcggaaaaagggaacaaagcagctggtacaagagctcgtaaatcagctttagaacttagcaaactgttcaaagaattcagaaaagtttctgtagaagaagctaaaaaataattcacctttaaccggcttttgaagccggtttttttatccctgtgttttcgttacgattcttcttacaggtactgatcttccatttatcaattccgggttatattggtattactcactttatagtcttttgccttttatctatatattaaatttttctttccgaatagcagtaataatctgtataatgtgtattttagaaatataaatgatatacaggatgatgaaatattattatttgttattagtcttactttttgattttttttcggctcaaaaaattagagttgtggattcagaaaatgggaacccgattttcaatgcacgaattcttttgatgaataagatcgtctataccaacgaagatggatgggcgccattagatcaaaatgctattaattttaaagtttcagcatcaggttttcaacaatcaaaaattgatgaatttcattctgctgtaaaattaaaaaggatctataaaagcattgatgaagtaaaattaaccaaagtaaatattagcgatatttttgaggatgtaagcaaaaactatagaaaaaggtattatgctgaaccttctctttatgatgttatttataaagaaaaaagaagtgataacaataaactttatttcctggttattgcagaaactaaattatggagcaaaagcaattattacaaccacaacaaaagctatgataagaatcttcagatgcagcttaatactttaaagtacttgaaaaataaaaaatcagacagtatttttactgcaggaacaaaagaattttctgatgaatctatgggaaattattttttcaattttgaattggagcgggtactaagccacgtgagaaataaagaatcaaagaattcaggatggatgatttttgaagaaggaaatgagcaattggttacgtttacaattaaatccggattgggaattgaaatggaaggtgaatttaaatacaataaagtagataaagttattacctactttgaagtccattatttacaggatcaatatccattaatgaaaagaaaaaccggagaaggtgaagaatatgactatcaacttggaaatgctatacttgtttttgatttttacaaaaatggagaggtgtatgttccggcattaagcagacttgaaggaaataaatatatcgcttattacaaaggggtaaagcatgagcgtaaaatcagccgggagcttatctataatacctttaaaaaatcagatgaaaaaggactcaatcccaaagttgattttactaaaaatatctgggataatattccggttaatgaaagtaaaaatacaactattttactttccgcggaagagcaaacctttatcaacaggagattaccggatttcggatccaaataaaatgcagttttttataatctgtgttgtaaataatgaggttctcggttggtaatgcattaatgttttaataaaatacgttcattatttgaattaaaagtcttaaaataccagtgtttaaagacttttttacctttattcctttaccatctccacaatttcctttatctttaaaccaatcaatatatactatgaagataaatagattttttgcagtaccggctgtagtgttggccgcccagttttcatgggctcaggtaaaagtggatcaaacagaaaaactggatcctatcgtaaaaagttttgtagatgaaatcaacagcaattcccaacttgaaaacatggcttacgagttattggatgggatagggccacgtttggtgggaactccggaaatgttggctgccaacgaatggagtgccggcaaacttcgctcatggggtgtagatgccaaccttcagcaattcggaacctggaaaggatggcaaagaggaacaacccatgtagatatggtatctcctcgtacaaaatcattatcagcaacacagctggcatggagccctactaccaaaaaagcaattgaggcagaggtaattattcttcctaaagtggcaacaaaagccgaatttgaggcctggcttccttctgtaaaaggaaaaatagtgttgatggcacaatatcaaaagattggccgttcggatgagcagatcaaagaattcgcaactcctgaattatatgagaagcttaaatccgaaaaagagcaggctaccaaagactttgctgcttatataaagaatatcggttatgacaacaatacccttccggaagctttagaaaaagcaggagcggcaggaattgccatctcaaactggacaggaataatgggagccaacagaatatttggagcgaaaacatcaaaaattccaatgattgatattgatgttgaagattatggaatgctatacagaatggcagaaaaaggagctcatcctaaaattaaaattgacgcccaatctaaaatacttccggaagcgaaaaactttaacacgatcggaatgatcaaaggaaaagaaaaacctgatgaatatgtgattctttctgctcaccttgattcatgggacggagctcagggagctacggataacggaacaggaactttaactatgcttgaagcgatgaggcttctgaaaaaatattatcctaataacaaaagaacaatcgttatcggactttggggaagtgaagagcaaggcttgaatggttcccgaggttttgtggcagacaatccccaaattattaaaggagtgcaggctgcttttaaccaggataatggaacaggacgtgttgtgaatatcagcggacaaggttttgtgaaagcctatgattatgtcggaagatggttggaaggtgttccgaaaaacgtacgaggacacattaaaaccgatttcccgggaatgcccggtggaggaggatctgaccatgcttcgtttgtagcagcaggagttcccggaatttctttaggctctttgaactggggatattttggttatacatggcacacgaccaaggatacttatgataaaatcgtttttgatgaggtaaaaaataatgtggttttaacagcagcattggcttacatggcatcggaagatcctgagtttgtaagcagagaaaaacgcgtaatgccaaaagatgaaaaaggagccacggtacaatggccggaagcaaaagagccgagaagaagctcgaaagattataaataaaagattaaacttaataataaaactatagtaaaggttgccggatagggcgaccttttttaatttattaaaaaaaatacgtcaagttctggcgttatcagccagtacatttgttttaagaaattcttgcaagaatatatataacctttaattttttaaaacgatgagcaatacacttaatttgttggaaacaggtgattttccaacctctaatattaatgttaatcaagtagaaatggtaactctgattgacaagtacaccaaagaaatagttaattttaaaaaagcttcttcaggaccttcggttatagatggaattatgtatctcaagaaagatggggtattgtttgaaagaatatataacggagtaatcaatgctgaatggtttggtcccggaaaaacaaatattgaacttcaggctgctattaatgctgctattaagagcgatacgattcttataaaaggaaaatacagatgttctgatcaaattaaaattaataaagatataatgcttttagggcagaattatatcaacggaaatgatgttggagataatgagggatcacgaattatttttaacgattttaccaatcagattgccaattcctgtatcgaagcggtagcgagcttgtgtatcaagaaccttgctgttgttggaagtgagatcccgggaaagatagggatcaacttgattggagtgccgaatggcaccactgatccaattggcagtcttacattagattctgctatagtacaagattttgaggttggagtaaaggttacagaagggtattataacaggtttgttaattcttatatcggatactgtacgacctgtctggtattggataaatgttataattcatttgcaagttcattatcaataagagcagggtattatagtaaaaaaaatatagataatggcgacctgaatgatggaattgttttatataataaagccaatctgacaatgtttgggggaagtgtggaaagcttttctaatgccggtattactttatattcatccagagtttcgtgttttggtgtttattttgaaggtgagaaagcaaatgataaaacctcatgtatcagaatgatgaataataattgtagatcaactactatcggctgtcatacttatttggtgttgaaacgtacaagttcatttattcatgttttacccacggtaacctctgcacatgtctattctaaaaataatcattttgattatgagaataattggtatacttcggtatacaaatttgaagcaaccgattttgaaggatataatatcgatatttctggggataattatcaaaatggtcttaatgcagggtcttcttatatctcaattacttcttccttacttaagaaaggaaaaggaatgattcaaattatttatccttcaggacatgaactggccggacttaagttaaccaatttgaatacaacatctccgtatcagtacaatactgttacgggtcaagaaaacggtatgattacaacatttgctaattccggctatccaggtgatgatccggcagggctttatggacaaattggctacacgccttatacggctgtctttgaaaatggctcgtggaaaaaaattcctaaattataaattgataaaacttataagtttaataaataaaagggttgtctcaacagacaacccttctatattttattttcgaaattaaatgtaaaattttatatccggaaatgttgaaaccgaaggttcatattgactttcacttaattttccaaaaccgtattgacagaaaataaaagctagctcattcgtgctggcagagtcatgatctgtctgtgtgtcgccaatgtacacagattcttccacggataggtgattcctttccatgactagctgtatattttcggactttgcttttcttgtacggccatgggattcaaaatctttgaaaagatgattgaactggtagtattctaaaaaagattcaatatatccgtcctggcagttgcttacaataaagagattgtgagtactggcaagactttttagtgtttcttctacaccatcatataaaataccaccctgaatgcgcaataccttattttcctgtgctacaatttcagaaagaatttcctcaacttccaggtccgtaattccgggtacaatagccggtacaatatctttagctaataaacccatatactgatccatgtcttcgggtttcaagtctttttgaatcagttgatgtctttgcaaaacatcattccatattttaataatggttaatctgggatcccataaggttccatccagatcgaaaattaaattcttatacttcaaagtctttcttgtctaattttgtgaataataacttttttgatttttaacaagcaattatttaactattaagatacgttcagagattaaggctaattatggtaaaatcaaagatttataataaagtaaagcttgacttactattctaaaaaccttaggatatcttaatgattaaataaagtatacttataaaatcatactcaattgcactctttttctcgcctcatcaacttccgttacctttactcttacatgttgatgaagttttaccacttcattcacatcagagacaaagccttctttcaattgagaaatatgaaccaacccgctttctttgattccgagatctacaaaacatccgaaggcggtaatattgttgacaattcccgggagaatcattccggttttaagatctttgatgcttttcacatgagggtcaaactcaaatactttagctgcttttctcggatctaatcccggtttttcaagttcttttaaaatatccttgattcccagtattccgatttctccggttatgtagttttccggttttactaaagctattttttctttattggctattagttcatcggttttaattccaagatctttggccatcttttctacaattccgtacgcttccggatgtacggcagaattatcaagcgggttttttgcatttgaaatccttacaaaagcagccgcttgttggaacgccttatcaccaagccttggaaccttcttcaattgttttctgtcctcaaaacctccgttttcagcgcggtaattgacaatattttctgccattttctcaccgattcccgatacataacttaaaagagatttgcttgcggtatttaaattaattcccactgaatttacacatttcatcacagtagaatccagttcattttttaattgactttggtctacgtcatgctgatattgtccgacaccgatagacttcggatctatttttaccaattccgccagaggatcagaaagccttcttccgatagaaacagccccacgaacggtaacatcatagctagggaattcatctcttgcgattttgctggcagagtaaaccgatgctccggcttccgatactacaaaaacctgtaaaggcttgtcaaatgcgatttttttaatgaaaaactccgtttcacggcttgcagtaccatttccgatagaaatagcttcaatattataagcatttaccatggatctgattttcttcattgccattccggtctcattttgcggagcgtgagggtagagggtttcattatgaagcaaatctcctttttcgtcaaggcaaacgaccttgcatccgcttttgtaaccaggatcaatcgccagaattcttttttctcccaaaggcggagccaataataactgactcagattttcagaaaatatctgaatcgctttttgatctgctttttctttggcttcctgaagggcttcatttgaaatagcaggctctaaaagtcttttgtagctatccttgattgccagagaaatttgttcagaactttcattattagatttgataattgctttctcgatgaaatcgatcgcttcttccttgtcaattcctacattggttttcacaaaaccttcagattctgcccttaacattgcgagaagcctgtgagaaggagttctgctaagattttcttcccactcaaaatattgcgagaatttctgggcatcttcctcatcttttttagcctttaccactttagaagtaaccatggccttacgttgaaaaatccggcgaaggtttttacggacatacatattttcattgatccattccgccataatatctcttgcgccctgaagagcttcttcttcagaggaaacgtccttattaaggtattttgaagccagaaataatacctcattattcttttggctcataataattttggctaaaggttccagtcctttttccttggccgcatcagctttggtttttttacgttttttgaaaggcagatataaatcttctatttcctgtatatcaaagctttcttcaattctttgttgaagctcaggcgttaaagcattttgctcttctattgattttaaaatggattctttccttttaacaatttcttcgaactgtttgctgatctttgaaatctgctcaatctgtatctcgtccaggttaccggttctgtcttttcggtaacgcgaaataaaaggaatcgtgcagtcttctgccagtaattgtaaagtattgttgatgctcttctcagaaatattgagttgcttctgtataaattctacggtcgtcattgttctgttttcggaaagctaaaataaggttttggaatgagaaaaatgaaaagaaactactttccttcaaataaaaaatccctgtaataatacagggaatgcaattcacaacttatataataagtattataaaaagttttaataaagaaagctaaacctttagaaaaggtcaggaataacttttggacggtgattccagtttacttccggaagtaaattttgctttccattgtaaatttaattttatttattatataaacaaccatttttattcatatttttgaaaaacagtattttaaatgtgaaaattatgaaataatagtaaaaaaaatcccacggagtacgcaggactaaagatattcttcggcttatagccttattgtgaattgctttgttcaaagataaaaaataatttcattggaagaatatgggaacccgtaattgctaaaaaatatttattcttatttttagaatttgataaccaatagatacaagatgaaaacattaggaatcgaccttggaaccaacagtgtaggttgggccattagaaatacggaattacaggataatcaaatcgaagattgtggcgtgattacttttgaaaaaggagtagcttcagaaaaaggtatagaatttccaaaggttcagaaacggacagagagcaggggcaaaagaagaaattatcaagctgaaaaatatagaaaatatgctctgttagattttttaatagagaaaaaaatgtgtcctttaacaatagcagagcttgatcgctggagaaagtatgaaaaaggaaaacatagagaatatccacagtctaaagagtttattgactggttgagatttgattttgatggagatggaaagcctgattttcatttgtttgataaagataaaaatgaaagttattatgttttccgggcgttttctattgaagaaaattatatacatgttttcaaaagtaatcctcaaatcttaggacgtgtcttatatcaattggttcaaaggagaggatttaagggaagggatgaagaggaggctaaaataatacttaacggaagtgagaaaagtggtacaaaaggaagagatgaaatagaaagttttattgattcttatagtacgttgggggccgcattgtactattatcaaaaagaaaatggaggaaggatcaggcagcgttataatcttaggaaagattatgaagcagagctgagacaaatttgtaaagttcagagtatttctacttcagattatgagaaactttggaaagctattgtctggcaaagacctttaagaactcaaaaaggattagtaggtaactgtatttatgagaaaaataagagaagagtagcagtaagtcatccactgtatgaagaatacagaacatgggtgttcatcaataatctaaatattgtaccccctccggatacagaattgtcagattatcttcatgaaagaatttatccattgttttataaatcaacgccagattttgaacttaacgtgattgataaacaacttgcaaaagatgaggctaaaagattatccgggcatgtaggtaaaacaaaagttatatccgtaaaactattgaagagttttcatgatgttttcggtgaaggttggagggggaaattaaaatgggatattaatggagatagagctgtacaacccctaaaaaaggatcataaagattacactttcgacgatttatggcatatacttttaacttttgatgggcaggaaaatcttaaaaagctggctgtagagaagttgaaattagacgaagagaaagctataaaattttccaaaataaaattacagcaagggtatgcaacattaagcttatctgctgtgaagaaaattttaccatatcttcagaaagggtttctgtatagtcatgctgtctatctggcgaatttgtataaggttttgggtgaaaatgtgatatcaggaactttaattaatcattttgcagaagaagtgagcctatttttacaaaaagattctttgaacagaaaagttgcagctattgttaacggtcttatttctgagatgctcaatagtaacgaaagatactatatttctgataatagagatctggataaggatgaaaaagaagcaatattgaataagattatagataactacggtttattaagttgggaaagaatgaatgaaacagaaaaatcagaggtaattgagaaggtttcagttcagtatctggattttttaaaaaagccaataacattaaaaagtaatctattcataaaaccaataagaattcatgatcagattttaaaattcttacaagatacctatcatgtgtctgaggataggaagaaatatctttggcatccttcagagcaggaaaattattctgaagctgaggattattttgagtattctattggtaagaaaatgtattatttaagagaaaatgaagttcctaaatttctttataaaaatcctgatgctgaatttgaaggcaggcagattaagctcttggggaatctagaacctttaagcagaggttttaaaaatccaatggcattaaaatcattatataaacttaaaagccttattaattattttttacagcaagataaaattgatgaagaaaccagagtagtaatagaaatagccagagaactgaatgataaaaataaaagaaaggctattgaaatctggcagaaagaaagggaaagagaaaatgaatcatatagaaaagaaattcaagaatatagagagcagtttcctcatattgctttaatagatgaaagtaccattatacgtaaattaagactatggcatgagcagaataagatctgtgtttataccggaaagcttatttctataacagatttactatctaacaataaatttgattttgaacatactattccggcaagtataagctttgataacgaacttaaaaatctgaccatcacagacgcaacttataaccgattgtataaaagtaacaaatttcctacacaattgttgaattatgaatctgagtcggctatcaatggagagactgttagccctattatcagaaatattgaattcctttttggagaaaggactattgagcataaagagataaaaggaaagaccgagacaattataaaatggaaaaaaataactgagcttgaaaagcaatatgatgattggaagaaaaaagcatcttatgcaagctcaaaggaaataaaagataactgcattattaagtatcataccattaagatggatttagattattggagggctaaactaacatcctttaccattactgaatataaagcgggttggagaaataatcaacttagagatgctcagattattactaaatatgctcttccatactttaagaccatatttaaaaacgtttcagtagaaaaaggaagtataactgatatttttaaaaaagtttataaagtacaatcaactaaagacaaaaaagatagaagcaagcatagtcatcatgctcaagatgcagctattcttactttaattccgaatgtttttcatagagaaagaattattaagctgtatgaggcagaaattgataagagaacaggtaatatttatcacgaaaaacctttgggttgggaaagtttctctgaaaaatatatacaggaaattcaaaataaaattctaattaataaccttgtggataataggactgtgactcaaacttataaagttccaagaagaaggggtaaaatagatcatatcaaggctcaagatgaacaagggaattataattataaacttgatagcgaaggacaaaagatacctaaagtagcaaaaggcgatacgatcagagggcagttacatggcgaaactttctatggagcaataaaacaacctgtaagaaatgatgaagatcagattctgtttgatgaaaataaaaaaatgatcttaaaggatgatatttttgttgtagtgagaaagccgttgctgtataaaaatgatgctaattctccaggtttcaaaacaatagaggaaatagagaagatcattgtagataaagccttatttaaaatgataaagaagcaagttgataactcggatcttaaaacagctcttacagatggggtttatatgttaaatgctgaaggaaatgaaactggccaaaagataagaaggatccgatgctttgaaaaacaattgaaatataaaactgcagtaaaaatccataaacatcagtttgagtctaaaaaagattataaaaaggcaaccctggctgttaacggagaaaatccatactgtcttttctacaaaagtgatgaggggagagcaatgaaagtattgtcaattattgaactctcagaattaaaacttaaaaatctgaaagatctctataatgagcctgaatttttatcatctgaaactggaaaagggaaaaataaatctgctattccgttatattcaattttgaaaaaagaagataaggtcattttttataaaaattctattaatgaattaaaagatttggatactgaagaattatcccgaagaatgtttaaagtttaccaatttgaaggagactcaaatagaatgaaatttagacatcatttagctgcagggatagacaccgaattaaaaaaagaaaataaagaatattcagcggttgattttgaagaaaagcagatgtttttaagattgagccaaggacaatggaattttgccattgaacacaaagattttgaactgacactcagcggaaaaataaaatggaatttataaaatgatcactcgttctatatatattggcaatcctgcttatctcaaacttaaagatgagcaaatgtatattctggatccttctactaaggatttgaaaggtaaagttccggtagaagatttaggagtgctgatgctggatcattttcagatcacaatttcacatcagttgattcagaaaatgatgggaaataatgtagttgtcataagttgtgatgctcatcatttacctcatggaataatgctgccaatgtatggacatacagagcattcagatagggtgaaagatcaactggaagccagtgaaccactgaaaaagcagctttggaagcaaactgttgaatgtaaaattgagaatcaaaaagaagtgctcagaagattagggaattattatggacctatggttgagtaccagagaaatgtaaaaagtggtgatattactaatatggagggaattgccgcacaacattactggaaacatctgattagtcttgattttttgagagcccgttttggagattcacccaatcagtttttcaattttgggtattcagttcttagaagtattgtagcaagagccattattgaaacaggattattaccggttctcggaatctttcataaaaataaatacaatccttattgccttgcagatgatttgatggagccatttcgcccatttatagatcttttagtaatgcaatggcttgaaaagtggccggaaacagaagagctcgataaagaatttaaggcccatattcttaaagtagcaactgtagatgttggaattgatggaaaaaccagaccattgctgattgctgtaaaaataacggctttttcactttataaatgctacacaggggaaaaacgtttgatctcttatcctgaactattatgaacgccgaaaggtttaacgcctatcgtattatgtgggtattggttttatatgatttaccgactgagaccaaagcaaatatgcgggatgcaaatttgttcagaaaacacttactggatgatgggtttaccctgtttcagttttcaatgtatgtaagacattgcccaagtcgtgaaaatgctgaagttcatattaaaagagtaaaaggcatgcttcctaaagctggaaaagtggccattatgtgtattacggataagcagttcagtgatattgagatcttttttgccagaaataaagaagaaccaccaccaaccttccagcaactagaattattctaatttttaaatcctaaataaacaataaatccgttgaatttcaacggattatattttgaggttgttgttaatcacaaagttagtgatttatgaaagcaattcacaactacgttgccccgtttgataaaattccagttgttgttaatcacaaagttagtgatttatgaaagcaattcacaaccagctcacgaatgtaccatttcaaaaataagttgttgttaatcagaaagttagttgtttgtgaaagcaattcacaactaatcttcataagaggtactataagtcatagttgttgttaatcaaaaagttagtgatttatgaaagtaattcacttgtggattttgtgaaattttagtttttctggttattattttatatacaaaatataaaaagtttttgagcaaaaaataacccctgttaatgcaggggttttattttgataaaataattaaagcattgtttaagcaatgaatatgatattctttgctcataggatgagtaaactcacttcatacccgtatgttattaaatgcctcaaacgttactctgttcgagcctcttttttttaaattgaactcttataatctttggtatctctctttctatttcttccatgcttttcacggagaaagatgagattaaattggttattcttcattttttggtttaaaatttttccctgctccttgtcggagaaaggtaactttgccttgcactttctttgctttttcaagaatttctaaggcctttgttcgctcgctaaccttacctgcgtgtgttatattgtcctgaagatcactttttttcatatgttaatatagtgattttatttgacaaaaacaaatcattttaaagtaatatcaaattgtactttgaaaatgttcttcatgttctgacttacttttatattttttcgtgggttttcgtatctgctttatgataaagttttttttgtatttctaaaaatctttcagctattctctattcttaaccagtacccagccattatatctgactgaagttttacttttattattttcatcccatgagatggtgtaccagtacgtggcggtaggtagtttttttccgaaggcggtgccgtcccatttgaagtttcgtactttatctgcactgtagagtttgtttccgtatcggtcatatacttcaaataccagattttttttgtaggctaaggcagaataatcaatactgtcgtttttaccatcatcatttggagtgataatattgattaaattagaaaccgtcacttctacagataccggaatacaattgtatttatcttttacatagaaagtatgctgtcctcttttaagattattaaaaatattagaatcctgccagttacccgtttgatcaacagcatattgatagggcggagtacctcctgtaacattgatggtagcagtgttgttggtaatatcgatagatttgataactgggttaggtgatgggtatacttttacaatttgtttcgtaacacattctccgttttttaaattaacccaataagttccaacgcttacattggtaatttgctgggtggttgctccggtgctccattcatatgaagtaaatcccgggccggcatcaagcgttgttttatcctcgatacatataaccttatcgaccagtacagaagagatcttaggaggaatcacttccagagtaatttttgctactgcaaaacaaccgttgctattagtaactcttacgtaagttaccccattgggagcaatgtaggttgcgggattgctgatctcattagtcgcattggtagcatcagttaaagagggataatacttcttagtcatccctgtttgagtagtaacattggcattggtaagattaaaagaagcagtagaaggattggacaaaatataacacgatttaatattggtgtcattaacaataggaatactgccgatagtgaccactgcattctgacttaccgcattacattgggaattgagagaagagccttgtggtcccactttaaatcttacccaataatttcccggtggcttaccattagaattaaaagtgtaattaggattagtggtaggtgttccctgatcaatccatgtagctccggaatctgaactgtattgccacaagtattcagcagggttgtatgagcttccggttaatgtggctgtaaaattaacggtagaattctgatttgggcacaaagttgtgcttgctccgggtaaagcctgaatcgttgatggaatacaaggagaaacggtgatatcatcaatagccagatcattaccgcaaccattacctactgaattgtttataaattgaagttttacagaagaacttgaaccattattaaatacaatagagtattctgtccacgttgagcctacgggaacatttcctgtagctgatgtgccgagtacaacgccagtgacaggatcaacagcttttagtgtcatattaggaaattgataattaggagcgcaatcgcttggagtattggaattgtttacattaaggatccaaagcgatagttttaatgtagtatttgaacagagattgttcataacatattcgagaaaaatagtagaagcggttgatggagcattaatcaataacatgagcccgttgggatttcctgtatgatccggaacatctataaatccatttcctccggtagtaggagtttttaccaatccagagtaatcatcagataaagcacctcctccaggtgggccggctgttcctacaaattttgttgaagtagtagcgcctggagcgtaagtagccaaaggcccataccatttatctgtagcatttccctgtccgaaagtttgattaacaattggtggtccccaggttcctgcacatgtttgagcagtatataaagaaaaattaaaaatcgaaaataagcaaaccaatacagaaaaggctttcttgtgtagaagtagtgtttttttcatatcgaaaaagtgtttttttaatggatgattttatatccgggctgtgttttaaaattttttagtcttatttaaaattgtaattttcaggcttaattaaaagttatagtaaattttaagaaaagctgtagattttgatttaaaatttatattaattgtgttaaaattgattaattatttatgtttttaattgtattttactatttttattgtttaatttatacaaaattagcaatagttttcaattgtagttagttttaaatataaatttttgaatttttacaatgtcatggtaataatcgtcctaaataaagatgtttaggacgatagtctgaagataaatttatgattggaaaagatgaaagacacgagaaatgttcatttcttgatatatgataagatggtggcaaaaatgtttttatatttttgaaacctcaaaagacataaactttttaaacagttcaataatatgaaaaaacttagtgtaatcgcattagtaggagtaggattgcttgtagcatcatgtaatagtaaagaaaaaacagatacagcattagctactgagcaagccgttgcagaaagcaaaggagaaatattggcagtagatactacaacttctgtggtgaattggaaagctttccataaaggtggctttgctccgcgttggggaacattgaatgtaaaatcaggagacttaagcattgaagcaggacaggttgtagctggaaacttcaatattgatatgacttccattaaagttgacccggcttcagttactgaaaaagataaaaaaccagctgacttagaagctcacctgaaaaaccctgacttctttaatgtagaaaaaaatcctgtttcagactttaaaattacaagcgtaacagatttaaaagaagcacctaaagatgctgttgcaggagcaaacaaaaccgtaagcggaaaccttactttattaggaaaaacaatgaacgttacgttccctgctaaagtagatgtagtagataactcagcgactgttcaggctaaatttacagtaaacagaaccgattggggaatcaaattcggtacttcagaagcagatcctgcagaatggatgatcagcaaagacatcgaaattgctatcgacgttaaagcaaaaaaataattgaatacaatttcaataatcattaagctgccttttttaaggcagcttttttgtggtatatatttaactttttttaatattctgtaacccacagtcggcattatattttctcttattctgattaaacacctaaaatcataatatcatgtcaaaaaaaattgcaattctggccacccacggttttgaagaaagtgaactccaatctccaaaagaatatcttgaacagcagggctggacaacaaatatcataagccccgaaccgggaaccattaaagcctgggctgaaaaggactggggaaaggattattccgtagataaaaccttggatgaagtgacagcttccgactatgatgcattggttctgccgggtggggtgattaatcccgatcagttaagaacaaatgaaaaggcattatcttttgtgaaagatttctttattcagaataagcctgttgctgctatttgccatgggccacaaattctgatcaatgctgaggcagttaatggtaagaacatgacgtcagtacattctatcagcaaagacctcatgaatgccggagctcattgggaagatcaggaagttgttgtagataatgggctggtaacaagcagaacccctaaagatttacctgcctttaatgctaaaatggttgaggaaattagagaaggaaaacatgtagagcaagggttataacttttggtacaggtttaattaaggcccgcaatttgaaattgcgggccttaattatttcatagtgataacatatgttttgtcagttgctgaaaagtgaaatcaattcaaaatccatgaattctgaatacgtgtacagtattcactcccaagatataaaggattaccatgtttttcagaccaaaatccatccagaatatccttgctcagacaacgatatacagcaactcctttataaatttgatgatcatcgccttcatagttgaagttgagaactaaaatccggtctttataaaatcccgtaccattttgaagatgatcgccaataatccattgggcgataatacggctgttttcgtcaatagataatagtaatgtaccctgataagaagcctcgtctgattcttcctgattgcttcctttaatagaataggttcctgccagatcgtgaactgtcatagatttgtttttatggattgcaaatttaaaaaatacctgccatgataccgttagaaatatttggaggatttcccatgtataaattaaacattatttttgtgacaaaattaatttagaatgattccttttctgctgatcgctaacgtgattactttcggagtttttggatttgataaactgcaggccaaaaaacatcaatggcgaatttctgagaacgttcttttaggactttcactggtaggcattgtaggtgcagcttcgggaatgcttatctttaatcataaagtttccaaaaaatcttttctggtgaaatttttcctgatcgttttaatcgatgttgtattgttatatcggttcatcagacattgattaaaaaatcatcatatttcttttaattcattattaatgaggttttggttaaaaaaaacgccagtttttagtgtgcttttaagatatttattctgctatttttaaattaatatttaaaattttctttaaaagcttaaatattggtaaaataataataattgttattacttttttactatttttataactgagaatcaaaacaataacaacatgaaaaaactcaaaaaagtttcccgagctgaaatgaagtcagttcagggaggaattgctaaaggaatggtacgatgtaaagatgcagatacgtgtgtcgtaagatggggatggggtaccggattttccagtaactgcggtgaatttgacattatttgtggtgaaccgcctgcagtagatccgtgtgaaatatcattatgtctataacgatcagagagtgtttttagagcactctttttttattcgtctataaacgagtattttaaacagaatgttaattattgacataacgaaattgtttttcatttaaaatcactatttttgcacccgtaaaaatcttttatgcaaaacattagaaatattgcgattatcgcacacgttgaccacgggaagactactttggttgacaaaatcattcacgctaccaacattttcagagaaaatcaggaaagtggagagttaattatggataacaatgatcttgaaagagaaagagggatcaccatcttatccaagaatatttctgttacttataaagacacaaaaattaacgtaattgatactcctggtcacgccgattttggtggagaagtagaaagagtattgaaaatggctgatggggttattttgttggtggatgcgttcgaagggccaatgccacaaacaagattcgtacttcagaaagcgttggaactaggattgagaccattagttgttatcaataaagttgataaaccaaactgtcgtccggacgaagttcacgatcaggtatttgatttattcttcaaccttgaagctactgaagaacaattagatttcccaacattctacggatcttctaaacaaggttggttcaacacttcgttggagcaaactgaagatattttaccattattagatggaattttacaatatgttccagaaccgaaagtaactgaggggaaccttcagatgcagattacttctttagatttctcttctttcctaggaagaattgcgatcggaaaagtaacaagaggtgaaattaaagaatctcaatggatcggtcttgctcaggcagatggtaaagtggtaaaaggaaaagtaaaagaactttatgttttcgaaggactaggaaagaaaaaagtaactgaagtacaagctggagatatctgtgctgtagtaggttttgatgcattccagatcggagattcattcgtagatcttgaaaatcctgaaccattggaaagaactgcaattgatgagcctacgttgaacatgacgttctctatcaacaattcacctttcttcggtaaagatggtaaatatgtaacatctaaccacttgaaagagagattgacaaaagaattagagaaaaacttagcattaagagttcagcagactgatgatgcgaacactttcttggtattcggtagaggtattcttcacttatctgttttgatcgaaacaatgagaagagaaggatatgaaatgacaattggtcagccgcaggttatcttaagagaaatcgacggggtaaactgtgagccttatgaatcattagttgttgacgttcctgaagaatttgcttcaagagttatcgaccttgcgactcagagaaaaggtgaccttcacattatggaaactaaaggtgaaatgcagcacatggaattcgaaattccttcaagaggcttgatcggattacgttctcaaatgttgacagctactgcaggggaagctattatggcacaccgtttcacagaatacaagcctttcaaaggtgctattcctggaagaaacaatggggtgttaatcagcaaaactacaggtccggctacagaatattctatcgctaaactacaggacagaggtaagttctttgttgatccgggtgaggaaatctacacaggaatgattatcggtgagcaaaacaagccgggagatttggttgtaaacatcgtagaagcaaaacagttgaacaacatgagagcttcaggaaaagataaagatacaggtgttgctccaaaaatcttattctcattagaagaatgtatggaatacatccaaagtgatgaagcgattgaggtaactccaaacttcatcagaatgagaaagaaaatcctttctgaagaagaaagaaaaagagtagaaagatctgcgaaagcataattgaaactcttatatataaaatcaaagcctcgatttttcgaggcttttttcttttacttcagaaaaattgtttattttttcaatgaaataatacaaattgtaaaatataatttaaagtagttttgcagctatgagaatgaataaattaaaacttatcgttttattaggagtttttgcgtcttacagtacttcatgttccgttcagaacaatgcaacaaagacttctcccgttaaaaatacaacaaagcccaacaatacaacacaaccgcagcctcctgtggctacaacaaagccgaatcccggcactcctccaaaagcagcagacgaggccttcagaactaatcttccagagattaaaagagaattccgtggcgcatggattgccagtgtagccaatatcaactggccgtcaagaaatgaccttactgtagaacaacaaaaagcagaagctatcaatatgcttgatatgctgaaaaataataatttcaacgctgctatttttcagatcagaccttctgcagatgctttatatacaagtaacatcgaaccgtggtcttactttttaacaggagaaacgggaactccaccttatcccaactatgacccgcttcagttttggatcgatgaagcccataaaagaggtttggaattgcatgtatggctaaacccttaccgcgctcaccataccaacggagggacggtcaataagctttcaatggctaataaactttccgatattgtcgtacgattaaaaaacggaatgtactggtttgatccggcagatccgag

SEQ ID NO: 305 - DNA, 24254 bp, synthetic construct
  misc_feature 1..24254: note = Synthetic
  source 1..24254: mol_type = other DNA
gtgaaacagggggctttttacggctggccgtatgcgtatttcggaaagaatgaagacccgagaagaaaaggcgaaaagccggatctggtagcgaaaaccatcgtaccggatgttccgctgggtagccacacggcatcactgggattaaccttttacaccgggtcacagtttccggaaaaatataagaacggagcatttatcggccagcacgggtcttggaaccgatcgtcactggtcggatatcaggtcgctttcgttccttttaaagacggaaaggcttccggttcctatcagccgttccttaccggtttcattgccaacgaaccgaaaggcgatgtatacggcaggccggtcggcgtgcttcagcttgcagacggatccttattggtagccgatgatgtaagcggtatcgtctggagggtagcgtacaataagaaatagttctaattacctgaaataaaaacaggcagtccgtaagactgcctgtttttatttcagaaatttataaagttgctgtaatccggtattggtttgacacagttagaataacttccagcattcttcttaccatctgcttaagttagctcattaatgccggtaagaagcaccgataaaataatgtttctgggcctgatgctggatcccgtaattaagtcctgcatcgaccttgaaatctttggctatatcgatttcaaccgcggcattaatgtaattggccagctgatgggctttaaaatcataggtgtaataggtttccgcaatcccgtcgatccctttggtgatcgaatggctgaccgtcagggtctgcagcagttccgtatgcatggcaggctgatcgagatctttcaggcggtcgacttctacctggaaacccagtttccattcgccgggaagcttatacagcatcggaacaatcagtcctccttcaaaacggctctcttcatcatatccggacgtcggaaatttaacatacggcaaaacggccattacgaaattcccgtggtcatttccgatcaggttttgtttaatccttacattgatgtctccaaaaccaccggttctcaggatgcttcctgaagacagatccctttcgcgctgtacgccgtacgtttcaaagccgatctggatggccgtagaaccggtaaggccgagtttcaggttgccgtggttaaccagtaccgtggaaacctctttggaatccgatctttctttagtcagccttaacaggtcggtttcatactgaaaatgtcccgcatctatcgtataggccgattcggttacgtccggtcggtcggtctccatttcccgcattaatgattccgggacaggatgaaaaagggaataatgctgctccttattttcctgccctctgtacgccgaagggagaagcagcatgctgtatatcagggccgcaaagtgatggttcttattcattaattagtctttatggggttaaaccggcatttggcgccattacaagcggatctaaaaatttacccggatgtcttcaggttctttcactacaacccggatgcgtgtaggatggtccataatctcatagtcgaggtcatccgacagatgatcaccgcttttcttctgtattttaatgttgtcaaatcccacctcatctttcgatatttcaaggaagtagctgttctgttcttcgtcgtgggtaaaatgttcttttttaaattcaatgaattgcatatctctatttttttggtgtttaaaaatcaatggacccttgtcaggcagccctgtaaaaagcaacacaaaaacagagccacaaaatgaacagaaccgcctgaacaggcctgaaagtgattaacgtggtataaaaaaatgccgatccacaggatccgcattttggatatgctaaaaaagcatgtatgcttccataaattccaggatgtctttattgatggtgtctgcttcccgtggccagcattccgcgagggaatcccgggtagctggtcagattgccctttgtcagcagttttgccgattcaggccgggattcccgtaagggacgatctggtcgtcttcgccgtgcaggaccggcaccgggatctccaccgctttcagatcgtctgtaaaacccgtttcggaaaaagcttttacgcctgtttatttctttagcaagggcagggcagtggcaggaggtaaaaattaaaccggtttaatttcgtacggcctgatgggaaaagtctgggacggacggaagcaggctgtcgcggatttaatgatctcttttattccgtcataaacggagcggtcgtgtttctttaaccggattaggataaaggtcctgcttacctttagggttaactgttttaaatttaaagccggaaatacgatttccctgatgtaagacccttcctttgagacaatgatccgttttgcccggttttttggcggtattggtttttacaggccccgaaatagggcacatttccaataaaagcctgttttctgtacgaattcatataaattttttcttcacaattaggctggaattaccataaaacctatatttgcagcctaaatttttgaaataatgaaagaactaattgaaaaaatcaacgcggaatttgaagctttcacaacggaagccaaccaacaggtagaaaaaggaaacaaggcagcgggaacaagagctcgtaaatcagctttggaactaagcaaactgttcaaagatttcagaaaagtttctgtagaagaagcaaaaaaatagttgttctgaaaaaaccggctttctgagccggtttttttatagtcagttgtgaacggtgaattttgcttacccaagtcaatagtgaatttaaaagaattggaaagcgcagcggattgaccatggaccattcactttgtaaaccaccccgtcaaaaattccttgaattttcgacacccctccaacgccggaggggaactgagattaaggctattgtccgggtttgatgattgagccgtccgtatttatatgtatgaacagaaaattaataatttccaattaaaaaattggtcatcatccattttaaaatcaccataaaactgacaagcgcagcttatgaaaccattcttccctgcctgccgccagtgaattttgctttgccggtaaatgatgaattttaaaattcaccattcgccattagtcctttcccttttaattgacgagcgcatcggattgaccatttataatttaccgattagccgtccgttgttttcggcagattttaaagccagcatgcttctgatttctatcattttcttttcttttacgatataggttttgcagatttcattattcatgtacatactcatgtttgttctcattctggtttgggtacccatcgcaaccgttgtggaggtatgttctgaaaaggaaggataaaaattggccagacacaaaaagtttcttttcagcgatgtaaaaaaatcgggataatttccaaaatcatcaattaccttcattctgaataattttttgcccagtgtatttccccagataacttcggtaatactgcccgtaatgataacaccgggtatcgaataaaggaacgagagtgcgggatcctttttaaacagaaaaaggaaaatcaggaaaaaaataagcatgtcgattattttagccacttccctttgtttatcgaggtcagacaaactgtttttataaggcaaatcgtattcgaaaaaatcgtaaatacggtttccgtctgcatcaaaatcccgggtagccctgcgagtgattttcttttccttaagctctgaaattctcatgaccattcactttaaaggatcatgctcagctggacccttttcctcgcttcatccacatccgttacctttacctgtacgtgctggtgcagcttcaccacttcattcacatccgaaacaaaaccttctttcagctgggagatgtgtacgagcccgctttctttgatgcccaggtccacaaagcatccgaaagccgtgatgttgttcacgatccccggaaggatcattcctgttttgaggtctctgatgcttttcaccttcgggtcaaactcgaacactttagccgctttcctcgggtcgaggccgggtttttccagctctttcagaatatctctgatgcttaagatcccgatgtcttcggtgatgtacttttcaggctggatcaaagcaatcttttctttattggcaatcagttcatcggttttaatgccgaggcctttcgccattttttccacaattccgtaggcttccgggtggacggcagaattgtccagcgggtttttcgcctgatggatcctcacgaatgccgccgcctgctggaaagccttttcgcctaatcgcgggacctttttcagctgcttccggtcttcaaaagccccgttttccgtgcggtagtttacaatattttccgccatcttttcgccgattcccgaaacgtagctcagcagggatttgctggcggtattgaggttgatcccgaccgcattgacgcatttcattaccgtagaatccagttcgtttttcagccgggcctggtcgacatcgtgctggtactgcccgacgccgatggatttcggatcgatctttacgagttccgccagcggatccgccagccttctcccgatggaaaccgcaccgcggaccgttacatcatagctcggaaactcatcccgggcaattttactggccgaatacaccgaagccccggcttccgaaaccacgaaaacctgcagaggcttgtcgaaggcaatctttttaatgaaaaattcggtctcgcggctggccgttccgttcccgatggaaatcgcttcaatctgataggcattcaccatcgaccggatctttttcatcgccattccgctctcgttctgcggagcgtggggatagatggtctcgttgtggagaaggtcgcccttttcatccaggcagacgactttacagccgcttcggtatcccggatcgatggccaggatccttttttcgcccaacggcggagccagcaggagctgggtcaggttttcagaaaaaatctcaatggcttttttatccgctttttctttggcttcctgcagggtttcgttggaaatggcaggttccagcagccttttgtaactgtctttaatcgctgaggcaacctgatccgaagattcgttgttggatttgatcaccgctttttcaataaattcgagggcttcctctttgtcgattcccacattggtttttacgaaaccttccgcctctgccctcagcatggccagaagccggtgggaaggcgcgcggctgaggttttcctcccattcgaaatactgggagaatttctgggcttcttcttcctcttttttcgcttttacggctttggaagtaatcactgctttgcgctggaacaggcggcggaggtttttccgcacgtacatattttcgttgatccattctgccatgatatccctcgcgccctgcaaggcttcctcttccgaagaaacccggtcgttcaggtattttgaagccagaaactttagatcctgcgctttctggctcatgatgattttcgccaaaggttccaggcctttttccttggccgaatccgccctggtctttttccttttcttaaaaggcaggtagaggtcttccagttcctggagatcgaagctttcctgtagccgctgatgcagttcgggggtcagggcatcctgctcgccgatggatttgagaatgctttcctttctttttaccatatcctcaaactgcttattcagcctggaaatctgttcgatttgcgtttcatcaagattgccggtccggtctttccggtaacgggaaataaaaggaatcgtgcagtcttcggccagcaggttcagcgtggcattgatgcttttttcgggtatattgagggattgtcggatatagctggtggtattcatctgaaattttaaacggctaaaatacatttctttttaaaaaataagtccggcaaataaaaaaaacaggatgctgcgatcctgttttttcaatatattcttaatgtccgtttgaatttagcgtttctctttaagaaatcaggatcatttagctgaaaaatcaaatgtataatccgctcaggcttttgccgtctgaataaacgagacagtcagaagatgtcggcatacgttagtgaatcacttcgttgtaataaaccggcatgccgtttttttcatcatatccaatgatgatgaccttaaagtctttggcatcatcattattgaagaactgtacggtcgacgcttcatcgggcttggcctgcaaattggtgctccagtaaagggtggaacggaaatcctgtggaatggttttgaaggtttcgtcactgtaagtgggaacggtaaacggttcctgcttgtcaaatccttttaaagaaatctgtttcagtttgctcggagccgtagaatccgatggagaaccggtaattccgccgcgtttggtatagatggcaatggcaccgctactgccggatccgatggcatacgcgtctttcattacttttaccatcgcaatgtctgccgttgagatagagttgatcgtggatgggtctaccctcatttcatccaggtaaatactcgcggtttgtcctcttaaccgtggaatataattgcccatgctggattcaattgtgagtccggctactcttccctgcagccattgcagaatattcatagagcctgttgcactgttgttgtcgtttaccagatcaaataccgtttcgctggcgcttctgaacatgggactgctgagtttgtcgttaagttcttttgtcctgttcttttttacggctttcagttttacttcctcgataagggttgctttttcgcccatgaagttgtagatgtttttctctgcagcatatctttgtatctgcgggtcggatttatggtcttccgtgcgcggaaccaggatgtaattgcttttgggaaggctgtttttaaaagggacaaatgtataatcgggctgaaagatcacctgaacctgctccttgggtattttcgggtcattcagctgataggaaaacttaatggcatcttcaaaatacagtcctttcagggtaaaaaatcccgccgcatccgtttttatactgtagaattttataccgttgccgggcgtattgaacaggaggttcatatctgtatcggcagcgggttttccctggatggtaacctttcctttgtaagaaatataaggctgtggctggtaacggatgatcggataggtccccgacatgatcattttccagtcgaatcttttccatttttcggaaatgagaagggcatccaatgcatctgaattgtggtttttggtaaaatactgtgaagggcggtctatttttgaaggaatatcaccggtcagccaaagcgtactcagcaggctgttctgatcttccgagctttcggcttttccatccatcaccaaaaccgtataagggctgctttccgatggttgggtgatattgaacgtatttgaagccctcgggttttcattcagggccagaccggagagtaccggctgctttactttcaggagatcgggctgcacgaagcagagcctctgcgccactacgttttcctgttcatcgaaaaccgtaagctggaggatcccgttgatcagctgttcagcgggaatggtgtaagtctgtcccggcattttagcagaacgggctttgaaaacaatctggttgctgacggtccctatgattttatagagggttcccggagctgtattttttgatcttaatgaaaaccttaccgcatcgttaccggtttttacctgcaggctgactccagaatcctgtacctggggaagatcaacgttttgccggttacctttggtatcttcggccgtcaggcgatattgaaccccgtatttcgggatgaatgaaaatgagcctacattaccgtcaaaacctttaaaggaagcgagtttcacttcaggactgcgggtgtccacaatgtatccgctccagtcggcaggtgatgtacccggtgactgcagccggacggctacttttgtttcgatgccgtctaccagatttccgctttcgggaaatacagcggcagtccacggcgcatccgtaaggggctggattttatctgcggaagaaggattgtatacggcaatctgtctgaccaactgaaaatcttcactgaaattcgccatccacgtcgtataagccctgacgtaatagattccctcctttaaactttcaggaagcagaaaatttccgtcggcttccccctggataatcggaagcatcttttttgtgatcaatgtcttattactgtcgtagagttcgacgaacagggaagtggaaatatcggacggattgtagccttcgaagacaaaagctttgaaccagagcttttccccggcgatatagctgtttttattgaacagcagatgtactttttcctgtgggtatttgccggtatatatttccatagcctcttcggctttcttttgggctgcgagattgctgcaggctgctatgagcaacagcgcgggtattagtttttttagcataaatcgaaatacttgtgttttaaattgtggtgtaaaaatacatgatttgttgttatgctacaagccggtgagtttaaacatttatgaataatggaatcaaaaggctggaagaggggagctgaaagccggaagttttgtcgcaatatcacaacaggaaactttgaccatcgaataagtatggtttcttcctttgtcaaggataaagctacatctaatcctaaccaataagttaaactttttaacaataaccaattaaattatcggattaacagtaatgctttcaaagtgatcattgatcttaaatcgttattccggatgaggtcaaaagttttaataaaaatctgccagagattatattcaggagaaattcaggcatccttataaagtgtattcgtattccggatttttttaacgaatacctcatttattgatgtaggtcaagaaatcagggcagggaagtatttatctttggcttttcaatgaaaattcttgtgggatgtttcattttgcttatatttaaacctataaactttttaataaaataaataatatgaaaaaacttagtgttattgcattggtggctgtaggaatgcttgccgcatcttgtaacaaggacaaatccgctgaaaatgcagcgacatctaccgagaaaaccgtagcggaaagcaaaggcgaagtattgccggtagatgccgcaggttctgtggtaaactggaaagctttccacaaaggggggatggctccgcgttggggaactttaatggtaaaatcaggagatcttagcgttgaaaacggaaacgtaacggccggaaacttcgtgatcgacatgaactccctgaaagtagatccggcttccgtaaccgaaaaagacaaaaaatacacggatcttgaagcccacttaaagaaccctgatttcttcgatacggctaaaaacccgacagccgatttcaaaatcaccagcgtaaccgatcttaaagaaccgtctaaagacgccgtagccggagccaacaaaaccgtaagcggaaaccttaccctatccggaaaaacaatgaacgtgaccttcccggctaaagtagacgttatggaaaacgccgcctccgtacaggctaaattcaccgtaaacagagccgactggggcatcaagttcggaacttccgaaaccgatcctgcagaatggatgatcagcaaagacatcgaaattgcagtcgacgtaaaagcaaaaaaataatattgttagatctaatcttgtagagctgcttcttttaggggtggctttttttgtgtttaaaaactaaaaaatcccacggagtacgcaggattaaagattttcttcggcttttagccttattgtgaattgctttttacaaatataaaaacaatttttttattgcaaatatggaaaaccgtaatgtgatatttttttttctctttatttttatacgatatcaaaaactaagtaataatgaaaaaagttttaggaatcgatcttggtagtaatagtactggttgggcaattagaaatttagatttagaaggcaatcagatagaagattttggagtgattacttttgagaaaggtgttgctgcagaaaaaggtaatgaattccctaaagttcagaaaagaacagagagtagaggtaaaagaagaaattaccaagctgaaaaatacaggaagtttggaattttgcaatttcttatcgaaagaaagatgtgtcctctgtctattgaagattttaataattggaaaacttacagaaaaggaaagagaagagagtatcctcaatccgaagaatttctaaattggataagattcgattttgatggtgacggtttaccggactttcatttgtttggaaaagacaaaaacgagagttattacatttttagagcctttacaggcaatccacaatataaagatgtatttggaaataatcctcaaattttaggaagagttttttatcagcttgttcaaagaagaggtttcaaaggaagagatgaggaagaagctaagacgatgttaaccggaagtgataagaacggaacaaaaggaagaaatgatattgaggaatacttagataaacataaaactttaggcgctgcactgtattattatcaaaaagacttcggaggcagaataaggcaaagatataacttaagaaaagacagtgaagcagaattaaaatggatttgtgatttacacgatatttctaaggatgactattctaaactatggaaagccatcatttggcaacgtcctttacgaacacagaaaggattaattggaaactgtatttatgaaaaagggaaaaagagagtggctgtaagtcatcctctctatgaggaatatagaacttgggtttttattaataacttaaatatcattccacctttagatgaaaataaacaggaatatatccaagctaaaatttatccgttattctataaatcaaaacctgatttcgaactaagcgaaattgataaacagctaaggaaggacggtgccaaaagaacatcaaagcatcacgaaaaaacaaaagtactttctctaaaattacttaaacaatttcaggatgtttttggagaaaactggaaagacatactgaaatgggatattaatggagaaagaagctcacagcctgtcaaaaaatctcacaccgaatatacttttgaagacgtttggcacattctaatgacttttgacggacaggaaaatcttaagaaatttgctttagaaaaactaaatttagatgaagaaaaagcgaataaattttctaaaatcaaattacaacaaggttttgcgactttaagcctttctgcgattaagaaaattcttccctatttacaaaaagggtttttatatagccacgctgtatatatggctaatctgtataaaatgcttggagaaaatgaaatttccgaaacattgattaatcatctttctgaagagatttctaatattttaaaatgggattcagtaaacagaaaaaatgcagcgattgtcaatagcttaatatcagaaatgatcaatgatgaaaaccgttattatattactgatgacagagatttggatagtgctgaaaacaaacttgttttaaaaagtgttattgacaattacggacaggaaagctgggataaacttgaagaagaaagtaaagctaatattatcgattatgtttcagcaaaatatcttgaatttttaaagaaatcatttttcgataagaagaatctttttgtacagtccgaaagaattgacgaaaagatattcaattttttaaaagatacttatcacgtttcagaagatatgaagaaatatctttggcatccgtctgaacaggaaaattatgctgaggctgaaaattatttagaattttcggtaggaaggaaaaaatattacgttaaagaaaaaaacagaagcggttttctaacaaaaaatccagatgcagagtttgaaggtcgggaaattaaattattaggtaatcctgagccattaagtaaaggatttaaaaatcctatggcattgaagtctctgcataaactcaaaaatttggtgaactatcttttacaggaaggcaagatagatgaagaaacaaaagtggtgattgaaattgcaagagagcttaatgataagaataaaaggaaagcaattgagatttggcagaaagaaagggaaaaagagaatgaagcttacaggaaagaactggcagtttatcgggagcagttttctaatgttaagcttatcgatgaaaatacattagtccgtaaaatcagattgtggcatgaacaaaataaaatttgcctttatacaggtaaaccaatttccttttctgacttaattagtggttacaaatatgattttgagcatacaattcctgcaagtataagttttgataatgaattgaaaaatctcaccattgccgactcgggatataaccgtttacaaaaaggaaagaaatttccaacgcaattagtcaattatgataatgaacaggttattaatggtgaattctataatccaataatcagaaacatagaatttctttttggagaaaaaaaaataaaagaaaaggaattaaaaggtaaaacagagaaaataattacctggaagaagattgaggagcttgaaaaactatttgatgaatggaaaaagaaagcttcttatgcaagtacaaaagagtacaaagatttttgtattgtaaagtatcacaccataaaaatggatttggattatttaaaagctaaattagctacttttaccattacagaatataaagcaggatggagaaataatcagttgagagatactcagattatcaccaagtatgctttgccatattttaaaaccctattcaaaagagtttctgtggaaaaaggtggagttacagatatctttaagaaagtttataaagtacagtcaaaagattctaaaaaagacagaagcgtacatagtcatcacgctcaggatgccgcaattcttacgttgattccaaatgcttttcatagagaaaggattattaaagcttatcaaaacgaaattgataataggacaggcaaaacctatcatgaacttccaatggattgggataatttttctgaaaattatatcttggagttaaaagataaggttttgattaataatcttacagatagccgaaccattacacagacatctaaaacagtaagaaaaagaggaaaaatagattttgttaaaataaaaaatgaaaaaggggaacaagtatacaaattagatgaaaacggaaatagaattcctaagatatcaaaaggtgatacaattcgtggccagttgcacggagaaactttttatggagccataaaacagcctgtaagagacgaggataataagattttgtttgatgataacagaaaaatgattcttaaagatgaaatttatttagctgtcagaaaacccttgttatataaaaaggatgctaattctcaaggattcaaaagccttgaagaagttgagaaagcaattgttgataaggatttgtttaaaataattaaaagacaagttgaagaaacagattttaaaacagctctgactgaaggtgtttatatgcttgataaaagtggcaataaagtaaataaaataagaacaatacgctgtttcgaaaatggattaaaatatgcaacagcaattaaagttcatcatcacagttttgtttcagacaaagaatacaaaaagtccacattagcaaccaacggtgagaacacgtattgtctgttttataaaagtgatgccggtaaagcaatgagaattctttctattgtagacttagcggaacttaaattaaaaaatgttcaaaacctttttaccgagccggagttttcttttataaaaacgggcagaggtaagaataaatttcagttgccattatattcaattttaaaaaaaggagacaaggttttattttacaaagattcaattaatgagttaacttatttaaatactgaagaactctcagaacggatgtataaggtttatcaatttgaaggagattcaaatagaatgaaatttcgtcatcatctagtagcaggaattgatactgaattaaaaaaagataaccaagagtattcgtcgtttagttttgaggaaaaacaagttttcttaagattaagtcaaggacaatggaattttgcaatagaaggaaaagattttgagatgtatattgatggaacaataaaatggaatttctaatatgatcacccgctccatttacatcggcaaccccgcataccttaaactcaaagacgagcagctgaaaatcctttgtacggaaaccaagacggaaaaggggagtgtccctgtggaagatctgggattgctgatgctggaccattatcaaatcaccatttcccataacctgatccagaaaatgatgggaaacaatgtggtagtgatcagctgtgatgcgcaccacctcccgcatggaatcatgttgccgctgtacggacataccgagcattcggaccgagtaaaagaccagctggaagtcagcgagccactaaagaagcagctgtggaaacagacggtggagtgcaagattgaaaaccagaaaaatgtccttgtaaaattaggcaagtatcatgaacctatggttgaataccaaagaaatgtaaagtcaggtgacagtactaatatggagggaattgccgcccagcattactggaaatacctgatcagcctggatttcttaagacagcgtttcggggattcgcccaacccatttttcaatttcggctatgcggtgctccggagcattgttgcccgggctatcgttgaaacgggactgcttccggttctcggcatctttcacaaaaacaaatacaatccttactgtctcgcggatgatctgatggaaccttaccgtccatttatcgatttgctggtgatgcagtggctgaaagcctacccggaatctgaggaactgacgaaagaattcaaagcgcatattcttcagattgcgaccagggatgtgctgattgacggtaaaacaagacctttgctggtggctgtaaaatcaactgcttcttcgctttataaatgttacacgggagaaaagcggctgatctcttatcccgaactaatctgatgaattgaattacttttttacattgtacattttacaaataaaaatatgaacgccgaaaggtttaatgcataccggattatgtgggtaatagtattgtatgatctcccaaccgaaacgaaagcgaatatgaaggatgctaaccgtttccgaaaagcgctgatcgatgacggctttatgctgttccagttttccatgtacgtacgccactgcccaagccgtgaaaatgcggaagtgcatatcaagcgtgtaaaatttatgctgcctaaagcaggaaaagtagcgattatgtgcattacggacaaacagttcggcgatatcgagattttctttgccaggaataaagaagaaccgcctccaaccttccaacagctcgaactcttctgattttttcaatcctaatcaataaataaacccactgcaattcagtgggttaaatgttgaggttgtgttgtatcacgaagatacgaataaatgaaagcaattcacaacaaaacatacctgaaagaattatacaaagacgttgtgttgtatcacgaagatacgaataaatgaaagcaattcacaactcgtaccccgatattcacattacaaaacaggttgtgttgtatcacgaagatacgaataaatgaaagcaattcacaactcttttatgaaaatcaagttggtattatttgttgtgttgtatcacgaagatacgaataaatgaaagcaattcacaactccgtcgatgttttgcgtagtggccgtaacgttgtgttgtatcacgaagatacgaataaatgaaagcaattcacaacaacttacattaccggtaccaaatgccgattgttgtgttgtatcacgaagatacgaataaataaaagcaattcacaactataccttaaagatggaaagaaatactactgttgtgttgtatcacgaagatacgaataaatgaaagcaattcacaacgttgacgaaccaggggttaatattcgcgtagttgtgttgtatcacgaagatacgaataaatgaaagcaattcacaactttgggcgaagcggaagcattgcgggctcagttgtgttgtatcacgaagatacgaataaatgaaagcaattcacaactttaggatgaaagcggaatagcgtcttttcgttgtgttgtatcacgaagatacgaataaatgaaagcaattcacaacattaaaggcagccggaattaatccccacttgttgtgttgtatcacgaagatacgaataaatgaaagcaattcacaacaataggcccgtataaatagcgcagcggcttgttgtgttgtatcacgaagatacgaataaatgaaagcaattcacaaccgtccggatagtgttttcttccacagattggttgtgttgtatcacgaagatacgaataaatgaaagcaattcacaactccacctggaatatatcctctcttgggttagttgtgttgtatcacgaagatacgaataaatgaaagcaattcacaacaaataatcgtcggtgtcaaagacaaggttcgttgtgttgtatcacgaagatacgaataaatgaaagcaattcacaactgccgggggagattaaaaaagaaaacgatggttgtgttgtatcacgaagatacgaataaatgaaagcaattcacaactcattggctgcaattcaccataaacatcctgttgtgttgtatcacgaagatacgaataaatgaaagcaattcacaactgaagggatgattgccggagctctttctttgttgtgttgtatcacgaagatacgaataaatgaaagcaattcacaaccctcatgcgcttgtaaatggcgaattctgggttgtgttgtatcacgaagatacgaataaatgaaagcaatttacaaccaccttgtggagaatacgggattcgaacccgttgtgttgtaccccaaagatacaatcaaatgaaatagtccaaagatgatctgcataaaagttaaatcagggaatttgtatcaaatttcaccctgttccccgaaatattccgtttcatccgttcaacaattcaattattagtgatagttttgcaggttgttagtttaggtcagcggccatgatgcataaaattctcctgattccgttttttttgatgttccttgcgcttcgggcacaggatccggcccgttatcaggcggtctatgcaaaaacctatctggagacttctcagaaggacttcggccaggctttgaaggttgccgattccctgtatgaaatctcggagaccccttatttcaaaaccaagagcctgatgctgtcggcgtcgctgtaccagcaggcgggggacgtggaaaaggcggtggcatatgccgggcggtcagccgatattatcggggaggcagggaaccctgcctgggaagcccgggtctacgggttccttgccacgcaataccggatcctgaagctgtataaaaaatcgaaaaagtacatcgacaaagcactggaagtggggcaggccataaaggaagaaccggcccgcaacagcatccagggcctgatgtatcaggaaatggcctattacgaaagcgagcggaagaattataaaaaatccatccggtacattgaaacggcccagtcgcactttaacaggaccaaagaaaacctggatttctttaccgccaacaacgaacagctgacgggcctcaattatttctatgccggatcgtatgaaaaagcaatggaccattaccggaaagccctggcgctcgcaggaaagtccccggaaaacttcctcaccgggcttatctgcaacgggatggcggccgtttacctgaagcagggcgaccttaaaaataccgaagcttacctcgaaaaggcccagaagattgcggaaagctccaattatccccggctgaaaatagaagtgaatgccacttcccgggaatactacgcaaaactggacgacaataaaaaatccgccgaaatacagcagaaaaccgataccctgaacaccgcccttgccgaaaaggaaagtgcctttatcgatgattcttatatgaagatggaacaccgggcggaggaagctgaaaaggacagcggccataaaaaccacctccttctggccgggacttttctgctcacgggctgttccgttgcatttttcaggtaccggaaacgccagatcaggaataccgacaggatcagccggctgctgcaggaatatgagagcaggaaaaccccggcggatgaaatgccggaaccggcacccccagggccggaggcggcaggtgccgaaaacggggaaagtaccgtaatgacatcggaaaccgagcagaagctcctccggcagctcagggagtttgaggaatcggtgctgtttacagaccggaacatgtccctgccttttcttgccgcccacctgggaaccaacatcaaatacctttcccatatcatcaaccggtacaaggaaaaggattttaacaattacatcaatgagctgagagtcaattatatcatccggcagcttcgggaaaaccccgaattcaggaaatacaagatcgcagcgctggccgaggaatccggcttttcgtccgccaataaatttaccacggttttcaaaaaggttaccgacgtcccgccttccgtttttatcaggcatatccgggaactggccatcggtgaagggtaaggcagccgggggaaaatgaaatacccctttcctgtttacagaaatacgctgcttcctccggaggctgccttatccggtgtattctggcagtgttccctataaaggttcttctgtgatgttaaaaacacttccggcctgtttaacccgatttctgtttgggtgcacgttattttaaagcaggttttcccggcttaatatcatcttcctgttttgtattttttatttaaaaaaacaccgtaccggatttcggatctggtgcttttccgcctgttccatcattatttctgcatcgggcagctccgttcctgccgggattgcgggatataaaatctcctttagcatgcggcgggccgacatgcttcccggataccgttctccggatcagggcacagcgccgcaggctgcggtattcccggagtgtatctgtcagattcgcgaatctgatagggcaaacaggtgtatgccgttagaattcagcgtagttttgccaccgttccattcagacggttctaaaaaacaatgatcaaaattttcccttaatccaatcattttttaattaaaaaaatacccaatgagaaatcacatgaaattatttctgaccttatccctgctgctgccgggattgctcctcagcctgaagtcgcaggtctgtacggtggacgtcaacggacagacctttgcgatgggggacggctcatccattccggccggaacgccgcacacctttacccagcccgcgaccaactacggattcacgctcgatatctacagccttgataattcattcaacatgaacatcaacggtaccctgctggctacccaggaaattgagtttgccaccggtgcggggcttacccagaatatacagtttgccgacggcgcaaaatggcaggacggcaatgtgccggccgtatggagcatttccggaagcgcttccacgacaccggcggtacgcgtggtcatcagccctacgggcggtattaccatgttcggcagcaaaagctcgggcggcccccttttaccgctggttcttaccaacgggaatgccttcaataccatcagctggaataccaccggaaacaattcggtaaccgtcacccagaatgtagtggggcctacaaggatctccggctacggaagcggaaaaaataccgttccctgccattgtacacagccgggcgcagcgggcacccctgccggttttacaaaaatgggaatcctgacgaaaggaagcaaaaccgtaaccaactggccggaaagcgtaccgaacggccacatcgtgctggatgcctccgacaaaggaatggtgatcagccatatgaccaccgcccagaggaatgccctcgtccctgtagaaggaatgctgatttacaataccgatcttaagtgcgtgcagctttacaggggcagtgcgcccgccatcgacgctgcccggacaggatggaactgcatcagcaggggatgtaatgaaaaccgttaaatcacaaaaaaaataaaaatgaatatcatcatcaaagctctagtttccctgcctgtttttctgttgccggctgctgtctgtgcacaggtggctattggaaaacaggcccttacaaattcaagtgtccttctggaattcaacaacgaagccaaaggaatcatattgccgtcggtagcatctgcaccgggtgccgcaggaggcacattcgtattcaatacggcagaccggtccgtccaggtattccagaataccggctggacgctgcttaccgacagcagtcagggagtggttcactcctataccaattcgggaaccgaaaccggtgcaggcaccatcatcggagccacttcctctgcaaagccgggcgtgctggtcatggagtccgccacgaaagcgatggttcttcccaaggtcgccaacccgcacctgaacatccggggagccattgcaggaaccatggtgtacgataccgtgtcttccgcactggccgtctatgacggtgcccagtggagctactggaaataaccggtcttttacggatttgaacatttaaccggtgttatacatattctcagtaaaccccttcgcatgaaggggttttttgcatgggatttacagacggccggagcccgttaaatcgatcattccccgtcagggatgaagccggtgaaagtattcggatcaggtggcttgttataaaacggcagggccctttcaccgcagcagcaatgcgatgcctgggattcccggaggcggaggatgtggcttcgagagcctcagccaccgtgggaagttgtagctggtgttatggttgtaaaagtccgatgcctgaggctctcgaaggcagagggtgtggcttcgactccgctcagccaccgttgagttgtagcaggtgttatggtgttgtaaaggtccgatgcctgaggctctcgaaggcagaggagtgtggcttcgagagcctcagccaccgtgggaagttgtagttgtggttaaggttgtgaaagttgtccgatgcctgaagctcccggaggtggaggtgtggcttcgagagcctcagccaccgttgagttgtagcaggtgttatggtgttgtaaaggtacgatgcctggggttcccggaggcggaggagtgtggcttcgagagcctcagccaccgttgagttgtagcaggtgttatggtgttgtaaaagtgcgatgcctggggttcccggaggcggaggagtgtggcttcgagagcctcagccaccgggtgttgattgagttgttgccagtgtggtgaaggtccgatgcctgaggctctcgaaggtggagaaaggtggattttgcttcagaaaaatcattatttttattgctgaaaaaaacatttatgacgaaaggatatctttatattctcctctgctccgacggcagttattacaccgggagtaccaacgacctcgaacggaggctggcccagcatcagtccggggaaggagccaaccatacccggaagcgtcttccggtccggctggtctattatgaagaatatgaccgcattgatctggctttttaccgcgaaaagcagatccagggctggagccggagaaaaaaggaggcgttgattaatggtgcaccggaacttctgcccgcactggccatagcataccgggacctgagaaactccgatgcctgaggttcccgaaggtggaggtgtggcttcgagagcctcagccaccgtagggttgtagctggtgttatggttgtaagggtccgatgcctgaggctctcgaaggcggaggtgtggcttcagctccgctcagccaccgggtgttgattgaattgttgtcagggttgtaaaggtccgatgcctgaggctctcgaaggcagaggtgtggcttcgagagcctcagccaccgtagggttgtagctggtgttatggttgtaagggtccgatgcttggggttcccgaaggcggagggtgtggcttcgagagcctcagccaccgtagggttgtagctggtgttatggttgtaagggtccgatgcctgaggctctcgaaggcagaggtgtggcttcgagaacctcagccaccgggtgtcgattgaattgttgtcagggttgtaaaggtacgatacctgatgttcccgaaggcggaggtgtggctgagcggagccgaagccccgggatcaccccgatttcagccacggtacaggcatttcccgagatcagctttactgcagtaaaacggatgtaccgtgcggagaccggttgcttaaaaataacctgctgttctaccgggttggctttgatgttggaaaattcgccttccgcagcagactgccaatgggtaccgtcagtgccggtttcgatgcggtaatggctgacggtgccgtctggttttccgtcctggcggggcaggtacgtacatccgctcaggttttgccgttttcccgtatcaatcacaaatcctgttggagaagatgatgtgatcgtcgggctttgccagaacgtttccgggttgtcatcgatggcatacgctgccggatgggcagcatccgtaccttcgggaccggtgattttccacccggattttacagggccaaaccggaggaccgcggcttcgctttgctggccgttatccaccgatatggctttgaccattccgccatcaggcagtataaaaggctgatggtatcttaaggagttcggggtaggcatgctcccgtcaagggtatagtaaatggcggaaggggaatatccggaaaaaatcgtgatctttccgcccggatttctccggatgcgtggcttttctgtgatcaccggttcgttgtacaggccgaagtcacttaaagctatggctgccggcgactgggtaatggtcaggcgtatctgatccgtggtgatcctttcagggagacggatgagacggttcggaccgatgctggttgccgaggcgatcttctcccatcttccgttgagaaaggcttccgcttcaaaagcttcgatccgctggcccagctttatattttcccgtaaacggatgatgttaaaggtcttttcagcaggaagggtaacggtcagctcaggcgtcgtgatttcatcatcggtggcccaacaggtataccggtcctgatcgagcaggtgctgcgggccgtattgggaaaggttgttcccgcggacattaccggcttttaaaacggcgccttccgcaaggttcacggcaaaagtctgtttcagcagtttcccgaactgctggagcgaacttacgtcttcggggttcagctggccgtgagggttaggggagaggcccagatccaggttggccccccggcccacgcttttatagtagaggtccagcagttcggccggtgtttttacctggctgtcttcgcgggcatggtaaaaccagcccggccggagggaaacatcgcattccgcaggcatccagtattttccgttccgggtaccttcaatgcccagttcatatcgggtaaaaccgttggacggcttcttcccttcttcaggagcctgcggttcataagtggcccaggaggtttccccggcatggccgtcttcgttgcctacccagcggacatccggccccgcatctccgaaaatcacggcttccggctgcatctttcgggtaatggcccaggtcgcaggccagtcgtaatacgttgcccggtcgattttccgggtcccgcgggcatttccgtaatagccgtctccgccgttggccccgtcatgccatgagataaacaggtccccgtaatcacgatacagctcctgaagctgtttccggtacatctcaacatacccgggagtaccgtagagcggactgttgcggtcccacggcgaacagtaaatgcccattttcatgcccagcttttcacaggctttccggtattcttttacgatgtcgcctttcccgtttttccacgggctttttctgacgctgtaatccgtggtcctggtaggccacaggcagagcc

SEQ ID NO: 306 - DNA, 24251 bp, synthetic construct
  misc_feature 1..24251: note = Synthetic
  source 1..24251: mol_type = other DNA
aaccattataatcgggctgtgggggagcgaagaacagggactgaatgggtccagaggttttgttgcagataatccacaaatcataaagggcgtacaggcggctttcaaccaggataacggaaccggacgtgtggtgaacatcagcggccaggggtttgtaaaagcctatgattatatcgggaaatggcttgacggggttccgaaagctgtaaaaagccatatcaaaaccgattttccgggaatgccgggcggtggcggttcagaccatgcttcttttgtagcggcaggtgtaccggggttttccttaggttctctgaactggggatacttcggatatacatggcataccacaaaagatacctatgacaagatcgtttttgatgaagtgaaaaataatgtggttttaacggcagcattagcgtatatggcttctgaagaccctgaatttacaaacagggaaaaaagagcgatgccacaggatgataaagggcaaaccatacaatggccggaactgaaacaacctagaagggactctaaggagtataagtaattggagtaaacttttatagtaccgaataccaggaggctgactcattttgagtcagcctcctttttgatattgtacaatattcatctgtttttgcgatgatgttgtacattttttttgcacaaaaaatacaaccgcttgcagccttttctgaaggtgagatttttaattttaatggtcttttgacatttaaaacgcacaaattatgatggaaaaaaatacaacaaatcaggagacccctgatccggggacagattatggaaatatctgttttgcaggaaccggagagacactggaaagtatatcatggggcctgaaaattcaaaacccggcttaccttcggcaataccataacgcacggtgcagtccttttgatataattcctgaagagggaaccttacggttcttacagaaaatttacattccctgcccggaagaagttgccgaaatgaacgggaagatacagcagcagggtgaaagtttatgttatctgcttccttacgggaaaattccgtttaatatcacgtctgttagcggagattatgaagtacggcaaaccgaaaatgaggatgggatccaaaagcttgaatatacctatacggtacatttgagctatatcaaagaagaggaaaacaaccattacctgtacttttcgatgagcgatttaaaaaaagacggtgaagaaccggagcagaagatcaatagcctggccacagatttcatgaaaataatttatcctatacagttaaggattgacgggcatggaagttttgtggctgctgaagctcatacagaaatcaaagaaatactctgccagatagaagaattaaaaaaatatcatggaggaccttatgctgctctgcacattgaacagatgaaaagcaaaatggcagattcccgggtgatgtatgacagccttaaagatttaattgtgctgcaattctttttcggacgtttttatcaggcagaatatcactccaaagatatgacctctgcctatcacgatgaattttcatggctggctccggcctcacccatgaaactggaaatggttcaccgtactttaccgcaagaagatacctgctttatcgaaatggtacagacgggtagagccacagattatcgtactcttcaggaattataccatacagataaagaatacgatcatcttgcacagccgcacgcgcggtcactgaaaggaaatcataaagcaacctataccttggcttttccggacttctctgtccggaagatcagcgcagaatttgagatggaagtcgcggattacaggaaaaaaatgactttcgaactggtaagaagaactgaacagtttggagaatatcagtcataaaaaaacacaatgctatgtcagaaaatttatcggcccacgatggtaagcactttatcatccgcaaaggaagggctcagtgcagcgagggaaatcagtttccccagtttaaggtaacctcgcatcaaaaacattactggaacagcaaaggaggcgatgcggattatctggcggtaacagaggatgatgtgatgtttgatccttcaggatccagctttggaatatgcagactaagaccgtcttcaggagggtatttaccctgtgtatttgctcctgccggaacatggcagaaaacctatgagaaggtaaaaataatggataagagctgtctttcggaaatttctgagctgatgtgctgtacaggcggaaagattaccataaaagagcacggacagcaatctgtaatgaatcagcagaacatcatctttgccgatcccgatacctaccgcctcattaatccctttatagatctgagggatctgaaggaagacctggaagactcagatcagatatatgaataaacctcacaagaaacacatgacaaaattaactattacaggcagtaagcggcctattgttgggaatgctgaggcttattcgctttcggtatttgataatttgctgacctccaattcattttcttttccatcaccaaaggttcagtggagtattcacgttcaggacagcaaaggatggcgtattgcccgtggaaatataaaagagggaaatcctgtcatctatacttttacaaataaaagcctcaaatataaagcgataaaaatagaagcggtaagaggaaacgataaaggagccttatacatccatccaaaggaagccgaagaaccaagaataataagtgtggaattgcttgatgtctattccaggcgccttccaaaaggaaagctgcttcattatacggatacggtcatcgcacaagccaattgtgtaggtatgcttggacaaaaaatagctttcactttatgggaagatgacgccatagggaaaggacatgatccggtggtgaacatgatgaataagatcaaccagattccactgatgggtgaggtggatgatgaaggcattgcccgggttgttttcaggctgtctgcttatacgatggccgttcagattgccaatgctcgagtagccaaaggagatcaagaggaggggcagactcatgaatattatgcgaccgctgaagtgatggcaaaatatatgctaaaagcgagtcccaatatcccggtggccaatccggagtatgttccccatccgaaaaaaatccctgatgcaggaacaggaaagagaaaaggtaagccctcacccctaaaggaaacggccaaatttccacaaacttctgcggcaaaaaaacaggctgatccagaagggaaaatactgagcgcagtgtttacagataatacaggaaggcccctgaaaaacgcgagaaccggagataaggtagccattaaaataaccgctcagcacatgaggggaaaaaatgtaacggtaaggatatgggaagaagacctttggcgctacagccatgatctcctgtacgaagaatcgataactcttccttatgatgtcaactttatcaatacgattcttcttacccgggaaatgtataacaaaagccatgattttggggaaggaaaagaccgtgaatactttattgaagttgaacacctcaatacgtcagtgacttctcaggtgatcccggtaagccccgatgcaaagcctatgaaagttgaggctaacaattctccggttatgattaaggaacagaaacagcaggtgaaaaattgcggaggtcaatattgcatcgataaaaattctgctcccaacgagctgatcagggaaattaatatacgcctcgcaggttttggaggcaatgtaccgacagaccggtttacagaccgaacagagaaaatgattaagcagtttcagcgagactatatgaaagtgccggaaaccggaaaggtttgtggacatgtgctgagagcgattgatgagttttgtagaaattttgagatcagcatcaccttatggaatcagttaaaatgctcttgcagtacaaaaggaaaaagagtaacaagtgccttaagaggaactctggaaactaataattgcaaagggttcggagatggaacgggcaaaaatacctataaaggcaatgtgagaaccgaggctatgaataagtatgaatatcccggccttcacaggtctcttttatatggtttcaaagcattacagttttattttagtcagcaaaagacttataccattgatcattttacgtccggatacagatgtagatttaaaaattatacaacaactaaccaccagggaaaagctatcgatatacaatttagtaaaggcaattgggcaataagaggaggaaataaagaaaacctcgcggaattaaggatgatacgcgattctatctttataaaatatttgggggctcagaaagaatggcctggtaaaaatttattctcgatagagcctatcgatttacgatacagtaataaaggaaaattgcgatatgaccatactttcagttggatccatatggatgtaagacagtttgattcacaatatttagaagatcaatatttttgcaaaagtctgtctgatttaaatgaaaaaagtattgttcagttagctactgaattgggctttgcaaatacctgcagttgttatggggcatatcagtctcaacacaataagtcagagcgtcatcatccaaatacatgtgaagacagatttaaaaaaatagcgcctatcattttgaaacatgaaggaggctataaaaatgaaccctctaaagataagggtgatccaaccaatagagggatatcctggccggtttggcaaaagtatgcaaaggaggacttaggtattgagccaacagaagaaaatcaaaaaaaacttaccgaggagcaggctactgttatttatagaaaacgttactgggagcctaacggatattgtgagatcaataacctgaaggtagcccttatggtgtatgattggagcattacctctggtggagcaattagagaagtccagaaactactcgttaatgaatttaaccaaacccttactattgatggaggaatgggaaaagagacggccaatgcattgaatcagccgaaagatcaggaacagctacttacacggataagtgagataagaaaagagtattatgactacggcgcttctcaaaattggttttctgctgattatttaaagggactcaaaagaagagtagatcaatgcagacactacacattataaaactttaaccatggtatatcaatttttactatttattggtcttacagggatctttatttcttgcaaaggaaacgattctaaggaatacaatcttgttaataacataaccgtaaataaggaaaaaatcttttccgaaacatggcgttggaaatcagaagataaaagtcaggagttcacgttgaaaattcttgaaataaccaatgattcattattcgcacaatattgcgcagtatataattacggacaaaagcttgattgtgattttgagaaaaacatcaatataaaagccgcttttaatagaggggaaaatgcatatgtaggtgattttcacagtttcttcaattcaggaaaggggaaatgccttattaaagtaactgatcaggctttaagttggtcaattttaaaaattcctgacggcgaatattatgctccggacacatgcatcctgaaaaaagaaagcagtatactcatcaaaaaagaaaagggatcagctgtgggtacggttcatctgccatttgattatgaaaactacaaacaaacctgcatacagtcaagctccgctgattgtcaagagaaatatcctctcttaaatacatctgaatatgacaaaatcatcaagattttagatcgtaacgaaggccgtccacaagctatatttcctatacagtcaatcttcaacagcgatatagctgtatatgtcctcaattttgagggagattccagtttacaggaaatagttaccgttaaaaataacaaaatcgtaagcagtcaatctataggatatgcaatgcctgacgaagaaacctacgaaacttttatcattaattctgatatgactattgacgtctatgaaatcagttttgcagaccatttaaacaagaaaaaaaagggaaaatataaactatcagcccatggtaatattgaggagatgagtttgtactagcaggcacaggcgaattaatttcatcagagaacaaaaagagtgaaatagccaaggtccatgaggaagatatgtaaggtctggttctataaagaatagactcttataggtttataataccttgctcgtcacttttgcctgtgaaagaagctcacggatttctttgattttactttgtttaacaatatatgttttacagattttgttgtttaggttcatactgaatttcagttcggtgctttccgcttgccatgtttggttaggtggtggaataaaatctgcaaattcaggacagaaattgataaaacataagatatttcgtttcaaagagagccagaggccgggaaagttgccaaaatcatcaataacgttgatcttaaacatcctctttcccaatgtagtgccccaatacatctcagagatcgttccggctacgagaatgcagggtagagagaggataacagatataaaaagcggatatttcagcaggcaaaagaaaatgaaaataaacggaagagcatcgatgatcttcgcataaagccgttctcttccactgccaggataagaaggatcataggtgaagtcatactcaaagactttataaattcttttcccttcatgatcaaaatcactggttggcctgtgaatgattcttctctcttttagttgggaaattctcatggtagtcatcagtcttcacgattcttatgattctctacttccaaacagacacgttcctaaatctgaaaatctggaaatggaaggggtgtaggctgcatcagccagttttccaaaaccataggcacaaaaaataaaaggaagaccattgaccttggcagcgtcatagtcggtctgggtatctccgacgtatatggaattttcggcagacaactgattccgttccataacaagctgtatgttctcggatttgcgcttggtcgttctaccgtgagattcgaaatcaacaaataaatgctccagctgataatactctaaaaatgattcgatatatccgtcctggcagttgctgacaataaacaggcgatgggtttctgaaagactcttcagtgtttcttcaacaccatcatacagaaggccaccctgtatgcgcaggaccttattttcctgagccactatctccgaaagaatctcctgagcctgctggtctgaaatacccggaacgatatcttttacaatatcatgggccaaaagtcccatatactgatccatatcttcgggttttaattcttttggaatcagctgatgctccaggagcactgcattccatattttgatgatggtagctctggggtcccataaagtaccgtccagatcgaaaattaagtttttataattcaaagtgtttctttttaattacgatttttttatttcattaagcaattatttgactattaaagcaggtacagagcgtaaaatatcttaaagcgaagctcagcttacgattctcaacccttaaaataatcttaatggttaaataataatagatattgcttacaaaatcatgctcaattgtactcttttccttgcctcatccacttccgtcacttttaccctgacgtgctggtgaagtttcaccacctcattgacatccgagacaaaaccgtctttcagctgtgagatatgaaccagtccgctttctttgatccccatatccacgaaacatccaaaggcggtaatattgtttacaataccgggaaggatcattcctgctttcagatccttaatgcttttaacagtgggatcaaattcaaataccttagccgcttttcggggatccaggcctggtttttcaagctctttcaagatgtctttgatccccagaattccgatctcaccggtcatatagttttccggttttacaagggcaattttttctttattggcaatcagttcatgggttttaattcccaggtcttttgctattttttctaccactccataagcttcagggtgtaccgctgaattatcgagaggatttttagcattggatatcctgacgaaagcagcagcctgctggaatgctttttcgcccagccggggcacttttttaagctgtttacggtcttcaaaagctccgttttctgtacggtaattaacgatattttcggccattttttcgccgatacctgagacatagctcaacagtgacttactggctgtattcaagttgatgcccacagaatttacacaacgcatgaccgtagaatccagctcgcttttcagctgtgtctgatctacgtcgtgctgatactggcccacaccaatagacttcgggtcaatctttaccagctcggccagcggatcagaaagccttctcccgatagaaaccgcaccacgtaccgtaacgtcataggatgggaattcgtcccttgcaattttgctggcggaataaactgatgctcccgcttccgaaaccacaaaaacctgcaaaggcttatcaaaagcaattttcttaatgaaaaattcagtttcacgacttgctgttccgtttccgatagaaatagcctcaatattgtatgcattcaccatagaacggatctttttcattgccattcctgattcattctgtggagcgtgagggtagagggtctcattatgcagcagatcacccttctcatccaggcataccactttgcatccgctccggtatcccgggtcgatggctaaaattctcttttctcccaatgggggcgccagcagcagctggctgagattttcagcaaagatctcaatagcttttttatctgctttttctttggcttcctgcagggcttcatttgaaatagcgggttctaaaagtcttttataactgtcttttaccgccagcgctatctgctcagcactttcattattagatttgataattgctttttctataaagtcaatcgcttcttctttatcgatccctacatttgtttttacaaaaccttccgattctgctctcagcatcgccaaaagcctatgagaaggagttctgctgaggttttcttcccattcaaaatactgcgaaaacttctgggcatcctcttcatccttttttgccttcaccactttagaagtaacaacagccttacgctggaacaagcgacgcaggttcttacgaacatacatattttcattgatccactccgccatgatgtctctggctccctgcagcgcatcttcttcagacggaacctcattatttaaatattttgatgctaaaaaccgaacatcattatttttttggctcatgatgattctggctaaaggctccaatcctttttccttggcgctgtccgctttggttttcttcctctttttgaaaggcaggtaaagatcttccagttcctgaaggtcaaagctttgttctattctttgctgaagttccggcgacaaagcattctgctcttctatagattttaaaatagattccttccgcttcatgatctcctcaaactgcctgctgatcttaccgatctgctcgatctggatctcatcaagattcccggtcttatcctttcggtaacgagctataaaaggaatggtacagtcttctgctaatagttgtaaagtattgttgatgctcttctcagaaatatcgagctgcttctgtataaatgctacggtcgtcattgttatgttttcggatcgctaaaatagggttttggaatgagaaaaaggactgttcttatacaaataaaaatcccacgaattacgcaggactaaagatattcttcggcttatagccttattgtgaattgctttgttcaaaaatagtaataattttcaacaggccaatacggaaagccgtaattgtgaagaaatatttatttttacttttaaatcaataacaagataatacaagatgaaaatattaggaattgatcttggtacaaatagtacgggatgggcaatcagaaatacagaattatcagaaaatcagattgaagattgtggggtcattacttttgaaaagggagtggcttcagaaaagggtgttgagtttcccaaagttcagaaaagaacagaaagccgagggaaaagaagaaattatcaagcagaaaaatatagaaaatacgcgttattggactttttgatagagaaagaaatgtgcccattgacaaatgaagaattaaatcgctggaagaaatatgcgaaaggaaataagagagaatatcctcagtctaaagaatttattaattggttgagatttgattttgatggagatggtaaacctgattttaatttactcggaaaagataaaaatgaaagctattatgtttttagagccttatccattgatgaaaactataaagatgtttttgatagcaatcctcatattttaggaagggtgctgtatcagttagtgcaaagaagaggatttaaaggtagagatgaagaggaagctaggacaatgcttgaaggaagtgaaaaaaataaaacaaaagggagggatgaaatagaaaagtacattatgcactatcaatcattgggagcagctttgtatcattttcaaaaggaaaatggtggaagaatcaggcagcgctataaccttcgaaaagattatgagacagaattaaaattgatttgtgaagttcagaatatttctactcccgaatatgaaaaactttggaaaaccattatctggcaaagacctttgagaaaacaaaaaagtttaattgggaattgtatctatgaaaaaaataagaggagagttgcggtgagccatccgctatatgaagaataccgtacctgggtttttatcaacaatttaaatattattcctccttccgaaacagaattgtcagattatctttatgggaagatttatcctctcttttttagatcctcttcagattttgatcttgatgtgatagataaacaactcaacaaagatggtgcttacagatcttccagacattctggaaagacaaaggtgatctcagtaaaactgctgaaaaactttctggatatttttggaacggattggaaagatttattacactgggatgttagtggggaccgaagtgcacaacctcagagaaaaaatggagctgagtatacgttcgaggatttatggcatatacttttaacttttgacggacaggaaaatcttaaaaaatttgcgagagaaaatttgcatttagatgaagaaaaggcaattaaattttctaaaattaaattacaacagggatatgctacaatgagtctttctgctgttaaaaagatgctcccttatctgcaaaaaggatttttgtatagccactccgtatatatggctaatctacacaaaattttaagtgaaaataatatctcgcaaggcatagtcaatcattttgcagaagaaatcacatctcttctaaagaaagatgtatccgaaagaaaaaataccacaattgttaatagtcttgtttctgatatgcttaatagccgtgatagatattatatttctgataacagaggattggatatggaggaaaaaaaacagattcttagtaaaattacagataattatgggacatcaagctgggaaaaaatgaatgaagaagagaaattggctgtaattaataaggtatcaacccaatatttggagtttttgaaaaagccattattccctaaagccaactttttcataaaacccacaagaattcatgatagaatttttgaattcctgaagaatacttatcatgttacagatgataaaaagaagcacctgtggcatccttcagaacaggagaattatatggtggctaaagattattttgagtattccctagataagaaaaaatactatattgaagaacatgaagtttccagatttgtttcaagaaacgctgaagcagaatttgaggggaggcaaatcagacttctcggaaatccggaaccattaaacaaaggattcaaaaatccaatggctttaaaatcattatataagcttaaaaatctagttaattatctgttgcaggaaagaaaaattgatgaagataccaaagttgttgttgaaatagccagggaactgaatgataaaaacagacgtaaagcaattgagatctggcaaaaagaaaaggaaaaagagaatgattcctaccgaaaagaaatcagggagtatagagatctgttttccaatattgcattaattgacgaaaatatactaatccgtaaattaagactatggcatgaacagaataaaatttgtatttatacaggaaaatccatttctctgacagatcttttttctggcaataagtatgattttgaacatacaattcctgcaagtataagttttgacaatgaacttaaaaatcttaccattgctgatgctgcttataacagaaagtataaagcgaaaagacttccaactcaattgctgaattatgaatcagaatctgtttttaatggagaagcttttagttcgatcatcagaaatatggaatttctttttggagaaagaactgttcaacgcaaagaaactaaaggtaaagaacaggttatcataaagtggaaaaaaatccacgaccttgaaaaattatatgatgactggaagaaaaaagcatcttatgccagttcgaaagaaataaaggataattgtattgtaaagtaccatactatcaaattggaattagactattggagagctaaattagctgctttcactattactgaatataaagctggctggcggaataatcagcttaaagatacccagcttatcacaaaatatgcacttccctattttaaaacattattcaaaaacgtttcggtagaaaaaggtacagtaaccgatatttttaaaaaggtatacaaaatccaatctgtcaaagaacggaaaaatagaagtagacatagtcaccatgcggaggatgccgccattcttaccttaatacccaatgcttttcacagggaaagaattatcaaactatatgaagaagaattagataatcggacaggaaaagtttatcacgagaaacctatggagtgggaaactttttctgataagtatattttggagattcaacatcgaattctaatcaataatcttgttgacaatagaacggttacccaaacttataagatatcgagaaaaagaggtaaaatagattacactaagcttaaggatgataaagatgtctatcattataaattggatgatgaagggaggaagatccctaaaatagcaaaaggagatacgatcagaggacagctgcatggtgaaacattttacggggctataaaacagccgttaagaaatgatgatggtcagattctttttgatgaaaataaaaatatgattttgaaggatgacgtttttctagtattgagaagacccttaatatataagaatgatgcgaattcacctggttttaaaacaatagaagaaatagaaaaaattattgttgataaagctttattcgaaatgataaaaaagcaggttgatgattcggatttcaaatcagcccttatgaatggggtttatatgctggattcagaaggaaataaaataggagaaaaaataagaaaaatcagatgctttgaacggcaattgaaatatagcactgcagtgaaagtgcatcaacaccagtttgaatctaaaaaagaatataaaaaaagaacattagctgttaatggagaaaatccatactgtcttttttataaaaatgaagcaggcaaagcaatgaaagtattatctattattgagctgtcagaattaaaactgaaagatataaaaagcttgtataatgaacctgaattttcttcaattgaagtaggtagagggaaaaataaatcaattattccattatacactgttctgaaaaaagaggataaagtcattttctataaagattcttttagtgaattaaaagagcttgatagtgaggagatatccagacggctatttaaagtgtaccaatttgaggcagattccgggagaatgaaattcagacatcatttagcggcgggaatagatactgaactcaaaaaagaaaataaggaatattcattatttgactttaaagagaagcaaatatttctaagattgagtcagggacaatggaattttgctgttgaacataaagatttcgaagttacacttgatgggaaaataaaatggcattaataattataatatgatcatccgctcaatttacatcggcaatcctgcttatcttaaactcaaagatgaacaaatgtatattttagaaccctccactaaggaaacgaaaggtaaagttccggtggaagatttgggattgctgatgttggatcatttccagattaccatttctcatcagttaattcagaaaatgatgggaaacaatgtggtagtagtcagttgcgacagtcatcatttacctcacggaatgatgcttccgctgtatggacatactgagcattctgatcgaatcaaagaccaattagaagccagtgaaccccttaaaaaacagctttggaaacaaactgtggaatgtaaaattgaaaaccaaaaagaagttttaaggcgcttaggaaattattacgagccgatgattgattaccaaaataacgtgaaaagtggtgatattaccaatatggaaggtattgcagcacaacattactggaaatatcttatcagcctggattttttgagacaacgttttggagattcacccaatcagttttttaattttggatattcagttctcagaagtattgtcgccagagcaattgttgaaaccggtttacttcccgttctcggaatttttcataagaacaaatacaacccttactgtctggctgatgacctgatggagccttatcgtcctttcgtcgacttattgataatgcaatggctggcaatcaattcagagtctgaggaattaactaaagaatttaaagccttcatgttgcagattgcgaccaaagatgtaagaatagatgataagaccaggcccttattggttgcagtaaaaacaactgctacatcactgtataaatgctatacgggagaaaaacgcctgatctcttatctcgaactgatatgaatgccgaaaggtttaatgcgtaccgaattatgtgggttttagtattatatgatctcccgacagagactaaggccaatatgaaagatgccaaccgctttcgtaaatctttacttgatgatggttttacattatttcagttttcaatgtatgtaagacattgcccaagtcgtgaaaacgctgaggttcatattaaaagagtgaagtttatgcttcccaaagctggaaaagtggctattatgtgcatcactgacaagcagtttggagatattgaaatattctttgccagaaataaagaagaacctccaccaactttccaacaacttgaattattctaatttttaaatcctgattctataataaatccgttgaatttcaacggattaaattttgaggttgtggttaatcacaaagttagtgatttatgaaagcaattcacaacaagggcgttcccatgtttcaggcgtataggttgtggttaattaccaagttagtgatttatgaaagcaattcacaactacgatttagaaacaggaaaagagaattttgttgtggttaatcacaaagttagtgatttatgaaagcaattcacaacaacgctggtcaatttggtcaaattcatcttgttgtggttaatcacaaagttagtgatttatgaaagcaattcacaactgccacgtcaatgaatttaaaaaatcatgagttgtggttaatcacaaagttagtgatttatgaaagcaattcacaactcaagcttcgtgagtgacacggatggtcaagttgtggttaatcacaaagttagtgatttatgaaagcaattcacaacttaattgctgtaatcgctgcagcaaatgttgttgtggttaatcacaaagttagtgatttatgaaagcaattcacaacggcttttcgaatgactggtaatgagtaatagttgtggttaatcacaaagttagtgatttatgaaagcaattcacaactcaatcgaggaagtctctgcagccttggcggttgtggttaatcacaaagttagtgatttatgaaagcaattcacaaccattcggtgcaatgtgcctcttgatcttctgttgtggttaatcacaaagttagtgatttatgaaagcaattcacaactcatagatgtttacgtaatttgaatagtctgttgtggttaatcacaaagttagtgatttatgaaagcaattcacaacggtaaaggcgtactaccattatgaaacggggttgtggttaatcacaaagttagtgatttatgaaagcaattcacaactgaagtttgggtacgatcgtaacaaaaatggttgtggttaatcacaaagttagtgatttatgaaagcaattcacaactatatgcgaacctcgaaatttttcatatagttgtggttaatcacaaagttagtgatttatgaaagcaattcacaactgcttgcagtgtgtacattttaatgttgaggttgtggttaatcacaaagttagtgatttatgaaagcaattcacaactacagagattataagaacaacagtaatttcgttgtggttaatcacaaagttagtgatttatgaaagcaattcacaactgtcctacacttttagcacgtgcaagagctgttgtggttaatcacaaagttagtgatttatgaaagcaattcacaactccaacaatgcgcaatttattttctcgtctgttgtggttaatcacaaagttagtgatttatgaaagcaattcacaactagtaatcctgtgggtttgtattaggtgaagttgtggttaatcacaaagttagtgatttatgaaagcaattcacaactaatttatcaaaattaatatcttgaatatcgttgtggttaatcacaaagttagtgatttatgaaagcaattcacaaccagcaaccagtgctggatcataagccggggttgtggttaatcacaaagttagtgatttatgaaagcaattcacaactactttacctttctacctcttgttgccatagttgtggttaatcacaaagttagtgatttatgaaagcaattcacaactactttacctttctacctcttgttgccatagttgtggttaatcacaaagttagtgatttatgaaagcaattcacaactgcgctgtaaatcatagttttaaaaactatgttgtggttaatcacaaagttagtgatttatgaaagcaattcacaactataaaaagacattaacggatgaagaagaagttgtggttaatcacaaagttagtgatttatgaaagcaattcacaactcagggttctttgcttaaaatcagaggaatgttgtggttaatcacaaagttagtgatttatgaaagcaattcacaaccatttctaagcttattcctccagccttctagttgtggttaatcacaaagttagtgatttatgaaagcaattcacaaccacagcactttaatacaaataaaagtaaaagttgtggttaatcacaaagttagtgatttatgaaagcaattcacaactggagaatgatttccctagcctgttcacttgttgtggttaatcacaaagttagtgatttatgaaagcaattcacaactcctaaacccttcggtcaatttttcttgtcgttgtggttaatgacaaaattagtgatttataaaaacaattcacaacaaaagaataattgtgtagatgatgggaagttctttgaataacaagtataacaaaactctccttttgaggggagagtcaattgtactaagattctgtacaactattatggttgtgtaaatatagaaggtaccacatgtatagtttatgagtatcatcataaaaagttcagacaaattaatgtaattacgggaacacgtattttatctatgcctacagtatatagttttacagcagttaaaaatattgtacgatgaaaaaaatgattatactatttgcgataggtattgcagcaatctcttgcggcggtggtggatctgattccggcgggtgttcttataacggaaaaacattgcacgtaggagaaaaaggaggttgttattatgttagctcttcgggaaataaagaatacgtagataaaaaatactgtaggacttgttactgaaataaaaatccccacatagcagtggggacttttgtaatcttaaacattcattagaagtgcatagccatcaaaaggggtgttaacgacaagtttaactatctcgggatagtcataaatgtctgtaattacttcgccataaatatctccttctttaccatatacttgtacgatgtaatatgcataaggcttttctttcggaatagaaagctcatagccattgtctgttttgttccactgattttcagaaaagtcaaatttcatagttgatattttttagttcacttctaatatacaaataatataaatacagccattataatttgccatatgatcgtaactgtggaatctcatctagatcaagttgaatggagttcatgggaccgagtttgtagatattcaagtgggctgatcccggataaaattttatggcctaaataaaaaaggagatgcactgaatcttttggaatatgcagctgtaaattataagaatcgataatttcgtacttccagttatataataggcagtgatgcatcatatcttgtaagtccttactgagaagtgcaagggttaccgtaatttcattattttttacttcatggggtacaggttccattggtgttgaaattttttgtatccattatcaagcaataggccaaaataccagttggttttataatgtggtatttattttttttagataccacaaatatgatcatttcattaaacggtgatacttctggcatgcgcattgttatgatcagtgcgggtttgtaagggaaccttttatataacaccacatcacttttttataattcatttatattctaacccccatttcgggggtttttgttatttggactatccggtcaacccgaacctgacaagagcctcaatctatatttatattactggtgaaactgcaggcaataaatagccgaggagcttatccagtattcatttcaaaccacttcaaagcccattcattttccaccatacactgtaatcttaatttcttgatgtatgataagggattggtaatttggttttttatacttttggaatctgaaaaataattaatttcgataaacttttaaaacaattcaataatatgaaaaaacttagtgtaattgcattagtaggagtaggattgctggcagcatcatgtaataaagaaaaatctgcagattctgcagctacggctcaggagcagacggtagcggaaagcaaaggagaagtattagctgttgatacggtaacttctgttgtcaactggaaagctttccacaaaggaggaatggctccacgttggggaactcttacggtaaagtccggagatatcagtgtggacggtggtcaggtttccgctggaaactttgtgatcgatatgggttctatcaaagtagatccggcttcagtaactgaaaaagataagaaaccggcagatcttgaaacacaccttaaaagtgccgatttctttgatgcagcgaaaaaccctacctcagatttcaaaattacaagtgtaacagatttagcagcagcaccagcagaagctattgcaggcgctaacaaaacagtaagcggaaatcttacattatcaggaaaaacagtaaatgttactttccctgctaaagtagaggtagctgaaaattcagcttctgttcaggctaaatttacagtgaacagagccgattggggaattaaattcggaacttccgaagcagatcctgcagaatggatgatcagcaaggacatcgaaattgctcttgatgtaaaagctaaaaaataactgtaaccgatacaggatgtacaggggccgcttttaagtaaagcggcttttttgtggtatatttttaactttttttggcattcactaactgccggacggcattattttttctcttaagttaacataatacctaaaatcatatattatgtcaaaaaagattgcaattctggccactcatggctttgaggaaagtgaacttcagtcaccgaaagaacatcttgaacagcagggctggactacccatattataagcccggaaccgggggccattaaagcgtgggcagaaaaggattggggaaaagactatcctgtagataaaaccctggatgaggcagctgcttcggattatgatgctttggttcttcccggtggagtaatcaatcccgatcagttaagaaccaatgataaagctttatctttcgtcaaagatttctttgtgcaaagtaagccggtggcggccatctgtcacggaccacagatcctgatcaatgctgaggtggtcaatggtagaaatatgacttctgtcaactcgattagcaaagatcttataaatgccggtgcccattgggaagatcaggaagtgattgttgatcaagggctggtgacaagcagaaccccaaaagatctgcctgccttcaatgctaaaatggttgaggagatcaacgaaggcaagcattaaaataccactgtgtaaaaatatgaaagattcggaagtagaacaccggatctttttttatgacagtgtcgtttccatcatatcagggataatattttatatttgtggcaaattgagactgaagatgattttttttctgctgattataaacctgcttacctttggaatttttggcttggataagtataaggcaaagcggcatcatcggagaattccggagcatgtccttttaggactttcactggcaggaggctttgcaggcgctgcctgcagcatgatcctcttcaaccataaagtttctaaaaaatcatttcttgtaaaatttatcctggtggttttgattgatctggttgtattgtacaggctaataaggcattgattgacctattcttcgagataaacctgtacatttttaaagaatttcctctgattatcatacagatatcattttcctttgttagtgttcctgcggaaatatcattgatggtggaatgcttatcaatagttgaatctttttaagataaataatcttttatagatgttttttttgatatctttattgttgaaaaccaaaagattatgctatgacgaaatttaggaaaattttcgaaaagtgacataaaaacagttcatggaggaactgtaaaagaaatggtaagatgccaggatccggactcacgctttgtgagatgggatggggaacagaagtttccggcagtgcgtgagtttgccattgcatgtggagaaccacctgtaaccgattcatgtgaattaataggtgtatataaatgaccttaaacgatactttttgagcagtattttttatcagtctgtaaataagtattttaaacataatattaaatatttatataacaaaactatttttcatttaaaatcactatttttgcacccgtaaaaatcttttatgcaaaacattagaaatattgcgattatcgcacacgttgaccacgggaagacgactttggttgacaaaatcattcacgctaccaatattttcagagaaaatcaggagagtggagagttaattatggataacaacgatcttgaaagagaaagggggattaccatcttatccaagaatatttctgttacttataaagacacaaaaattaacgtaattgatactcctggtcacgcggatttcggtggagaagtagagagagtattaaaaatggctgatggagttattttgttggtggatgcgttcgaaggaccgatgccgcaaacgagattcgtgcttcagaaagctttggagttgggattaagaccattggtggtgatcaataaagtagacaaaccaaactgtcgtcctgacgaagttcacgataaagtatttgatttgttcttcaaccttgatgctacagaagagcagctggatttccctacattctacggatcttcaaaacaaggttggttcaacacttcattagaacagacggaagatatattaccattattggatggtatcctgcaatacgttccggaaccaaaagtaacggaaggaagccttcagatgcagattacttctttggatttctcttctttcttaggaagaattgcaatcgggaaagtaactagaggagagattaaagaatcccagtggatcggtcttgctcaggcagatggtaaaattgtaaaaggaaaagtaaaggagctttatgttttcgaaggattaggaaagaaaaaagtaactgaagtacaggcaggagatatctgtgctgtagtaggttttgacgctttccagatcggtgattcattcgtagatcttgaaaatcctgaaccattggaaagaacggctattgatgagcctacactgaacatgacgttctctatcaacaactcacctttctttggtaaagacggtaaatatgttacctctaatcacctgaaagaaagattaacaaaagaacttgagaaaaaccttgcattaagagttcagcaaactgatgatgccaacacattccttgtttttggtagaggtatccttcacctttccgttttgatcgaaaccatgagaagagaaggatatgaaatgaccatcggtcagccgcaggttatcttcagagaaattgatggggaaagatgcgagccttatgaatctttggttgtagatgttcctgaagaatttgcttcaagagtaatcgatttggcaacacagagaaaaggtgaccttcacattatggaaaccaaaggtgaaatgcagcatatggaattcgaaattccttcaagaggtttaatcggattgcgttctcagatgttaacggctactgcaggggaagctattatggcacaccgtttcacagaatataagccttacaaaggagctattcctggaagaaacaatggggtactgatcagcaagacgacaggtccggctacagaatattctattgcaaaactacaggatagagggaagttctttgtggatccgggtgaggaaatctacacagggatgattatcggtgagcagaataagcctggagatcttgtggtaaatattgtagaagcaaaacagctgaacaacatgagagcttccggaaaagataaagataccggtgttgctccgaaaatcttattctcactggaagaatgtatggaatacatccagggtgacgaagccattgaggttactccgaactttatcagaatgagaaagaaaatcctttctgaagaagaaagaaaaagattggaaagatcagcgaaagcttaatacaattcttatctataaaatcaaagcctcgatttttcggggctttttttctgtgataacctattaaatgattattttggcataataatctctaagaaataaaaaaataaacgtaaagtagttttgaaactatgagaatgaagaaattaaagctaattgttttatcaggtgttttagcatcatacagcatttcatgttcagttcagaacaatgttgtaacaactcctccctccaaaaataccactcaacctaaaaacaataccacaccccctaaacccataactacaattcccgcttctgcagacgacactttcagaaccacacttccggaaataaaacgtgaatttcgcggtgcatggatcgcaagcgttgccaacatcaactggccatcaagaaatgacctgaccgtagatcagcaaaaagctgaggccatcagcatgctggatatgctgaaagataacaatttcaacgcggcaatttttcagatcagaccctctgcagatgcattgtatacaagtaatatagaaccctggtcatactttcttacaggatccaccggaacagcgccatatccgaattatgatccgcttcagttttggatagaagaagctcataaaagagggctggagctgcatgtatggctcaacccttaccgtgcccaccataccaatggaggtacagtaaataatctgtcaatggccagcaagctttccgatattgtcgtgagactgaagaacggaatgtattggtttgaccctgccaatccaaagactcaggggcatgtgtcgaat

SEQ ID NO: 307 - DNA, 24245 bp, synthetic construct
  source 1..24245: mol_type = other DNA
  misc_feature 1..24245: note = Synthetic
caacattacaacataaaaatcgttacaaatactatagacaactctatattatttactggagcgttcgaacttgataatttggataatgccttaaaagcaactaccaaaagtcttaatttgacctacgtatttaataataaaaacgaggttgttattaagaatgcaaaagagtagttggtcttacatcatatttataatttgcatattttggtctattaagatacaagcgcaaacttcggaagaaaagattccgcttaaagttgtgctcaataatttgtcagaccaacataaagtgcagttcaattatcaaagtgatttattaagtgaaataactgtttttccacttccgaaaaagagtacgcttaatgaaaacttaaagcacatagaatctgaaacttcattgcggtttaccaaaattggtgcatctatatacactattactaaaccgtttataatttgtggttatttacaggatgttatttcactacatccactttatggagcgacaattaggggagaaatacaaaccaaaataacagatgataaaggcttttttgaaatatttgtgaattcattagatgaagccatcgaaattcggtttttaggttttaagacgataaaaaagcaagccagattttttaccttagaagaatgtgccacaataagtatgtatgaagaaaaacagcaaatcgatgctgtagttgttgaaggctatttggtgcgaggtatcgacaaaaaaagtaatggaacaaccgaaattaatttctctaaatttacttcgcttcctggtcttatagaaacagatgttttacaaacagtacaggcattacctggtgtattgagtatagatgaaaccgtttccaacataaatattagaggcggttcacacgaccagaatttgatattgtgggacgatattaaaatgtatcaatcgggtcatttttttgggttgatttccagctttaatccgcaaatcacaaaaacagcaacagtcattaccaacggtactgatgcttcatattccgatggtgtttctggcagtattcagatgaatactgataaacaaatacaaagtaattttgaaggtagtttaggtgtgaattttataagcacagatgtttttgcagacgttcctttaggcgaaaaatcttcattacaaatagctggtcgaaggtcaattcacgactttgttaatacacctacctataatgtttattttgatagggtagcacaacaaactgaaatagcaaataatgttgaaagcgtggtaaattctaatcagaatttcaacttttatgatacgtccctacgttggttgtacaatccttctgaaaaagaccgtattcgatttaatttcattcttatcaataacaatttaacctttgatgagaccttaatgaccaatctagatttagatacaaaaacaagtagtctttcgcaaaacagtatcgcagcaggattaagttatgaacgccaatggaatgaccatttttcaacacacttcaacgtttacaatacagattataaattacaggccattaacgccaatgtgttgcagcaacagcaatttttacaagaaaacgtagtttctgaaactggaataaaatttaagggtttatacaaatgggacaacctatttttagaagcaggctatcaatttatagagtctgaagtcgtaaatactaatgatatcgatgtgccgcgttttttaagaagagactcggaggttttaagagaacacgctttttttgtgcaaagccaatatgaaaataacaatagggacttttcagtacgacccggaatacgacttaattacatagataaatttaatgttcttcttgcagagccaagattaagtattagaaaaaaacttgggcagcattttcaaatagaagctttaggcgaattgaaacaccaaaacacttcacaaatagtaaacttccaaaatgactttttgggcgtggaaaaaagaagatggcaacttaccgataactatagtatccctattttaaaaagcaagcaagcttctttaagtttacaattttctaataaaggatggcttgtagatgcaacaggctataacaaagaggttgtcggtatcacatcccaaagccaaagctttaccactaaatatgagtttacaaaaacaacgggaaattataatatactaggccttgattttttaatacgtaaacaatttaagaatttaagtagctggttaagttactcttacatgattaatgaatatactttcaataatcttgaagatatacaattccccagtaattttgacgccacacattcctttaatttcgggacaacttattcaaataacagactcaatatttctgctggacttaattatagaacaggaaaaccaacttctatacccttgcaaggaaatgaaattctaaatcaacaagttaattttgatgtcgcgaataatactagaattccggaattttttagagtagacctatcagcgatttataaattgaaactatctaaaggtttacgaacagaaataggcgcatccgtctggaatgctctaaataaagaaaataccatcaataactattatcgcgttggtgcagacaatagacctattaagttttcaagagaatcgttaggtctgaccactaattttatggtgcgtttttacttttagggattaattccaatgaccgcttgcaacgtaaagccttttcaattgaataagttgtacttcgtttttgaagtattcattactcagcatcttcttaagctgacttacggtttctttagaagtaaatccagcagtcctacataacgtatcaaatttttgcatttcttcaaatttgaactttgccttttcgacaaattgttctgcattctcagcttcctcataacttgactgaatctggaaatgcctttcgatagtgccaggtttaccaatgattaatttttcggcattgccttggatgattgcatttgtagtaaaaacataatctctgtcgtgtaccattctatgaattcgagtttgaccatctgcaatattatttgggaatatttctaaataatactttgtatctaaaggaagtgtaattacagcattcgggtcaaataacccatcaaaacgtgtcgttttaattccacgtatagatactggattatcacaagttattaagggcgcatttgcatcattgattctatggacatttatagtgcaatcgtatttaaagtccacaaactctttccatttttcgagatgttgtactaaaaacacaactctgtttctttctttaaattcctctctaactttatcaatatcttttaaattgaactcgtggcgaacattttcaaaagtgaatttgacttcaccatctttatcagcgtataaaaccatcctatctaaaatctggtcggtaaaagcattttgatgattaagaaaccttggtgtacggaaatagagtgaaaggcagacatatagtatttgctttttttggtcagcagttaacactttaacactttcatcaataagcagtttataaatcttagggaattctgaatctacgtgttcggcaaagtgatgttctaaatcatatttcctgtcaatctcagcatttggtattgtgtaaagattctttttgaaacaaatactttttgtgctaatctgctcaataagtaaatcatcttctagcctatatgcatctacaaaataattgccctttttttcttcgacaccaaaattttttaaataggaacggggaatataatgttgtttgatgggttcgtttttagccatatttttaatgttcacttgtataatccaggaatatatgtcttgggtgttaaaaaaggaatagacaatcttgcttgagcggtttgattaaaattatagtttttgaagtcagtaatttcgaaaaaatcgtttcgagttggttcagaatttaaggcatagacaattccaaaaggtggaaatgtaatttcgcccaaagtatgatacccttttttagttcttgccattccccaaccgtttcttacttgcttagttgtggtatggtaaataaatactcttaaactgtctggaagtgcttttgaatctttatctaggataaaattagaaagtccttctaagtttaataactggtcgcttgtgtcgatagacataaacatcgatagtgcttgtttcaatatatttaatggctgaatggcatattcaaaaataatagtctgtgatgcccagattctattagttaaagccatcatacccatataggcaaatttcttatagctttcgccatagtaactgcctgttagattattacaggttttgcataaataatatccacctgcaccattattgctgagaatacgcttgccatataggtaactttctttatcgtgaagatgaacagatttttgaaagaatacaggatttgagttaaaggcgctttgcggtggaacgtgctcaaacgttaattttttgtgcttaccacatattctgcaaattccttctttcttcaaattaagttaattaacagcttcatcctcactctcaaaagttctagtaacacttatatcaggctcagggttattcacaaaaaatgaaatggtagatgaaccatcaataggttgtctatcagaaaacacatatttcgtaacttcatattcagactgttttttttctgaaataagtttttgattttttttgtaattattgttaatagtttcattgattaaaaaggcagtatttcattagtaaattctttgaagatttcacttgcaactgctttatcaaaagcttcggcagcaactaaatcatataattttgattttaatagttgtccgaacgattttttgttaagatttggaatatcatctctcaactcgtcgaactcgtcaaagattatttgctggccaaaacctaatccttctatcttaacaagaacttcctttataagattttttaattcctcatcagaactactaatttttgaatagtccgttactttggcttttcttgcctgttcaatcatatactttccttccaaggttagtttagcattgacatttcgaccattcatacattcaataaatcctctgttctctaacattctaccataatcccaatcttcaccactgccattcaattttacaccattaccttcaagaatccattttatagaatggtattttctgtcattgtataggtcataaagtttagaaagaataaggtcaagtctgccttcggtatcgaggcttttgcgtttctctaaatcaatttcgtccgcccgcacaatggcatctgaaatgaataacattttcaagtagtagtcaagcccgttgatttcatcttttagtgcttgaatgtcattcttaaccctttggtcaacacctagcttaaaaccagtagaataacctctttgcgctttgaattcgttggcgaaatttctattttctggtttaaaggatgtactaacataattaataacagtcttttcccaagactgtttttcttcctttaattcattcagagagtcttcagttctagctactttatatttttcaaaaagagcatttccttcagactgaaactcttcgagtttccttttaaattcttcccatttaacctttaatatcatacgcataaaattatgctcgtaaaggtatgggaatcagaatggaaaatgttaaaattctacttcaagatgttgacaggtggtaaacaaatcatttaaaagttgattacactatctaaagcatcatctgtgtctttatgaatgaagttagcttgatagctaatggttgtttttaggtcgctatgacggtagagtttttgaagcattttaattgggattttatcctcagatagatttccaaagctatgacgtgcaatatgcatagtcactttctttttaatttttgctttcttggcaacttcaactaagtatttgttgaattttttcgtagctgttttagttttagcatagacgtctttagcatcgttaaattcggcttttttcaactctggaaaaacaaaatcttcatcactttttttgtctttcctataacattctagaatggttaaggctttttcaggaattttaagagaaagtaatttcgaattcttattcattctgtaatgtaatctttcgtcataaatatcagaccatcttatttcgagaacatcggcagctctaataccagcaaaatagaagctaaataaccaaacattacgagcgtgggtttcactcttggttaaattttttacggcttcaaaagctactatatcttttttattaagtcctattttttcagtttctggaaacttaatcctaatcttatcagaaccaaatggataaagctttctgtctactaagttcatttttattgctctattataaatggttctaataacaaccaaattatttacaattgacctttctgaaagattaaactgtttctttagatagattttgaattttcttaagaactgttcgtcaatttcgggaaaggttagttgcttacttttattgaagtttataacgtgattcacacggactttgtccgcagataactgagcaagcttattattttcttcaagttcaaaaagaaaatcattcgctacatcataaaaagtacttgatttaggttcggaatatagagactctttaatctgattcgctgaataatcctttttctcagactgtaaatctataagcgctctattgacctctaataattttgtagctaataaattattcaatcttcccgaattagaattggattttttaactcgtgatttattttcatcccaatcttttaaatcaacgtaatgacctatataatgatatgtagatttacgatttttagtaattcgtactgccaatggatatagcccttctttatttaccttttttcttattacaatttttgcgttcgatgccatacccttaaaatttagaatataaagataatcatttttggtacaacataggtacaacaaatattgattttaaatgcttttaaatgaaatcatataaaattaaaatattgctaatcaattgattataatagtatttaataaattttgatactaaaatcgctggattcaaaatccagttcttcggagtgcgggttcgattcccgcctcgagtacttttaaaaaaagctgagatctacatctcagctttttttatgattttaaaacagcttgatattcaccttaattacctcgtttttttagaatgacccaagagtgtaataatgctccttgaacgtatcgtgcatttttaattttagacatatggtaaacttcaccttgtattttttattaggaggttgaaaaacatgtttttaggtggtcaacatttagaggcttggctctgtaaattttaaagacatatgttttaatactaagagtgaattatgaatgtgaatgcagggtttgtgtaagttcacatcaaaatagtaggggtttacaactatttttatagaaagacagaaatatggtttactattgtttattacttaattatcaagaatgagtttgtttaatacatcaatagttatttcactttacacggtgttaatgttttgcgcaattggttctgcccagaatgttaccgatgatttcagttccgggaattataccggcggggctaattggctttctaattggtcagaaagtgacagcggcggagcttctggaggatatattagggttagctcccaacaactacggttcaattatttatggaatgaaactatacaacgaagcacaaacattgcaacggcaacttctgctaccttgagtttagattggtcatcaagtaacttatcgctcaataaagatttagatatacaaatatctaatggaagtggtggttttacacatattggtagtgtgggaggattagggatttcatcaggaacgttctcttttgatatctctgcttatatttctgcaaatacaactattaaaattggcaatgatgaagttagttcgggaaactggagtaattcaaatgctactgttttattggataatattgttatagctattacttcggtaccggttccggtacctaatgataatgacggtgacttaattgtagatgctttagatttggatgatgataatgatggtataccagatgttcttgaatattgttctacaacggaattatcagatttaccttcaataaatgccgggggagatagaaccatttcttatacacataccgatacaggatatttgcaatttgattttatgaccttggataattcctttcaattttctgtaaatggaaccaatattcataataggatccttcagtttgaatctggtgcttataattctgggactgaggtgttaatgcgaacagctgtgggtggtaatttattatatagtccttgggtagtaaatacgaacggattaccaaggattaggcttattatcggtgaagaaggtcaggtacaggtttatgcaacccgaaatagcaattctacagccttagaactattggtaactagtgatggaagtctgtttaataccctgccgtgggttgcgggaagtgctaataattttttgttgactaatcctgatgagggtggaccagaagggcttaccggtaatctattcttgggtgttatctgtgataccgacggagacggtatatctaataaatttgatttagactctgacaatgatggaatatatgacgtagtggaaagcggagccctttccatatcaggtgttaatgatgccgataataatggggttattgatggtaatatccttgattttggtatcaatggattacacgatagtttagaagatgcagatacctttactccagaattggaatataccattagtgattcagactcagatttagattatgatgcttttgaaattgatgcagataacgatcagtgttttgatgttgtagaagcggggtatactgatggggacaatgatgggatcttaggttcttctcccgtaacggtagatccggataatggtttggttacctctggtgtagacgggtacaccacacctggtgattttgatgcgaatggagtttttgattttcaagaagctggcgcgatcctttctgtaacgacacagcctgttgatcaacaggttcttgttggtaatactgctagttttacggtagttgccaataatggtaatatttaccaatggcaagtaagtacaaatggtggtgttagctataataaagtaacggacggacctgaatattccgggtcacaatccgctacattgaatgttattgagcctcagcctaataaaaatcaatatgtatatcgcgtataggtttcctattcaactggtgtttgtccggcacccgtattgtcctcttctgcggtgttgagtataaaagttggtagtgtaatcaccaaccgtcatgtcacctatagggttaaaaaggggtaagctatattgctttacacgttttaaaatagtgctggtcttttcttacgccaaaacagcttaacatttcatggtcatatctcatgaaaattttaaaagtagttcattgtgtgttttttttatacaccaataagtagtgcttgactaaaactcaatgtaatgctcttttctgggcagttcccttttttactttaaatacgtataaaaagtgttaaggtaatggtgtttctattaggtctttgctcttgcctaattactattgaaaatttttattctttttattttttagctcaccttgttgcggttgggaaactacagtacatgaaattttaagataaaaaaagccccgtattggaagacgaggcggcttaaatctacttagataatattttcttttccttacggaaaaccgtaaggttctttatttttaataccgtaatttcatagtgtagaatgataaaaaaaatcccacggagtacgcaggatttaagatttttcttcggcttatagccttattgtgaatagctttcagactactaatataagtaaaaataaaatatgaacaacttaactttaggaattgatcttggaaccaacagtattggctgggcaattagagatatcacagcaagtgacaatcaaataataaaaaaaggcgttttaatttttgataaaggtgttggagaggagaaaggtgttgagtttcctaaagtgaaaaaacgtactgaaagtagggggaagcgtagaaactatcaagctgaaaaatatagaaaatgggagttattagattttctaataaaacatggaatgtgtccattaagtatagatgaactaaatagttggagaaagtatacaaaaaaagaagaacggaaatatccccaatctcaatcttttttaaattggttacgttttgattttaatggtgacggaaaacccgattttcatttatttgggagtgacaagcatgaaagttattatctatttcgagcaaaagcggttagtgaagcggagattgataagcgtgtttttaaggataatccagaaatattagggcgtgtattttatcaacttgttcaaagacgtggttttaagggaagagatgaagaagaagcaaaaacaatgcttagaggctcaaaagatgggatgaccaaaggtagagatgctattgctgattatataaagcaatacaaaagtttgggagccgctttatatcattatcaaaaagaaaaatcaagtcactcagaaaaaattagaattcgtcagcgttataacctgcgcaaagattatgaaaatgagcttaaattgatttgtaaaatacaaaatcttaacaacgacttttattcaaaactacataaagcgattatttggcagcgaccacttcgtactcaaaagggtttaattggtttgtgtacttatgaaaaaaataaacgtagagcaccaataagtcatccgttgtacgaggaataccgtacttgggtttttatcaataatttaaaaattcaagctccagaagaatgggagcatagtaaatatttaattcaaaaaatttatccaatattttataaatcgggtaatgattttagcttgagcactattttgaaacaactaaaaaaagatggggctattgttaattctggctatggttcacgagaaaaaactaaagtactttctgctaagttactcaagaattttgaagatatttttggagaaaattggcagaatgagcttggctggcataatgcttttctaagagagaaacaaccaaaaaagaaagcaaccactaattacagttttgaagatatttggcatgtattagccacctttgatagcgaagaaaagctgagagaatttgcattagaaaaattaaagctcagtgaagaaaaagctatcaaattttctaaaatcaaattacaacaaggttatgcaacattaagcctttctgctataaaaaaaattcttccttatcttaagaaagggtttatatattcaaaagctgtttatatggctaatattcaaaaggtattaggaacttatgaagtttctagtgcttttatagaacattttgcaactgagattgatgtaatatatgaagaagtatctgctaaaagaaaactgaataatgttttaaacggattatttaaatatgaactattagcagaaggcgattatcatttaggttcaagtcaagatttagacgtctcggattatagtctaataaaacaaaaattgattaatgaacttggagaaaagacttgggaggaaacaattaaggaggatcaggcagactatttagactatatatctaaagaatataaatcctttttgcaaaaaccttttcaggctaaaaaaggagcattcatagcgcagcctcgtattcatcagcatatttttaactacatacaagagcattaccaagtagctgatgaaaacataaaatatttatggcatccatctgaacaagaaaaatatcccaatgcatcaagttacgagaaggtagaactaaaaaacgaaacggtttatattaatgaaaatgatattgatgcttttttgaaaaaaaaaccgaatgcagagcttgaaggaatttcactaaaattgttagaaagcccagagcctataagtaagggatttaaaaatcccatggccttaaaaacacttcataagttaaagcaattactgaattacttattgcaaaccaatcaaatagatgcgcacacaagaatagtggttgaaatagctagggaacttaataacgctaattatcgaatagcacttgaaagatggcaaaatcaacgtgaacgcgagaataataactataaaaaaactattgaagaaattaataaagagtcaggcacttcttataattctgaagataaaaacttaataagaaaaatacgtttatgggaagagcagggaaaaaaatgtttgtatacaggagacactataaataaaagtgacttgctcaatggcgaacattttgatattgaacacacaataccagcaagtatcagttttgataatgaattaaaaaatctaacgctagcaaacaaagattataacgctaatgtaaaaggaaaaaaatatccaactcaattagataattatcatacggatagtatgtttaatactaggtcaatacaacccattattaaaaatattgaagccgtttttggtaaacgaacggttgaaaagaaaatcataaaaaagcatggaaaaaaagaagaaattacagtagttaagtggagtaaaattacagatttagagaagcaaatagatgaatacgttaaaaaaacaagctacgctagtaccaaagaaataaaggatgtatttattcaaaaacgtcaccagttaaagtttgatttagattatttaaaacaaaaaatacaaacttttacagtagaagagtataaagcaaagtggcgtaatagtaaattaagagatacgcaaataatgaccaagtatgctgttccttatctgaggacagtttttaataaagttgaagtacagaaaggaaatgtggtaaatattttcaaagaagtataccgggtaaagatggtaagtgataaaaaagatcgttcaaagcatagtcatcacgctatagatggtgctattcttaccttgataccaaaaccagcatatcgtgatgaaatcattaaaaaatatcaattagaaaaagataaccatacaggaaaaacgtatcatgaacaaccaatagattggcataattttaaaccaatttttataaaaaacattgagacagaaacccttattaataatttaaaagactatagaacccttacgccaacctttaaaaaagttagaaaacgagggaaaatagattatgatgaaaatggaaagataaaatgggcaaaaggcgatgcaataagagggcagttacacggtgaatctctttatggggccattaagcaacccaaacgggataattttggtaagattatttttgatgacaataaaaaaatgcagctagaagatgaggtaagacttgtcatgcgtaaaccactattgtacgcaaaagacgcctctagtccagggtttaaaaagttagatgatttagaaaaggttattgttgataaagctctttttgaaataataaaaaaacaagttgtaaaggctgaaagctttaaggaagctatagaaaagggcgtttatatgcttaataaaaaaggagagaaagtaaacaaaatcagacatgtcagatgttttgatagacttaaatacacaacagctgtacaacctcataagcatacatttgtttcggataaggaatataaacaaacaacttatgcacaaaatggagagaatgtctattgtttgttttataagggaaatgtcaaaggaaaagaagagcgaactattagtataatagggatttttgacttagcaaaactagacatacaagacgaaagagaattttttgaaattccacattttaattcggttgtaaagaaaaaaacgcaattacccctatgtgctgttttaaaagcaggtcaaaaggtgattttttacaaagagagtgtaaaagaacttgcagaattaaataaagaagaactgtctcagaggatgtataaaatgtatcaatttgaatctgatgggagaataaagtttaaacatcacatcatatctggtagtaatactgatattaaaaaagagcataaagagatatcatcaataaattttaaagagttttcgccccttttgagaatttcatcaggtggttggaattttgccattgaaggcagggattttgaaataaaattggatggagcattaatctggaagttctaagttatgataaaacacacgctattctttggcagtcctgcttatttaagtaccaaaaacgaacaattggcagtaaattttcctgaagggtctaaagatgaagtgaccatcccaattgaagatttgggctatgtagtgctagaaaatcaacagattaccattaccaatgggctgttaatgaaattggttcagaataagaccgcggtaattacctgtgatcaacaacatttgcccaatggctttttacagcccttggtagggcataccgaacaaacggagcgtatgcggcatcagttaaatgccagtctacctttaaaaaaacagttgtggcaacaaacggtcatggctaaaattgaaaaccaaggcaatcatttactgcaaaggggtaaaaaggctttaaaactgaaacgctgggcaaaagaggtgaaaagtggtgatggcgacaatcatgaagcctatgctgccgcctattattttcagcatctttttgatgtagaagggtttagtcgtaaccaaaaaggtgttgcgcccaataatttacttaattatggctacgccatacttagggcaataaccgctagagccttatgtagtagtgggcttttaccctctgtgggtatttttcatagaaataaatacaacgccttctgtttggcagatgatattatggagccttaccggccttatgtggatatgttggtctatgatattgttgaaacgggttgtcctttagaggagctcaataccaacttaaagaaagagttactgggcatacctgctatggatgttattatagatggtaagcaaagtcctttaatgaacgctatgagccgtaccacaaatagtttatacgagtgttttgaaggtggtagtagaaaacttctttatccagaattataagtatcagtaaccttaattagagtggttcattaaataattggctggtatgaatgaaaatagatacgaacgtcttaaccaatatagatgtatgtgggtactagtattttttgatctgccaaccgaaacggcaacagaacgtaagcatgcggctaggtttagaaaagatttgctcaatgatggttttaccatgtttcaatttagtatatacatgcgcttttgcccaagtagagaaaatgcctgggtacatataaagcgaactaaaaatgccttgcccaaaaaagggaaagttggtattatgcagattaccgacaagcaatttggaatgatagagttgtttcatggtagaaaggaacaacaaccggaaacaccaagccaacaattagaactgttttgaattaaaaaatagtgggttgcctttctgtttttagaaaatatggaggttgttttttaatgctacaataggggttaaaaaacagtataccaacttgttatggttggtatactgtgaatcatcaataaaattaaagaactgaaagcaattcacaactatgttgtagaaaatgttatagtcgatcatactgtgaatcatcaataaaattaaagaactgaaagcaattcacaacccattaaccgacttaccgcccaataaatcactgtgaatcatcaataaaattaaagaactgaaagcaattcacaactaaaagtttttcaatgtccaaaatgtttagactgtgaatcatcaataaaattaaagaactgaaagcaattcacaacgctgttgtagctctacctctgccgtgtcaaactgtgaatcatcaataaaattaaagaactgaaagcaattcacaacagagaaattgcaataccattggacaatgaaactgtgaatcatcaataaaattaaagaactgaaagcaattcacaactacccagccgctttaattaaaaatgcgaaaactgtgaatcatcaataaaattaaagaactgaaagcaattcacaactattagcggactcgggggtggttttattgtactgtgaatcatcaataaaattaaagaactgaaagcaattcacaacttggtattcatcacttcgtctagttttatgactgtgaatcatcaataaaattaaagaactgaaagcaattcacaactgttcataattcaatagatatgttccttctactgtgaatcatcaataaaattaaagaactgaaagcaattcacaacttgcattgttttataagttcttcccgtatgactgtgaatcatcaataaaattaaagaactgaaagcaattcacaactcaagatggtgatatggctatatacttagcactgtgaatcatcaataaaattaaagaactgaaagcaattcacaactttcaggcgaaaaaggaaatctccagaacgactgtgaatcatcaataaaattaaagaactgaaagcaattcacaactggcataccgctatccaatacaattggctcactgtgaatcatcaataaaattaaagaactgaaagcaattcacaactatttcatatcaatttgaattttaaaatatactgtgaatcatcaataaaattaaagaactgaaagcaattcacaactatttgggattttatttcttcaatcgttggactgtgaatcatcaataaaattaaagaactgaaagcaattcacaactagtagggcatttaaaagagcctctcaagaactgtgaatcatcaataaaattaaagaactgaaagcaattcacaacgagagtgccggttatgagctcaagggcgatactgtgaatcatcaataaaattaaagaactgaaagcaattcacaactcaatcgcctctatggcttatggcccaaaaactgtgaatcatcaataaaattaaagaactgaaagcaattcacaactgcaaatggaatgcatgtaattttgtttttactgtgaatcatcaataaaattaaagaactgaaagcaattcacaactacggtagttcaaagcctttgccataatccactgtgaatcatcaataaaattaaagaactgaaagcaattcacaacaacattaaatctaccccctaaataagttttactgtgaatcatcaataaaattaaagaactgaaagcaattcacaaccttgggttggtaatgtttggaaagattataactgtgaatcatcaataaaattaaagaactgaaagcaattcacaacttttgtcgtcgatattctttaggtcaaacactgtgaatcatcaataaaattaaagaactgaaagcaattcacaactgaaaccattccgtttcaatctccattataactgtgaatcatcaataaaattaaagaactgaaagcaattctcaatgctttacatattttatattactacagatttctttatttttttcttctttattaaagaattcttatgggcatttaattgctgcaagatactgctggctaaaaactttgctaaattaacgggtactgcgttaccgatcattttataaccggcggccacttttttataatgaaaaataaagtcatttggaaaagtctgtatcctggcacattcacgtacacttagtcttctgtaaagatgttcttttcctggtacaaaaatccgaacgtctttttcaatcagtttcatttttggcgcctgcgggtgtattggtgcatgcctgccgcctgcttgtatggtaaacgattgttcgtcccaattacgaacgcggtttctagacatgaacatggtagaaaaaccaccgatcatatattcatgatttggaacaggacaacgtttaccgttggtgttattaaactctaaagcaggaattgcttttttatctaaatcgcctatggcagattctagcgttattttaggaaaagtttcagtagggaattcatatttaaaattcaggtcttttctaatacctataaagaaaactctttttcggtcttgcggtacgttatagtcagctgcatttagcatttgaaaagatagatcataaccagcaccggcattttttagtagctttttaataccatcaagtgcagtactgtgcttgccaataagcattccgcttacgttttctgctagaaagaacttgggctgttttgcttcaagtatcctaataaaatcatagaatagctgtcctcttttgtcctgaatacctcttgcggcaccagcggcactccaactttgacagggcggtccaccaatgatcccgtcgcaatctggcacttcatctgcaggtatgtccacaatacttcttttatcgaatgtagtatttggatgatttttctcataagtctcccaaatatccttatcatactcatttgcccaaatgacattgaagccagcttgttcaaaaccaaggtcaagtccgcctgctccggcaaaaaaggatactatattcattttttatgctattcttttatgttcgttttcttaaataagtcatcagaaacacatcatttgaaaacaaaaatacattttagaatttcaaattgcttttaattcaaacatctattttattcgataatcgagatttaaatgctccggtgcttgcgtttaaatagtaattatgttttcaaattaatactttgagggcttgccccaaagttagttaccgctatggtttcttttttacgtttaatgtctgctacattattttcaaatgcctttactgtatgctgatcttttatgaccaaatgcattcctacttcgcaatgtattccgttatagcttaaatggggcatgtttttgaatttaggaatggttacattgtccaaataaataaattgagtgggggtaaagttataggagcaatatataagtgtgtcgtctatgagtatgaattttgaatgaatgttctcattgacaaaatattcggtattttcggttttaataagctgactaaaaaattgttgaaagttgttggtgtttgcaggtcttctgaattttatctctttaaactttttttcatccttaaccagtggggcaaatgtctgtgataaacaagtgacctttattcctttgttcgccatagaaataacctcgcctaatatacctttacgtatttcgttcttattgataatggtatggtgttttgcgttaaattcataattaaatgctgccaaatgctgtgcacaaacaataattctttccttagctgtaagtataagtgctgataaggttttatctagaagatgggcagaattttcatagaacggagcagtaatacataccaaatttgaaaaattaaaatctattttctcgtatgtattacatgtggtatctaaagatgccctgtagtttttaatgtgaatagagttaccgatcaaattcttgtaaaatgcttttatgtgttcctcataatttggctcgtcttctacacagatcatagattcgttttttactaaatctcgtactgccaaatttgacgaactcattacggctatatagccacttttctttttaatgtatgcagatttaatatgtaaagaatagggtagagctcctcttgagaatttttttacgcgcgcacttctcacatacaaatgcggaaatatatataaattgatatttttgatcgatgttgatctatacatctcgccaaaaatatttctggccaaattatacttcgtaagacttttgctagatcttttgcccgttacaaggttttctataacttttggcttagaatggtcgtaaccttctagcggaatagttattacattcactacaataccacctgcagctacttcttttaagtagtcatgcaaatgttggttgttatacaaataccatgaaatgttgatttctttaatatcatttctttgctcttcaatagttgctataaatttttgtagtaacaaaggagatccaccttgctcataaaaaccgaagcgatctttataatggtcaggttcgtcaaaaaatgattgaaatggcatgtatgttttaactgattgttagaatgtaataatacggagttttgattacttcacactaatcaataccgcctcgcaactctgtaagtctgagttaagtataatattttcagatttctttccgtcagatatctctacagatacggtgttgggtggcgaatctcctaaattatgagcgtaaagaaataggtcattagactttttggggtccaacttaattttaaattcctttttcaaataggttaaatagtgttttttaactacttgtgcaccgttaaggtaaatggaaacgatatcaccatcttgcctgccgtggtcccatatttttacgatgatgttttcagagttgaattctagttctttggtgtatgaaatttttctgttattaaagctgtccctaaccttaggtttgcttttagttttggtgttaggcctgttgttggcttgggcaactacagtttgtttagggggtatttgctcttttgctttagatctggatctcttttttttcggggttaccgtatttgcatttgctaattgctgttttttccttctttcgtccgatgccgcatttgtaatggtgaaaaaaggggatacttttttggcaatgttgaatttatcatctgggaataactctatggccactacttgatatctattgccagatccaatgttttttgctagttcaattccgtcttcaaaaccgtcatttttaaaagagcctaattcttgcaccaccatttcatttcttacaagaaaaaaacggatagacttactggtgtcaatttttacggtattccatttcaaggctattctatctggaatattccagactgtttctttatttggcgaatttagatgtatagtagctatgtcttgtgcaaaactaaaagtagctaatagtaatagagcggtaatcaatataaagtgaatttgtcgcataggtaatgtcttattttaaaagatcatgttaaacgataatctgtctaagtcccttataatctacaagatatatgaagttgagcgaaaaacgatattattttaatataagtatcattggcttttggttcaatgaaatcaaattaatttcttatcaatagctgattttattggataattgagatgtacataccctgatgcttacgttaaaatttcaactatgttttcaattcaatgtcttgcggatttgctcttaggttatgtactatttgtaatgctatacttttgttttcatgttaaaaaacggaaaaaatccaaataactggaaatattccataatttagctgtcccgaatttttagagcgatagttatgagcaagaccatacttcatatagatttagatactttttacgtttctgtagaacggttgaataatcgcgaattgcagaataagcctttgttggtaggcggtacgggagaccggggagtagtagcggcatgcagttatgaaacccgtggttttggcgtacattctggtatgcctatgaaaatggcacgtgaactgtgccctgatgctgttgtaattcgtggtaatgccggtgattacagtaagcactcagacgtggtgacagaaattataaaagagtatgtgcctgtattcgaaaaatcgagcatagatgagttttatgcagaccttaccggtatggaccgtttttttggctgttaccaatatgcatcagaaatgcgaaagaagattattagagaaacgggactccccatttcttttggactgtcagccaataaagtggtttctaaagtagctacgaacgaggctaaaccaaacaatcaattaaagatagatgagggattggagaagccttttcttgcaccgttgtccattaaaaaaataccgatggtgggcgataaaacctatcagactttacgaaaccttggtttacggcaggtgcgtaccgtacaagaaatgcctatggaagtaatgcagcgtgtgttaggtgccaatggcggtgtaatatggaaaagggcaaatggtattgataatacgcccgtaattccgttttgcgagcgaaaatctatctctaccgaacgtacttttaataaagatactattgatgttaatagactaagaggcattctaattgccatgacagaaaatttagcctatcaattacgacgtggagataaactaacggcatgtatttcggtaaaaattagatattcggattttaacacgtattcaaagcaaatgcgaattccctataccagtgccgatcatattctaattcctaaaatactagacctgttcaagaatttatataaccgtaggttattggtgcggttaataggtattcggtttacgcatttggtatctggaaattatcaaatcaacctttttgatgataccgaggaaatactcagtctttacaatgcaatggataatataagaaaacgctacggagacaaaagtgtcttacgagcatcgggcatgggcgcaaaaacaataggaagaatgcataaccctttcaacggactgccgccagtggtgttggcgcatcggaaaatttaatccccctagcccccaaagggggaatgaaatgttggttacttcggctaagctcagtacaagtgttggttgatagtttttggaggttttgtccagtcgagtgcagttgagacctatttgtttgttgaggagagaaaagaagaagagcattgcgctgcacgccgagcgccacactcaaagcgcaaacacgagcaacgagcaacgaagaaccaacaacgaaaagcgtagcgtcaagcgttcagcgcaaagtgcaaaaaaaacgaacaacgaacaacgaatttgtacctaaactgccacacatactacagccttcgttacggcactttctcggagatcgagcttttgcaattggcaaaaaaacatggtattacgcaattggtattgacagatattaataacacctctgcttgtttaaactttgttcgtaaagcacctgagtttgatgtaagacctattttaggtatcgattttagaaacggagtagagccttgctttgtgggtgttgccaagaataatgaagggtttttagagctcaataatttcttatcacatcacattcatcacgacaagaaaattccagaaatagctccgcagtttaaagaggtgtttgttatttatccttttgagaaagtccttcagcatgaaaaaaaaacctttgcagaaaacgaatttattggagtttctgtaaatgagctaaaacggttgcgattctcaaaattattggagcaacgagataaaattgtattgctgcaacccgtaacgtttaggaacaagcgcgattttaatgcacatagattgttacgggctattgataacaacactttgctgagtatgttgccggttacggagcaggcacgggaagatgaacatatgtatgcgattcccaatctagcggcacatttttccgagcatagttttattctagaaaatacccaacggttaatggatagctgctctatttattttgatttttccgaggggcgaaaaacgcagaatctaagcaggtatctgggaagcaaagaagaagatgaggtttttttggagcagttgtgtcaagaaggattgccaaaacgatatccagaaataaaccaggcggtgttggatcgcttggagaaagagctctacctcattaaaaagatggattttgtctcttattttcttatcaattgggatattatctcttatgcccgaaaacaaaaattcttttatgtaggtcgtggtagcggtgccaatagtattgtggcatacttactttttattactgatgtggaccctatggagctcgacctttattttgaacgttttataaatctgtatcgtgtaaatccgcccgattttgatattgatttctcgcaccgagacaggccggtgatgacggagtatatttttaaccgctttgaaaatgttgcgctgttggggacttacgttacttttcaatctaggggcgttattcgggaattgggtaaggtatttgggctgccaaaagatgaaatagatgtgctgtgcaatggtaatgtagagaccagcaggttagatgcaatatctgcgttggttttgaagtacacgcaactgttacacggtatgcccaattacttgagtattcatgcaggcggaattctaatta

SEQ ID NO: 308 - DNA, 24215 bp, synthetic construct
  misc_feature 1..24215: note = Synthetic
  source 1..24215: mol_type = other DNA
ccgtggtataaaaagaccggaaaataccagactgaacaaaagcgacttcactatgcttctcgtgttcacgcacaaaaaagtcacccttattcaggtttcgggctttaaaaagcggaacaagctcagtaatttcttccgctgtaaaaatgccaaattgtttaaagaattccgttatcacaactattttgaatattctgttttaggataaagctttttaaaagcattgtataccgcctggtggattgctgtagaatgcagttcatccggaagataatcaaaacttacactaatatttttattcattttaagaatcttatacagtgattctgcctcagcatacatcttggtatcttcttccttattaggtgcgcctatatataccttaacaggctgttttaaatgtgttctcaataaaggctctgcctctttcagcagtttttcctcaccccaccacaaactcgggctgataataatatactgactgaacaattccggatttttcagcagaataccggttgccagaagacccgcaagtgattcaccaataatggttctgttaccggaagcattataatttttctcgatataaggctgcagttcatttttcaggaagttaatatacttatctgaacctccgtattgcgggaaactttcttttttaaagccctctttttcaataaagtcggtattggctactggaaatgtaaaatcgcgtctgcggttggtattttctattccgaccacaatagactgtggaaagcggttgatccatggttgattattgaagcggacaatgcctgtaatatgaacaaaatcctcttcaaaaccgccgtccggaatataaatgacagggtatttctcagctttcttcggatcgtaatcctccggaagataaatgttgatattccggttttccttcagaacatccgaatgaaaaacttcggttgttccgatgattaaaggtttacttgcctgagccgcaagaggagtccctgcaagagctaacatcagcaggaatagaattttatattttgtcatatcagttattaaacgcttcaatttaaaccggaaagctgtatcgctttatacaccgggaattgtcggactaagataacgattttacagggcttttgctacactttattttctgtttccctctggtaggtaatgacttcatttttctgcactatttttcgttcaaaatgagacgcattgaacttccattaagtttgaaattggaggtttgacgttgttggtgatgatcataaaaaagagaccgcatcagaagttatacgttttgccatccggaataagctcataacgagcttgtctaaattatcgaatggcttttgaaataaagtcttctggtaaggtctcttttattaaatatggtgtttaaaaatctacagtatcaggattaagacccgaaaaaccagcttctcccatttgggcaatacgctgcatatcttcatcggaaatatggaaatgatctgtatccagattagaactgatatttgcgggtgttaccgattttggaagcggtagtgtacccgtctgcaaacagaatttaatacacagctgtgcaacacttgcgttatagcggcctgcaatttctttcagaagctcattattcagtatttttccggaacctataggactccaggcttctaccagaatagcattatccttacagtaatctactacctcgctttgcaaatgtcccgggtggtactcaatttgattcaccatcggattaatcttagccgtttcttttaaagcctccagatggtgtatcagaaaattacataccccaattgccctgactcttccggaagtataaagatcttccattgcacgccatgtttcggcattcagtgttttccagttgtcgtactgtgctgcgttggcaggccagtgaatcaggtaaaggtcgataaaatctgtttgtaaacgttccagcgatttatcgaaggcagccatggtttcatgatagccgcggtcgctgttccatacttttgtcgtcaggaatatttcttcacgcgaaaccccgctcgccagaataccttcacctacacttttttcattttcatatattttagccgtgtctatatgtctgtaaccattttgcagcgcatataccactgcattttttgcttcggcaccttcaggaatctgccaggttccgaaaccaattttaggaatgctaacaccattactgagcataaaatcttccatgatcataatttaatttgtgatttgacttaattgtttttcaggtattcacgcaatacatactggagaataccctgatttttataatattcgatttcaatagctgaatccagtcttgcctttacattgaattttgtttcttttccggatggatgaaccgctttaacttccagaattttgtgcggtgtaagcccttcagccaatcctgatatatcataagtttccgtaccatccagccccagcgattccgcattagcgccatcggtaaataccagcggtgctacgcccatacccacaagattactccggtgtatgcgttcaaaactttccgcaattacagcgcgtactcccagcagaaaagttccttttgcagcccagtcacgggaagaaccggaaccatattcttttccggcaaggataatcagtggtgtatgatccttttcatacgccatagccgtatcaaagactgttttaacttcattggacgggaagtagcggctgtagcctccctccttatccgctattttatttttaatccgcacattggcaaaagttccgcgcatcatgacttcatggtttcctcttctggaaccataagaattgaaatcttctttatccacgttgttactttttaaataacttccggcagcggaatcttctttaaatgaaccggcaggggagatgtggtcagtggttacagaatctccgagataaagaagtacccgtgcatttttaatatctgttacagcatcaggctgcgcactaatctctttgaagaaaggcgcttcttttatataagtggaatgctggtcccattcgaaattctgatcgaggttcacctccagattttgccagtcggcagatccatcgaaaataacatcgtatacttcttcgaaatcaccctgtttaagacattcattaatagtactctgaatttcctcacgggaaggccagatgtctttcaggtataccggctgtccgttcggatcgtattctataggttcattcatcaggtcgatgtccacatgaccggcaagcgcataagcaacgacaagcataggcgacatcaggaaattcatttttacctgcgggtgaacccgtgcctcgaagttccggtttccggaaagtacagacgccacgacaagttcacctttatctactgccatggcaatagccggcggcaaaggacctgagtttccgatacaggaagtacagccgtaacctaccgtgtgaaagcgaagagcttcaaggtcggtactaagtccggaacgctccagatatttagtcaccacctttgaaccgggcgccagagaagtttttacccatggtttggttctcagtcccttttctattgcatttcttgcaagcaatccggcacctaccattacagcagggttcgaagtattggtacagctggtaatagccgcaatcacaatactgccgtcgctgaggataaattcagaattgttatgtttaattcttaccgtatgtaaagtatcctgaataacttcagaatgtgtatttccttcaatcggaactttaccaaaagtaaattctgttcccgaaccgccgtcagccagccatgcatattcagttcttttagataccggttcatattcacggtggtgctcatctttcaggatttcagaaaacttatggctgaggtcttttacgagaattttgtcctgtggacgtttaggaccggatacggtaggttccagtgtattaagatccagttctacaacagaggagtacaggatttcttcttttccggttctccacaacaggttttctttacaataatcttctacaattttaatctgctccggtgaacggttggtcgcatgcatatattccagcgtacggtcgtcaatggggaagtaggttaccgtacagccaaattcgggtgacatattggaaattgttgcacggtcggttactgtaagatgatccagaccctcaccgaagacttccataaattttccaacaacacctttatcccgcaatatccgggtaatagataataccatatcggtagctgtacattgtgccggaattttacccgtaagtttcagcccgatgacttcggggcatgtaaagaatataggctgtcccagcattgccgcttccgcttcaataccacctacaccccatgcaattacgccaattccattaaccataggggtatgcgagtcggtccctaccagtgtgtccggaaataaccatccgtccctgtcgataacacctttggccaggtattccagattaacctgatggcagatccccataccgggtggaacaacggtaaagttgctgagtcctttttgtgcccatttcagaagctcgtagcgttctttatttctgtcgaattctaaagttacatttttatcataggcatagtcggttccgaaataatcgacctgtacagagtggtcaattaccagatctaccggaatagcagggttgatcttctggccgtcttttccctgacgtacaaattctgcgcgtagtgaagccatatccaccacagcaggaacaccggtgaaatcttgcatcaggattctggcaggtttaaacggtatatctttgtctgccggcgcgggtgtccattgcagcagtgtatcaatgtgttcatctgtaatactgaaaccatcgtagttccttaatacattttctaaaagtatacgaatactgaaagggagatgaccgacacctttttctgaaagatttttcagggaactgtaatgataacttttaccattaaccgtaagctcctgtaccgattttgctttttgggtgttcataacgtatgattttatgtgaacatctaatataccgctaaaaacggagagataagttaatattatgatagattaacatgaacattaacattaaaactgactatttgtaaaggagaaggtttttgagaatttggagatttgaaaatgtaccaatgaggtaataagtaataagtaataagtaataagtaataagtaatcaattatcaattatcaattatcaattatcaattatcaatgattagtaataaccggtatgtttgtcatgctgcaagcatctcagccaatttgaaaatttgaaaatgtgccaatgagataataagtaattagcaataagtaatcaattatcaattatcaattatcaattatcaattatcaattatcaattatcaattatcaatgattagtaataaccggtatgtttgtcatgctgcaagcatctcaacagcaaaagcaacaaaagcttttaccattaagaacttaagaaaattaaggttaaaaggatttgcttaataaacttaataccttaatggttgaatatatttaactgcaaaagcaacaaaagcctttaaacacttaagttctacatgatctgcacatcagagtcactaaagtacacataagttagaaaatctaagattttctttatgttgccctgatgtataattgctttagtaatctatataatactttacaggtaaacagaccatgtctgtatgcagtttatttttaagtgttaactatctttaatatcgaagatctccgaactgattcgaataggtttcagattcactaatctgttatatcattaatgaagttttatcagaatatgaccactataagcgatcagggattaactgtaattcgtatattcagttttttcaaaagcttatggaacaaagttttacagaagttattcatctgatcagacaatcgcgtataagagctgttagggctgtgaatacggagctgattaatctttactggagtattggtgcttatattagtgaaaaggtagagcaggcggaatggggacagtcggtggtaaaagagctggcaggttatattcagcgtacagagcctgaaataaaggggttctccgataagaatatgtggcggatgaagcaattttatgaaacctataagggtattccaaaactctcggcactggcgagagaattaagctggacgaataatgtggtgattttcagccgggctaaaaccaccgaagaacaggagttttatctgaacctgagcattcgtgaaaaatacagctccagagaactggagcggcagatcagcagtgctgttttcgaacgtaccatgataggccacgcaaaactcccggcactgccgagagtttttgacaatgagcttggtgcttttaaagacagttatgtattcgactttctgaatcttccggaactgcatagtgaaagcgatttacaagcagccttaaccggacatatgaaaaactttattctggagcttggcaaagattttattttcattggtgaggagtataaactgcaggtgggaaacagtgatttctatgtggatcttttattttaccaccgcggattacaatgtttagtcgcttttgaactaaaagcagataagtttaaaccggaacatctgggacagctgagtttttatctggaggcattggaccgcgatgtgaaaaagcctaatgaaaacccgagtatcggtgttcttctatgcaaagacaaggatcatgaggttgtggaatatgccctgagccgaagcctttctccgacaatggttgccgaataccggactcagctgccggacaaagagctgcttcagcaaaaactccatgagttatccgatttaatatgatgaggagttgtcagttgctagtagttagtttacagtggttagtagttagtctttattagtgattagttcaaacatttcggtaattgccaattgcttatcattcatcattcatccccgatagctacacacttgtctatatccaaaatatttagtattttaagatactgaaaaaacactaacttgatgccccatactgaaaatacagaccataagggtgcctcaaatccgtcactggaatcgctattactcacgatgattacagccctgaagcgggaagataccagaaatgaaaaattttatgacagtgcagatctgaagcgcctgctgaatatcagcgataagactttataccgcatgcgggtaaataaaagtataccttgtgtccgttttggtaagaaatacttctatccaaaatcttattttaacaacaaagcctctgaataagggcttttttacgcctaaataggtgtaccatattcattaatctggtaatacaaggcaataggttgtgagtaatgagtaatcatcaattatcaattatcatttatcaatcatccgcaatagccagaatgcatgtcatgctgcaagtatctcagtcaatttgaaaatttgaaaatgtgccaatgaggtaataagtgatgagtagtgagtaatgagtaatcaatcatcaatcatcaatcatcaatcatcaatcatcaatcatcaatcatcaatcattagtaatagccactatgtttgtcatgctgcaagcatctcaaccgcaaaagaaacaaaagaagtttatagttgaatattgaagcgtacagaagtacataaaagttagcatatctcgtcactttgcagcgatgcggagggtatcgagaagttgtttaaacgcaaaagcgacaaaagcttttaaacactttagttttacatgatccctcattatcgtagtcactaaagtacacctgggttagaaaatccgagatttcctgtatgctagcctgatgtgtaattgtcttgcaaatcaaattgttattaattaccatcaatcatcatttatcaatcatcggtaataaccggtatgtttgtcatgctgcaagcatctaaaccgcaaaagtgacaaaagcttttaccattaagaacttaagaaaattaaggctaaaggagagcttaatcaactcaatactttatggttaataaaatcagtttaatattcaccacaaaagcaaaaaaacttcaaacactttagttttacatgatccctcattatcatagtcactaaagtacacctgggttagaaaatccgggatttcctttatgttagcctgatgtgtaattgtcttggaaatcaaattgttattaattaacatcaatcatcatttatcaatcatccgcaataaccggtatgtttgtcatgctgcaagcatctaaaccgcaaaagacacaaaagaagtttatagttgaatattgaagtgtacagaagtacataaaagttagcatatctcgtcactttgcagcgatgcggagggtatcgagaagttgtttaaactcaaaaaacacaaaagttttatcaacaccttagctttacatgatcctgcgttatcatagtcactaaagtacacctgagattaaaaatccaagattttttatggcaacctaatgtataatttccctggaaatcaatttgttattaattaacatcaatcatcatttatcaatcatcaatcatcaaccgacaaccgtaaactgtcaaccactgccttttctcccgataggcttcggtgtttgttcgggaaataccccgtttttgcatacttttcccgaagcttacccgaacaatacccgaaggaagttcctttttagtgtttttcgtcatttgtgtaaaggcttttatacaggtcgttaggtggtgttttaagtagcactggagtaccggtgtcttgcattgcatagtggacaaaaccggtcaaaaccggacaaaagcagtcaataccggtcatgaaattctgaaagtgatttttgagcggaatatgtctatatcttggcctcactaacctttaaaattgagcattatggcacgaattgaaaaaggaatcctcggcggattcaaaggaaaagttggcacggtagtcggtgtcacctggagaggaatggatattatccggagtgtaccccgggcatccagaaagaaacctacagaagatcaactcttacaacggtttaagtttaagcttgtcgtaggttttctgcagcccttaaaggagattcagagcctgtattttggggtcaatcagggcacacagtcacgcgtaaatattgcgacttcttacgtgctgagtgaggccgtagagatagtaaacgatattccggcgattgtatattcccgggtgatgattacgaaaggggatctggcgggttttcagagtctgaagatcacaccaaaagcagacgctaaactaagtctggaatgggagggtaacggtacccagtcgaatgcacaggatacagatatgataaacctgatctgttacaatgaaaagcaaagctcttttgcaatttttgaaggcctgacctcgcggaatataatgaaagctgaagcaatattgccggccgattataagggagttcatgtatgggcatacctgaacaatgagaaaaagacacaggccagtacaagtgtctatttcggaaagctcacatttccgtaaaaaacaaaaaccacctgaaagggtggttttttattggaaataaaaatgccccgaaaactattcaagatttgctagtgcttcttgtggtctgaaaaaatgtgtttatacattgtgattcttcttctttatttgatctaagtttcctcaactatttttttaattatttttaatagaataatatggagaagatattaaaagtgttcagatttagtgagtaattgaaaaataaaaacatgaaaaaatcccacggagtacgcaggattatagattttcttcggcttttaagccttattgtgaattgcttactacaaatatatagaattatttttcattcaaatacggaaatccgtaattttttaaattatattttagttaattttagaaattaatgctaataatctagaaataatcattctcaatatggaaaaaactttaggaattgatttaggtactaacagtattggttggaccattagaaatacagatttatccgataatcaaattgaagattgtggagttattacttttgaaaagggcgtggcttctgagaaaggcaatgagtttcccaaagttcagaaaagaactgaaagcagggggaaaaggaggaattatcaatctgaaaagtataggaagtttgcgctcttagactttttgattcaaaagaatatgtgtccattgacaatagaggaattcgattgttggaaaaattacagaaaaggaaataaaagagagtacccacagtctgaagaattcctgcaatggataaggtttgactttgatggggatggtttgccagactttcatctgtttggaaaagataaaaatgaaagctattatatcttcagagcttcggtagttgataataattacaaaagtgtttttgatactaatccacatattttaggacgtattttatatcaaatggtacagaggagaggcttcaagggaagagatgaggaagaagcgaaaacaatgctaactggaagtgagaagaatggaacgaaaggaagaaatgatattgctgaatatattgagaagtatataactgtaggagcggctctttatcattatcaaaaagattttggaggaaggataaggcaacgctataatctgcgtaaagattatgaacatgaattaaaagtaatctgtgatgtgcataatatttcccaggcagattacgaaaagctttggaaagcgattatctggcaaagacctcttagaactcaaaaaggcttgataggaaactgtatttatgagaaaaataagaaaagggtagctgtaagtcatcctttatacgaagaatacagaacctgggtttttatcaataatttaaatattttacctccacaaggagagtgtttacaagaatatcttttagataaaatttatccaatattctataaatccaagccagattttgaattgtcagatatagataagcaacttaaaaaagatggggcaaaaagaacttcaaggcacaatgaaaaaacaaaagtgctttctaataaattattgaaacagtttcaggatatcttcggagaagattggaaagaagaattacaatggaatatcacaggagacagaagcccacaacaaaataagagagaggaatcattatatacgtttgaggatatatggcatgtattaatgacttttgacggtcaggaaaatttgaaaaaatttgctgttgagaaactgaatttggatgaggagaaagcaacgaaattctcaaaaataaaattacagcaaggctttgccacactgagtctctccgcaatcaaaaagattttaccttatcttcagaaaggattcctatacaaccattccgtttatatggcgaacttgtataaaatgcttgatggtgccgcgatttccgagaccttaatcaatcatttctctgaagagattttgaaggttctaaagagtgattcattcaatagaaagaatgcggctattgtcaatagtctgatttccgagatgcttaatgatgacaacagatattatatttcagacaatagagatttggatagaagtgagtataaaacggttctaaaaaatattattgatacttatggtgtagaaaagtgggaaagctttaatgaacagcaaaaaacagagattactgattttgtttccggcaaatatttagaatttctgaagaaaacctattctgataaaaggaatcttttcgttcaaccggaaagaattcacgacaagatatttgcttttttacaaaatacttatcacgtatcagaagataagaaaaaatatctttggcatccttctgagcaggagaactacgcaaaggctgatgaatactccgaatattctgtcggaagtaagaaatactatgtaaaagctgagaatgtaaaccattttttacaaagaaatcctgatgcagaagcagaaggcaggcagatcaaactcttaggaaatccggaaccattgagtaaaggttttaaaaatccaatggctttgaagtctttgtataaattaaaaaacctggttaattacctcttgcaaacgggtaagattgatgaagaaacaagagtcgttgtagaaatagctagggaattgaatgataaaaataaaagaaaagcaattgagatttggcagaaagatagagaaaaggaaaatgaatcttacagaaaagaattacaaacatatcgagaacaatttccgcatattaatctgatagatgaaaatacgcttattcgcaagataagattgtggcacgaacagaataaaatttgcctttatacaggtaagccaattcctttttccgaattgattactggaaataaatatgatatagagcacacaattcctgcgagtatcagttttgataatgagttaaagaatctaacaatatccgattcagtatataaccgattgcataaagggaaaagatttcctactcaactatctaactatgactctgaacagattattaatggagaaacctgtaatgctatcattagaaatatagaattcatatttggtgaaagaacagtagaatacaaagaaataaaaggaaaaacagaaaagatagttaaatggaggaaaatagatgagcttgaaaaacagtttgatgaatggaaaaagaaagcgtcctatgcaagtacaaaagaaataaaagataattatattgtaaagtaccacgctttaaaaatggatttggattatctaaaagagaaattagctacttttaccattactgaatatacagcaggctggagaaataatcagatccgggatacacaaatcattacaaaatatgctttgccttattttaaaacattgtttaagaaagtatcggttgaaaaaggtagtgttactgatatttttaagaaggtttataaagtacaacttcgtaatgataaaaaaaacagaggtgttcacagccatcacgctcaggatgctgctatccttacgctgattccaacagctttccatagagaaagaatcatcaaagcttatcagaatgaaatagataacagaactggaaaaacttatcatgaattaccaatggattgggataacttttctgaaaagtatattttagatattaaaggcaatgtattaatcaataatctgacagataacagaaccattactcaaacctataaaacagttagaaaaagaggaaaagttgtttatgatacagataaagaaggaagttcacacaaacgcgtaagtaaaggcgatacaattagaggacagttacatggagaaactttttacggagcgattaaacaacctctccgagatgaagacaataaaattctatttgacgagaataagaagatgatcctcaaagatgaaatttatctggcagtaagaaagcctttggtttataaaaaagatgcaaattcgccaggatttaaaactttggaagaggttgaaaaagtgattgtagataaagctttgtttgaaatgataaaaaaacaagtcgaagcatctgattttaaaacggctctcactgatggtatttatatgttggatgaaaatggaaataaggtcaataagatcagaagaatcagatgttttgaaaccggattgaaatatacaactgctatcaaagttcatcaacatagttttgcttctggtaaagagtataaaaaatctacattggcaacaaatggtgaaaacacctattgtttattttataaaaatgatatgggtaaagcaatgagaattctttctattgttgatttggcagaacttaaacttaaaactattcaaagcttatataatgagcctgaatatggaaattttgaatcgggaaaaggaaaaaataaatatcaaatccctttatatactattttgaaaagtggagataaagttttattctacaaggaaaatatttacgaattaaaagatttagaacagaaagagttgtctgatagaatgtttaagatgtatcagttcgaaaaagatggaagaatcaaatttcgccatcatttagtagcaggaattgatactgaattaaagaaggataatcaggaatattcatcagttaattttgaggaaaagcaagtttttttaagattaagtcagggacaatggaattttgctattgagggtaaagattttgaaatggcatttgacggtaaaattaattggaaaatgtaactgatgatcacccgtagcatttacatcggcaatccggcatacctgaagcttaaggatgaacaaatgtatatcctggaaccggctacaaacgaactaaaagccaaagttccggtggaggatctggggttgctgatgctggatcattttcagatcacactttcccatcagctcattcagaaaatgatgggcaataatgtagtagtcattagctgcgatacacagcatttgccacatggcattatgctgcctttatacggacataccgaacattcggacagggtaaaggatcagctgaacgccagtgaacctttgaaaaaacaattgtggaaacaaactgtggagtttaaaattcagaaccagatccgggttttggaaaaatatagtgcatacgcagaacccatgtatgaatatcttgggaatgtaaaatcgggggatatgaccaatatggaaggaatcgcagcacagcattactggaaatatcttatcagccccgattttctaaggggtcgattcggtgatgtacccaatccgttttttaactttggatatactgtactccggagtattgttgccagagcaattgttgaaacaggtctgcttccggtgttaggaatctttcataaaaacaaatacaatccctattgtctggcggatgatcttatggaaccttaccgcccttatgtggatggactggtaatgagttatattaaaaataatcccgatgcagaagaattgacaaaagaagcgaaagcccatttgctgaaaattgctactcaggatgtaaaaatagacaagctaacccgccccttaatggttgcggttaagatgaccgtgatctctctgtataaatgttatacgggagaaaaacgtttgatttcttacccggagctggtatgaaagaggaccgttttaatgcataccggattatgtgggttttagtattatacgatttaccaaccgagaccaaagccaatatgcgggatgcatcgcagttcaggaaacgcttattggatgatggcttctctcttttccagttttctatgtatgtccgccattgccccagcagggaaaatgccgaagtccatattaaaagaacaaaagccatgctgccgaaggccgggaaagtagctattatgtgtattacggacaagcagtttggggatatagagatcttttttgccagaaacagagaagaacccccaccaaccttccagcaattggaattattctgattttttgaatcctaaattaatacaaaatccgctgaatatcagcggattaaattttgaggttgtgcagtatcacaaagatacagttaaatgtaagcaattcacaactgagcaaacaataattgaaatattcaaagagttgtgcagtatcacaaagatacagttaaatgtaagcaattcacaactattgtcagatgattggaagatattttggagttgtgcagtatcacaaagatacagttaaatgtaagcaattcacaaccgaagatattcaagcaaaagatgaagttttgttgtgcagtatcacaaagatacagttaaatgtaagcaattcacaactggatctaaagaatacataaaaaaaacagcgttgtgcagtatcacaaagatacagttaaatgtaagcaattcacaactggcaaagctaaacttgctgtaatgggtgagttgtgcagtatcacaaagatacagttaaatgtaagcaattcacaactaactctttaaaataaaactcatcactatggttgtgcagtatcacaaagatacagttaaatgtaagcaattcacaaccgaagatattcaagcaaaagatgaagttttgttgtgcagtatcacaaagatacagttaaatgtaagcaattcacaactggatctaaagaatacataaaaaaaacagcgttgtgcagtatcacaaagatacagttaaatgtaagcaattcacaactggcaaagctaaacttgctgtaatgggtgagttgtgcagtatcacaaagatacagttaaatgtaagcaattcacaactaactctttaaaataaaactcatcactatggttgtgcagtatcacaaagatacagttaaatgtaagcaattcacaaccgctcttgttaccttttccattttacgattgttgtgcagtatcacaaagatacagttaaatgtaagcaattcacaacgtacaaattgtttgtaccatgttttagaatgttgtgcagtatcacaaagatacagttaaatgtaagcaattcacaactaaatcctgtaatgttaattcagaatcagcgttgtgcagtatcacaaagatacagttaaatgtaagcaattcacaactaccgagcttccggaaatgcaggaggatatgttgtgcagtatcacaaagatacagttaaatgtaagcaattcacaactagtgggtgacagtatcatcatcaaaacattgttgtgcagtatcacaaagatacagttaaatgtaagcaattcacaactagaatgaaaagacctcgtaatacattaaagttgtgcagtatcacaaagatacagttaaatgtaagcaattcacaactatgtaatagacgatcctttggcctgtagtgttgtgcagtatcacaaagatacagttaaatgtaagcaattcacaactattcatacgctcataaactcgcaagacatgttgtgcagtatcacaaagatacagttaaatgtaagcaattcacaactgcgctgcagcacacggaaaagcccgtgcagttgtgcagtatcacaaagatacagttaaatgtaagcaattcacaacaaaaagtatgtcttgaagaaattaaaaaaggttgtgcagtatcacaaagatacagttaaatgtaagcaattcacaaccagccgtcggcatggccgcccaggcccagggttgtgcagtatcacaaagatacagttaaatgtaagcaattcacaactaatcttctagaatagtagttggagatttagttgtgcagtatcacaaagatacagttaaatgtaagcaattcacaacgaagacgaagagggcgcaaatttcgatccggttgtgcagtatcacaaagatacagttaaatgtaagcaattcacaaccaattaaagagagttaaaaaatcagaagctgttgtgcagtatcacaaatatactgtaaaatgaaagcagttcacaacattctgagggctactttgacgtgaccaaaagttgtgcagtatcacaaatatactgtaaaattgtgaggatagaatactaaggaaattttacaaatcatggattaaatgttatattgaggtcttcatagatatttagaaacctcctatatttgcaacaaacctttccatgcccttagaataccgaaaattaaaaccttatgaaagcagaatttacagagagattcgcttggagagtctgaagaaatttcctgaagcttttgaggcagattatcaggatgcgttgagaactgagaaacttcgattcgagattgatattgaaaatcaggaaaccgacagatttataattggtgcattttatgggaatgagcttatcggtatctgtggttttgtaaaagatgaaagtggcataggaaatgtatttcagatgtatgttaaagaagaatatcaggggagaaacattggtatggcgcttcttcgtacggttataaaggaagccgatacaaaagaaattatactggaagtaaagccagataacttaagtgcttttcatttgtatcagaaagtagggtttaaagaaattgaatgccatcccggaggtactgagattcggatgcagtataccaaataagccagatagaggtttggcatgacatggttacttttgtttcttttgcagtttagattcctacggaatgacatagtggttgtttataaaatgcattggtacatagtttttcacatgtaaagtatcacatcgattactaaagtaattatacatcaggctaacataaaggaaatctcggattttctaacttatgtgtactttagtggctacaataatgcaggatcatgtaaaactaaagtggttaaaggcttttgtatcttttgcggttaaatatattcaaccattaaggtattaagtttattaagcaaattctcttggccttaattttcttaagttcttaatggtaaaagcttttgcagttaataacttctcgatacacttcactgcgtttcgtactcgacgtgacgggatatactaacttttatgtacttctgtacgcttccaactataaacttcttttgtgtcttttgcggttgagatgcttgcagcatgacaggtgttctggctattaatgatgattgataattgatgaatgattattgattgctcattactcattacccattacttattataaaaacaggctcctttcatgatgaaaagaacctgccgttaaagtaaataatataatatatatttacaagtgtgttatttcttcttcatagccttcatcttcgatctggaaggtcgtatgactgattttgaaattgcgtgtcgcctgatcggtcaggattctgagcagctgattgtggggaatactctggtcggaaataatatgggcactcattgcattgactcctgaggtcagcgaccatacatgcaggtcgtgcagatctttaacacccggaatttgaacaagagactggcgcagttcctgaatgtccacatcctttggcgtaccttccagtaatacatgaatcgcttccataagcagccgtaaagtccttgggataatcagcagtcctatacctgcagagatgagcggatcggcataataccagcctgttgtaagcataataacaccggcaatcatgacccctacagaagtcagcatatccgataatacttcaaaataggcgcctttcatattcaggcttgctccggagtcttttctcagaatcagcattccggcaatattcaccagtaggccaattcctgcaacaatcagcatcgatttactctgcacttcgggtggattctgaaagcgttggtaggcctcatagagaacatatacagaaatgccgagtaatactactgcattgataacagcagcaagaatttcggtacggtaatagccaaaggttttatcggcattggcttttcgttcacctattttaatcgctatgaaagccagtaaaagtcctacgacatcggtaagcatatgggccgcatctgctaatagtgcaaggctgttggtaagaataccgccgacaacttccgcaataagataggttgcactgaaagataatacaatcagcagattctttttatgcttgctggatgccgatactgtttgtgtgggtgttgtactcatgatttccgggaattacatttcgtagtataaaggatttctttttttctggggtacctgctgtgcaccaatcatttgcagaatattaatctctatggtttgtgcaagtgaggtcataggtgtatctacaggtgagttttcaaacggatcctgcataacaattgctgttttttcaatagcaataaacagggtaggtaccagaatggtgatcagtatttcaataaatacctgcgggaattgcgcatcgtccagaccgaaaggcagtataactgcaaaaacatagataagaacatgtacgagaatactgtatgaacgcggaaatactgtgtttttcagtctttcacatttacccatatggtcgcataagcgggctatggtttcattgatttgtatcagtctgaattctgtaatcagtccctgatccgccagttcttttgcctgtaaagaatgtgcatccagcaaagcattaggaatattaaccgcatcgatatggtgctgattaaggtaagtctgtaccttatcggaaaagtttagttttctcagtgactcgcccaatgcatagttccagataatctgccgcttagcaaattgctttacagcagcttcctgatgttgggggagtgcctgaatgatttgtcttacaagtgtgcgggaatcgttgacaatagcgccccataccatacgggcttcccaccatctttcataagactgggaagttcggaaggccagaaggagcgaaacggctgtacccactaatgccgggatgcttaaaggcagtgagatcttctgaaatgcaggcagcatatcgagaataccgataagtaccgcaaacatggagatcagtaaaagctgggatttaatcaggctgatgaaataccagatggatatttttttgttaagtagcataatgttgtttgttatggtgtgcagtaagtgattctgagtttaagcgatactttgcctgccagtgatctgactatttagccatagcgcctggcaggctgagtaaagctttaggtattcaggacctgttgttttctaatgtgttgtgtatctttaatattttaatgtccgtggtctccggcattggaaagtttggcattgacaaagaacgctccttttaccacgatgcgggcattcgggtcaatacttccaacaggtgtaatggcggtgtagcccatatcagatgcacctttcacaatttctactttctcgaagttcattgttttagcgtgttcttttggtactttttcccctttggtatcttcggctttttcttcctcttcatgctcttcatgttcttccggttttttatccgtctgtacaaaaacatagaactttccatcggcttctacaatggcttcatttggaatagccggtgtggtggaatgatcgagacttaccactcctgtgatgttcatgccgtcaatcaatccggttttattaccaatcactgtggcatgtacagaaacggttttgctgtcattttcgaatgaagatccaatgctgtatactttagcatcatattcggtatccggattattggtaagcttaaaatgaacaatttgtcctacgcgcattctgggaagatccttttcaaatatctgaagatcgaggtgaattgagctgttgtctataatttcggcaacgggagcagatacatctacatagctgccgatctgggctctgatattactgatggtaccgctgataggtgctgtaatagccagtccggttctcaggctggaattggttacagccgtcgggttaatacccatcattttcagacggcttgcaagagacgctttttgcgtgtatagtgttttcagatcggaagaagagctctgcaggtttttcttggtacccgcatcattatcaaaaagttctttttgtcttctgaattcctgttctgcaaaagctattctgctgcttgctgtaaggtactgctcctgtacttgtatgtattccggattgacaaccgtggcaatgacctgacctttgcgtacatagtcgccttcctgaataccaagagttttgacaacaccgctgaataaagcggctactgtggctttattgctgttgggtacgcgtaaaagaccgttagccttcaccgtagctgtcagttctttcatttcaatattcccgagtgtaacgcccaccgctttcatctgctcttctgttaaagcagcaatggtaggtgcctcttctttatgttctttatttttttcagtggtttcggtcttcttctcaggagcggcttcttttttaccgcagctgatgatgaataaggatatgctcagataaatgatgatgtgtttcagtttcattttattgattaattatagaattaataatcacgacagattggttcacttgctgaatagattccagatatttcagctgaatattggtggcagtctgcaaggcaaacaaatattctacataagaaatatcaccggtacggtaacccagctgtgcggcttttgtaattttttccgcgttcgggatcgcctgctccgtgtaatatttatactgctctttatcctgctggtattggcgtatggcattttccagctgtgctgtcagctgctgctgttgaagctttgcattgacttctgcggcctgccgctggtattcaagagactgaatccgggcttttgtagcaccgaaggtcagcggaatactaatgcctacattaaaggaattgaaacggttggaactgccatagtacttttctacaccgtttttggtatgcataccaatcaatgactgggtggtgacacctaatgaaaattccggaagtccttgtgacttctctacctttttatttttttcggctatttccatttcctgataaaaggcttttactgaaggattattggcaattacagtactgtccagtacaaggtctatttttaaaggctgataaccagcagaaacaggaacttcaatttcttcttttgtattcagaagggttttcaggtttttataggcgttatccagatatacctgattttgtttcagcaggaggttaatttctcccttctgggtttcggccgtactgatttctacttttttaatgtcacctgcattgtatcttacggtagcaatacgaatgaaatcctggtacagattatccaggtctgtgagcttggatttgttgaactgtaggtattcaatctgatagtaataacttctgacttgcttcagtagttcatttacagagatttctttttcaatttccctgctttttatggtagaggcaatcagttctcttctcgccttaaatatagtaggaaagggaatactctgggaaatggcaaacgagttgtcgaatgtagggctgttgtactgtccgagctgggcagatacgctcagctgtggtaattcgccggctgtaggtttcagcgctttggaaaccattacattcaggtctttggatttcatgagcaggttattctgcaaagccatatctgttgcctgctgaacacttatacttctggtttgtgcaccaagtccctgtcctaaaaataacaggaagaatacgataacaggagctatgggcttcattttaagcatacgtccacgtacttttttactgaaaataatatagagcatcggtaaaacaaataaggttaagaaggttgcggttaccagtccgccgattactacggttgccaatggtttctgaacttcggcaccggcacctgtggagatggccataggcaggaatcctaatgaagccacggtagctgtcatcaatacagggcgtagtctggttttggttccttccagaactcttttaataacatcggtttcgccttctttttccagttggttaaaggttccgatgagtacaatcccgttgagtacggccacaccaaacaaggcgataaatccgataccggcactgatactaaacggcatatcccgcaggagcaaggcgaatacacctccgatagcactcatgggtatggcagtgaaaataagggctgcctgtttgaaggagtggaaggtaaaatacaagagcataaaaattaaaaacaaggaaaccggtacagcaatcatcagacgcttgctggctgcctgtaagttttcaaactgaccaccgtaggtaaagtaataaccggatggtaatttgatttctttatccagtttctgctgaatgtcttttaccacactttccacatcgcgtccgctgacattgaagccaattacaatacggcgtttaccctgctcacggctgatttgcgcggcgcccagtttgtaactgatattggctacctgtgacaacggaatctgctgtccggatttaatggaaatcatcagattattaacatcatcgatattggtgcggtgcaggctgtccagacgcacgacaagatcgaatcttctttcgttttcaaagacctgtccggctgcttttccggcaaatgctgtgctgaggacatcattaacatcctgaatgctgagcccgtagttggcgaggcgggtacggtcgtattgtacattgatttgtggtaatccgcttacccgttcaatttgtggtgctgtagctccgggaacggtttgaataacttttcctactttatcggcatacaccgctaaagagtcgagattttctccgaagatttttacagcaacgtcctgacggatac

SEQ ID NO: 309 - DNA, 24203 bp, synthetic construct
  misc_feature 1..24203: note = Synthetic
  variation 21409: note = n is a, c, g, or t
  variation 21406: note = n is a, c, g, or t
  source 1..24203: mol_type = other DNA
  variation 21394: note = n is a, c, g, or t
  variation 21352: note = n is a, c, g, or t
  variation 21403: note = n is a, c, g, or t
  variation 21418: note = n is a, c, g, or t
  variation 21364: note = n is a, c, g, or t
atttaggaaaacgtaagactgaagtattgtcaactatgcttagaaagcaaaatcctgatataaaggtttactgtcatgaggttgccctgagatctgaaaatgctgcagacattttaagtaaatatgacttgatttgtgattgtactgataatgtcaatacacggatattactggacaaaacatgcaatgttttaaataaaaaattgctctacggtgcagtaagaggttgggaaggttatgtaacagtattgcatggtaaagccctgataggtttaaacgatattttcagtgagtccgacttgcttttcgaatcacagaataattgtagtgtttctggagtaatcagcacagtatgtgggataattggttgccatcaggccaatgaagctgttaagataatcttgggagtagaatctaatttagacggggcaattttttgctacgatggtcttagtaatacctcacgtatttttcgtttgaaaaagtagaatatttgcaataacaaaaattaagagctacaaattatgtcatcactgatgacacagttatttaacccaaaatctctacctaaagttcatcttgctgccctttcctcggaacttgggggtgggggacactgctatgttttacatatatataaactttttaagtaatgttgggagtaaatcagaaatcatcaagtcaatctattactttcgcataaaattaaactctggatctaataaaaagagcaattattttagacaggaaattaaaagagaaataatcaacttagtttgtagcgatagtattttttatagtttcaaaataaaacctacttttaaagtcttaattttttatatataaaatttagtaaacaactatcctttagaaatttagaatgacaaccaaacttacagtttcacaacttgaacagtatttatctagagcagcatggattttaaaaggacctgttgacgcgtcggattataaaatctatatttttcctttgttatttttcaagcgaatttctgatgtctttgacgaagaatatgaaattgccttggcagaatctaatggagacgctgagtatgcttcacttccggaatttcatagatttatcattccggatggatgccattggcgcgaagtacgtgaaaaaacggcaaatgttggctctgctatagaagaagctttgcgaggaattgaacaggcaaatcaagaatatctttatgggatatttggtgacgctcaatggagtaataaaagtaaattacccgatagactacttacggatctaatcgaacatttctcacaatataccctttcaaactcattagtagatgccgatattctaggtcaggcttatgagtacttgattaagcattttgctgacctaacaaataaaaaagcaggagagttttacaccccaagatcagtcgttcatttattggggcttatcttagatcctaaagaaggtgaaacgatttatgatcctgcttgtggtacgggcggtatgttactggagtgtgttgaccatttgaaggagaacaatgatgattatcgcacactaaaaatatatggacaggaaaaaaacctaacctcggcatccattgcaagaatgaatatgttcctgcatggtattgaagacttttcaattgtgcgaggagacactttaagacatccggcattctttgaagctgacggtttaaaaacatttgactgtgttatagcaaatcctccgttttctttaaaagattggggagctgaaaattgggctaccgacccgtacggacgtaatattgccggagtgccaccgaaaggcaatggcgatatggcatgggtacaacacatgattaagtcaatgaatgctaccgggcgtatgactgttgtactaccgcatggtgctttgtttagaaaaggcgctgaaggcaaaatcaggcaaacacttattgaaaatgatttactggaagctgttataggtcttggatcaaatattttttatggaacgcagttagctgcctgtgttttggtattccgatcgcagaaagaaaaagcaaaacaaaataaagtattgtttgtagatgcctctgcacaaattagggtagggcgggcacaaaactttttagagccggagcacgtaaaacaaatttatgaatggtacaccaattataatgatgtgcctgattatgtaaaaattgccactctaaaagatattaaagacaatgactttaacttgaatataccgctttatatagaaaagactattgttgatgatttaccaagtgttgaagaagcattgaccgacctgaaaatagcgtggcaagccagccgagaggccgaagaaaaatttaaaacaatccttaaacaatttttatagccacaaaactttgcaacaattaacatgacccaacaacaacttgaaaaatatctctggggagctgctaccgctttgcggggtactatagatgccggagattataaacaatatattttcccgctgttatttttcaagcgcatatgtgatgtatatgacgaggaatttaacaatgcaatgcaattaagtgatggcgacctggaatatgcggcttttgaagaaaatcaccgttttcagataccgaaaggagcgcattggaatgatgttcgcgaaactacggtaaacataggattagtccttcaggaagctatgagggctatagaaaaggcaaacccggaaacattgtttggcatttttggcgatgcaagctggacaaacaaagaccgtcttagcgatgccacacttacaaacctgatagagcacttttctcagcataaacttaccttggctaatgtgcccgatgatcagttggggaatgcttacgaatacctgattaaggagtttgccgatgatagcggccatacagcagcagagttttatactaaccgcacagtggttaagctaatgactatgatagctaatccgcagccgggagaaagtgtttacgacccaacgtgcggctccggtggtttactgttaaattgtgcgctacatcttaaggaggaacgtaaagaatatcgtacgctaaagctatacgggcaggaaataaacctgattacatcggctattgcacgaatgaatatgtttatgcacggtatagaagaatttagcatagtgcgcggcgatacactggcggagccagcttttatagaaaatgacgaacttaaaaagtttaatgttatactggctaacccgccatactctataaaagcatgggacagaaacagttttgcagctgacccttacggacgtaacctatggggaacaccgccgcagggctgtgccgattatgcttttcagcagcacatacaaaagagcctgaatgaagataacggaaggtcgatatcgttatggccacacggcattttgtttagggatgccgaagctgccatgcgaaccaaaatgatagagcaggacgtggtagaatgtgttattggtcttgggcctaacctgttttacaactcgcctatggaggcctgcttactaattacaaacaataacaaaccggagcacaaacgcggtaaaatactttttattaatgcagttaaagaggttagacaggaaaaaaccatgtctttccttaacaagaaacatatagaaaagatatttaatgcatatactgcttttggtaatcaggataattttgccgcactggtacagcagaaagaagttttagatagaaaaggtaatatggctataagtttgtatgtccgtcctcaggatacaaacaaacctgctgaggaaagttttgatgctgtttatgatgattggcaaagcaaaaccatagaattgagaaaaagtatggatgaactttttgtaatgcttggaaagtaatgactaaattaaaaatagataaaacgaactggaaactaacaaaatttggtgatgttgtatatgaaccaaaagaaactgtaaaagatgtagttacagaaaatatacagcacgttgtaggtttagagcatattgatacagatgatattcatcttagaagatcagcatctatacaagaaagtaccacttttacaaaaaagtttgcaaaaggcgatgtgttgtttgggcgaaggagagcatatctgcgcaaagcggctcaagctgaatttgaagggatttgttcaggagatataactgtgtttagggcaaagccagcgctgtcggttaggttactgccatttgtagtaaataacgatgcgttttttgattatgccattacacactctgccggcgggctgtcgccacgtgttagatttcgtgaccttgccaattacgaattcctactacctccgcccgaagagcaggaaaaattagtcgaactgctttgggcaatggatgaagtgattgagtcacaagaattaacgctagaaaaactaaatagttattatgcgagtttagtagatgacttatttacatctgagaataaatcatggcaatataaaactttaagtcaggttgcaaatattaatgtaaaagcattaaaggctaatactaatgataattacgagtttcaatatttagatatagctagtattattgagccaaaagttataggtaaacttacaagttatatgttttctgaagctccaagcagagctagacgtgtagtttctaataattctattgttttatcccttgtgagaccatacttaaaagcatttgtatatgtaacgaatgctgaaaatttaattgcctcaactggaacagctgtagttgatgtaaagaacggatataatacaagatttatatttcatcaattcttctcaaagagatttagtactttttgtgaaaatttgatgacaggaacaaattatcctgctatcacagcaaatgatcttaagatgtttaaaatttgtattccacacaaaattgatactcaaaataaatatgcagataaattagactctattgaaaattctatttttttgtgcaaagaaagtattataacctctaaagctctccaaaaaagcctaatcaaccaaatattttaatggagtttacaggcccatactgttataccctgcaactaaccggtgataaagaaagcaggattattgccggcacgttttgcaatggtattgaggcgaaatatagcgggccgatagtcaaaacccgggtgcctaaaatttatatcctgaaacaaggtaataaacttgtatatgtgggttataccagccagtctattaccaataggttcaggcagggtattaaagcttcgggtactaagggatatcatggctataaatggaaacaggctcatgaactgcaattactggtttttgtttttgaccagaagttagtaggtaataaacacgatgatgacataccttttatagcactcgccgaggctgtagaagcagaactggtgtatatagtgcgcaatacaactggtaaatggcctgcgtaccaaaatgaaattcattttaataaccagcagtcagaattagccaaagccatagccgatgatatttatcaaaaaataatcaatacataagaaaaataatataatttagctgtaaaccaatattaatttactaaaacacaaaatataatggggtttaacgagctaaacagtgttgaacattatattatacataaactatgtggtgtaaaccttaataacggcacttttgcagagcctgcaagcggatatggtgcccagtggatatacaaacccgcaaatacacttagcagaaccgttaatgaggtgttgcttgaagatgagcttacagcggctttaatacggctgaatcctgaaattaactcgaagcctgaacttgccgatgaggtaatttacaagatacgggctgtgctgctttcggttagccaaacaggattggttaaagcaaacgaagagttttacaagtggatgcagggcgaaaaaacgctgccctttggcgaaaacaacaggcacaccacggtaagacttatcgattttgaaaaccttacaaacaatacatatattgccacaaaccagctaagagtacaccaccgggagactaaaatacccgatattgttctctttataaacggattgcctgtagtggttggcgaggctaaaacacctattcgtccctctgtaagctggctggacggtgcccatgaaattcatgacgtttacgagaacgccataccacaactgtttgtgtcaaatatcttatcatttgctactgagggcaaaaatttaaactatgcctctgtgcgctgtccattagaattttggtcgccctggcgattggaaaacgaggatgacactttagctaaacgcttgggattatctgaaataggtaaagaattatcagatttattgaatccgtcaagactgctggatatactgcgtaatttttcgcttttttctaccaataagaaaaagcagcgcatgaaaactatttgccgttttcagcaatatgagggtgccaataaaattgtagaaagggtaattgacggtaaaattaaaaagggcctgatatggcatttccaaggatcggggaaatcattgttgatggtttttgctgcgcaaaagttacgccgttcatcacaattaaaaagtcccaccgtaatagtgttggtagacagaaccgatttagacactcaaatagcagggacgtttaatgctgccgatgtacccaatgttgtttctaccgaaagtatatcagaattgcagactttgctggaacgcgatacaagaaaaattataatctcgatgatccataaattcagggatgcaaagcctaacatgaacagtcgggaaaacattatagtattagttgacgaagcacacaggacacaggagggtgatttaggaagacaaatgcgtgcagcgttgccaaatgcctttctttttggccttaccggaacacctgtaaataaagcagataaaaatacattttgggcatttggagcgcaggaagacgagggaggatatttgtcaagatatacctttcaggactcacttcgtgacgaggcaaccctgccattacattttgagccacgtttactggacgtgcatgttgataaagaaacgatagatatagcctttcagaactttaaagatgaagcggccttaactgatgaagaagccgatgagctgaacaaaaaatcggctaaaatggctgcttttttgaagtcgccggaacgggtagctaaaattgtaaatgatattgcacttcattttacaactaaagttgcaccgcagggttataaagcaatgattgttacacctgatagatatgcttgcgtacaatacaaacaagagctagataaatattttcctgagcaggcaagtaaagttgtaatttctacgtctgcaaatgatgattttgactttaagcaaaattgggctattgataaaagtcagcaggaaaaaatagtagaagaatttaataaggccgactcagaattaaaattcttaattgtcactgcgaaacttttaaccggatttgatgcgccaatattgcaaacaatgtatcttgacaagtccttgaaaggatcatacgctcctgcaagctatatgccgcactaatcgactataccctggtaagaagttcggacgtattgttgattattttggcgtatttgatgatgccgctaaagctcttgaatttgatgaagaaagtgtaaaaacgattatttctaatctatcggagcttcgggaaaaacttccgcaggcaatggaagaaactctggcacatttcagcggagtaaatcgtagactagagggatttgaaggacttgaaacggcgcagaatgctataagtactgatgagaaaaaagatgcatttgcaaaagattataaatttctttccacactttgggaatcactttccccggataggatactggatgaatatcaggaagattataaatggttatcacaagtgtttgaatctgtaaaaccagcctcaagtcatattggtaaacttttatggttttcccttggtgcccagacaactaagttgattcatgagaatattcatgttggtgaaattcatgcactagacgaattcattttagacgcagatgtagtcgagaacatttttaataatcccgatccgaaaaatgctaaagaacttgaaaaaatattagtcaagaggtttaagaaaaacgctggtaaccccaaattcaaaaagctaagtgagcgacttgaagaattaagaaataaagccgaacagggtttaataacctcgatagaatttattaaagagctatgtaaaattgccaaagaaactttgcaagcagaaaaggagataaatcaactcattgctgaaaaaacgccacaagctgccttaacagaattgtttttagaactaaaaacggaccagacaccagctgtggttgaacggattgtaaatgatattgatgctattgtaaggcgcgtccgttatccaggctggcaaacgacggcttcgggagaaagagaagttcaaaaatctttacggcaatcgcttttgaaatatcagttacacaaggagcaggttttattcgatagggcctatgaatatataaaagagtattattagttaaaaaggatgaaataagtaacatatttcaccttactttgatttgcctcgactcgacttaaaaaaatctttaatataaatgtgaatcaaaccaaaagatgtcaacatttagctatgccgaagttaaatttatttaagtttaacctagagtggttcgaaaattgtcccgtaaggaccaccacaaaggacaaagaagttttttactcactgtccttttttatgtttgtttaaaaccaaatcataattttttgaatcaatgctaataagcgtacaaagtaatactcattcaattacatttattgatgccgaaattgagccaagcaaaagtaaaatatttgatattggcgcaattaagagtgatggcaatcattttcataaaccatcactaccggactttacccggttcctgagtggaagcgaaaatgtatgcggacgctatattttaaatcatgatattaagtatgttggaaagcacttaatgatgctggcattaatccttcaaaacgttatcgatactttatacctgtctccgctattattctcaataaagccgtatcatgcacttaaagatgtatggttagactatttttacaataaaaaggatttgatttcacagctggtaagtggtgatacattacggattaatgcagataagtgcatgaatacaaatgggcagtccgttttgaaattctcaacgaaatttaaagagaaaattgacgagatgaagtcaagacattatgaattaaaaagtgcaaaggtaaattttatattgtattggcttaaagagggggcatcccaggaaattaaaataattctgccggagcaatattttgaaaaggtaataaactaaactgtttctctcaaaattagtgtttataggctacaagattaaatggaagagaaatagaaactacgaattttctaatcgagtaggggtagggtaatgatcgcattttgtctttatggtcattaattttaagaaagtttactaattccagaaatataatacaaccactaattttatttataaaatcagtagcagtaaaacaatatctgtaaatagcagactacataaatacccattattgggtatgtttatgcaacaatttttcaatattttggcaataaaaaaagtcccacgagacgcaggactaaagattttcttcggcttatagccttattgtgaattgctttcaatattacaaatatataaaaaatcaattcacaacatatgcactactctaattttttagagaaataaatataaaaagctaagctgttagccagaggtggttttggaagccagtctcaacactttgtcgacaaagtacttttgctttctaaaacaaaaataaaaagtaaaatgtacgtagtgcatataagaccttgttttttataaatttgtaaataaaaatttttttaccttgtaagaagtttattttaactgaaaaaataaccttaaccaaccaataaaatgactaaaatactaggactggacctgggtacaaatagtatcggctgggccataagagacacatcagcagtagacaaccagattatacatagcggcgtacttacttttgagaaaggcgtagcttccgaaaaagggattgaattcccccgggtacaaaaacgtaccgaaagccgtggcaaacgccgcaattatcaatctgaaaagtacaggaaatatgccctgttgcaatttctcatagaaaacaatatgtgtccgctaaccatagaagaactcgatgaatggcgaaaatataccaagccctatgggcgtcgttacccacagtccgaagcattcattaactggctgcgttttgattttgatggcgacggtaagcctgatttcaacctgcttggcaaagataaagatgagagttattatgcgttccgtgcctttgctaccaatgaacactaccgtaaagtgttccgggataacccgcaggtactgggcagggtgttttatcagctggtacaacgccgtggctttaaaggtcgtgacgatgaagaggctaaaaccatgcttacaggcagtaaagacggtgctgttaatggcagggatgacattgcggcttatattgaagactatggtacactgggcgcagcgctgtatcagtatcaaagggcacgtggcggccgcgtaaggcagcgctacaacttacgcaaggattatgaaaacgaactgaaagaaatatgccgcgtacaggatataagtgataatgattaccaaaaactatggaaggctattatatggcagcgcccgctgcgtacccaaaaaggccttataggcaattgtatttatgagccgggtaaaaagcgcgcccccataagccatccgctgtatgaagaataccgcacctggatttttatcaataacctgaatatagtgccgccggcaggcattgccaaagccgattacctgaaagacaaaatttacccgctgttctataaagcatctgatgattttgatttcaaatcaatcttaacccagttaaggaaagatggagcagaaactacagcccggtttaaggaaaatactaaagtggtttcggccaggctgctcaggttttttaatgatgttttaggcgaggattggaaagaaaggtatggatgggacaacatacacaatcgtgaggtaaatcagcaaaagaaaacgggtaccggctatacctttgaagatgtatggcacgttcttaacacgtttgacgaccacgaaagccttaaagattttgcccttaataagctcggcctgaccgaagaaaaggcagataaatttgccggaaaaaggctaaagcagggttatgctactttaagcctttcggcaataaaaaaaatactgccctacctgcaaaggggttacatttacagccaggcagtatatatggcaaacctttacaaagtgttaggttcagaccgtattactgatggtcttattgagcacttttctgaagatataggaaaaatacttgaagccaataaagacctgaaacagataaatgcggttgtaaacagcctgatagccgacgaactggccgcaggccgttattctattgaagatggaaggtctttggatgctgatgagcaggcccgtgtgtataaaaaaactatagaaacatttacaaacacagcttgggagaaacttaccgaagaaaagaaagaaagttttatagctgagatttcagataaattcaggtcatttttaatgacatcggtacggtcaaagagcagtgcttttgcagaacaaccgcgcctgcacgaccaggtttttgattattttaagcaggcttatggcattcctgacgagaggaagaaattcctatggcatccgtcagaacaggaaaactatgtagcagcccaagaatatgaacactttaccctgaagggaaaagatgtatatgtaccggttaaaaagcgggaggcttttatacgcaaacaccctgatgctgagtctgaaggacgcagcttagaacttttggggagtcccgaacctgtaagcaaagggcttaaaaaccccatggcgctaaaaaccatgcataagctaaagcaacttattaaccatctgcttaaaaccgataaaatagcgaaggatacacgcatagttgtagaaatagcccgtgagcttaatgatgccaatacgcgcgaagccattaaaaaatggaacaacgaacgcgagcgggaaaaccaaaaataccgtgaaaccataaaggagattaatgcagaatgcaacaccaattttgatgaatataacccaaatctgatacgtaaaatccggctttgggaagagcagggcaggatgtgtttatataccggtaaacttattggtggcagcgaggtgcttaaagggcatttgtttgatatagagcacaccataccggccagcattagttttgacaatgaactaaaaaatcttacccttactgatacacattacaacaggcatgtaaagggcaaaatgtttccgtcgcaattacccaattatgagcatgatgtaaaaattgacggtaaaacctatccggcaattataacttctatggagcgccttttcgggaaaaggtcgttaaaaacggtaacaagaaggggaaaagaagaaatcaaagaaagttggaaaaaaattgaagaccttgagaaactatatgacgattggcgaaacagggcaaaatttgcttctacaaaagaaataaaagacaattgcatacagcgtaagcacatggctaaaatggacttggattactggagggcgaagctaaaaacctttacccttacagaatataatcctgcatggaaaaacagccagctgcgcgatacccagataattaccaagtacacactgccttaccttaaaacagtgtttaataaagtggcggtagaaaaaggtgaggttgtgaacaagtttaaagaaatttatgaagtaaaacctcaatttgaaaaaaaggaccgcaaaaaacacagccaccatgctatagatgcagctatactgacgctgattcctccgttttatgaccgggataagattttgcagaagtataatgagcagaaagacagggataacacttcttgctatcatgaaaagccaaaggattgggataacttttcagcgggaaaaatactgggaatagagcatgaaatactgattaacaatattgctgaaaataaaactactttaccaacttataagaaggttaggaagcgtggcaaaattgtcaaaaataataatggtacaatcagaatagccaaaggcgataccatacgcgggcaactgcacgacgaaacgctttatggagctattaagcagccggtaagagatgatgacggcaagatttcttttgatgataatggcaagatgatactgcatgacaaaacttttgtagtggtgcggaagccgctgctgtataaaaaagaccccaattcaccggggtttaagtcgcttgaggagattgaaaaggtaattgtagacaaagacctgtacaggatgataaaacggcaggtagatgcttcagattttaaaacggctttaactgaaggtgtttatatgcttggtaagaatggtgagcgggttaataaaataagaaggatacgctgttttgaaagccttaactatgacaatgctgtaaaagttcatacccacagctttatctctaaaaaagaacacaaacgtaaaacacttgctataaacggggaaaacgcattgtgtttgttttataaaagcactgacgggaaaagtaaatcaataagcatccaaagtattggtaaagtaggcgaatctaaaattaaggatgatagctattatttttacgagccctttttcaaccagatagaaatgggcaaagggaaaaatgcttttactgttccgctgcatgctgtactgaggtcaggacaaaaggttatgttctttacggatttcccggaagagcttactgaacttacaaaagctgagctttctgcgcgtatgtataaaatgtatcaattcgaagcagacggcagaattaaatttaagcatcatcttgcctcggggatagacactgaacttaaaaaggacaataaagagttttcatattatgatgcgaaagaaaagcaaatgtttttacgccttactcaaaagcaatggaattttattgttgaagggcctgattttgaaatggctcttgatggcagcataacatttaaaatctgacaggtattaaccgttcttatttttataggcatcagagttggcagcagaaaaccgcctgctcccaactctaacattctgtattaaggatttttaaatcaaatattatggtaaagcgaaccctgttttttagtaacccggcttatctcagtacaaaaaatgagcaactgctagtgagttttcccgaagatataaagttaccagttacaattcccatagaagatttaggctatatcgtgctggaacatccccagataacgctaactaacgggctaatgggtaagcttatcgaaaataagacggcagtaataacatgtgataagcagcatttacccaatgctattttgcaacccttaaccggacatagcgaacagaccgagcgttacaggcaccagcttaacgccagtgttccattaaagaaaaacctttggcagcaaacgataagtgtcaagatagcaaaccaggcgcatcatttgtcagcaagaggtaaagatagtaaaaagcttaaacgctgggcaactgaggtaaaaagtggcgatgtggaaaatcacgaagcaatagctgcagctttttattttcaaagcttatttaaccatgtccctgattttagccgaaaccagaaaggaattgcacctaacggtttattgaattatggatatgccattttgcgggcagttactgcacgtgcgcttattagtagcgggttattgccgtcagtagggatttttcatagtaataagtacaacgctttttgcctttcagatgatgttatggagccgtatcgtatttatgtagatgcactggtttacgatataacgaataagtaccatagttatgaagaccttacccaggaactgaagacaatactgcttactataccagtagtggatgtggtaatagatggaaaacgtagtccgctcatggtagccatgagccgtactaccaacagcctctatgaatgctatgctggcatcagtagaaaaatattatatccggtttttgaaacaaatttttagaaatggatggaatctgattattattcaaggttaaaccagtacaggactatgtgggtacttgtattttttgatttaccaaccgaaacaaagttagaacgtaaatcagcagcccgtttcagaaaggatctgttagatgatggttttactatgtttcagttttcaatatacctcagattttgccccagccgcgaaaatgcagatgttcattctaaacgtataaaacgggtattacctaaacaggggaaggtgggtatcatgcagataaccgataaacaatttgggatgatggaaatattttatgcgcaaaaagaaataccaaaagatactcccggacaacaattagagttgttttagaattttaaaactcctgtttttaaaatgcatatagacaaaaatgtaattgatttctcaatcctctttttatagataaaataaagtataccagcattttatagctggtatactgtgaatcatctactaaagtatgatttttgaaagcaattcacaactgttttgaacactacaaacgtaagcaggtaactgtgaatcatctactaaagtatgatttttgaaagcaattcacaacttaacataccacttgcctacttccagtttactgtgaatcatctactaaagtatgatttttgaaagcaattcacaacttgttatttgaaatattgaaccatactataactgtgaatcatctactaaagtatgatttttgaaagcaattcacaactaggtaaaccaatcacaacgataggttctgactgtgaatcatctactaaagtatgatttttgaaagcaattcacaacgcagaaatgttgggttattatatagataatactgtgaatcatctactaaagtatgatttttgaaagcaattcacaaccctgagtttaatcaactcgtttcatggtatactgtgaatcatctactaaagtatgatttttgaaagcaattcacaactttataattgttacatgactatcttctatgactgtgaatcatctactaaagtatgatttttgaaagcaattcacaactacaggatggcaccgccctgaaaggcgaagactgtgaatcatctactaaagtatgatttttcaaagcaattcacaacttggaaactgtgaatatggattactattgtactgtgaatcatctactaaagtatgatttttgaaagcaattcacaaccccgcaccagttctcttgccgcctctgtttactgtgaatcatctactaaagtatgatttttgaaagcaattcacaacccatactgaagaagtggcgcaggcattcagactgtgaatcatctactaaagtatgatttttgaaagcaattcacaaccttttatatctgggggctttataatgccttactgtgaatcatctactaaagtatgatttttgaaagcaattcacaaccccaagttggtggtcttggctcaattataaactgtgaatcatctactaaagtatgatttttgaaagcaattcacaacatggaaatgatatctgggtaaatattataaactgtgaatcatctactaaagtatgatttttgaaagcaattcacaactaatttgtgatgtactcacacatgatgctgactgtgaatcatctactaaagtatgatttttgaaagcaattcacaacaacctatacagtcgaggttttataatttaactgtgaatcatctactaaagtatgatttttgaaagcaattcacaacttcggcggcttagtactggatatttttctaactgtgaatcatctactaaagtatgatttttgaaagcaattcacaaccagtgcatggtagatattcaaggtgatactactgtgaatcatctactaaagtatgatttttgaaagcaattcacaacttctgccaatgttggaaaaaaggccgttgaactgtgaatcatctactaaagtatgatttttgaaagcaattcacaacttagcaggtcgaggtgttttaacagataaaactgtgaatcatctactaaagtatgatttttgaaagcaattcacaacctacatcgcgcgctacatctcccataacagactgtgaatcatctactaaagtatgatttttgaaagcaattcacaacacaagctaaagcgcgaaaacaaggtagtgactgtgaatcatctactaaagtatgatttttgaaagcaattcacaacgcttgccgtttaattgtgtgctaaatggtaactgtgaatcatctactaaagtatgatttttgaaagcaattcacaacctttaaccatacgttcatcctgcaactcttactgtgaatcatctactaaagtatgatttttgaaagcaattcacaactttgaaatgtccgatttgagtttttcaaaactgtgaatcatctactaaagtatgatttttgaaagcaattcacaactggttgattttaccaaaatagatgctaacaactgtgaatcatctactaaagtatgatttttgaaagcaattcacaacacacataccaagtttgctgattaagcctatactgtgaatcatctactaaagtatgatttttgaaagcaattcacaactggctctgttttttactttggctcatttccactgtgaatcatctactaaagtatgatttttgaaagcaattcacaactgatgagctgcgtttccctgtcaacacccaactgtgaatcatctactaaagtatgatttttgaaagcaattcacaacgctaacacagcgcatttcttcttccgcgcactgtgaatcatctactaaagtatgatttttgaaagcaattcacaacctgtcagcttttaactgtaaatctatggaaactgtgaatcatctactaaagtatgatttttgaaagcaattcacaacttatttccctcatgagcttgttgaagaggaactgtgaatcatctactaaagtatgatttttgaaagcaattcacaacattcggcacctcttcatcacgataggtactactgtgaatcatctactaaagtatgatttttgaaagcaattcacaactgaagactatgccgaaagtgtagctgccgaactgtgaatcatctactaaagtatgatttttgaaagcaattcacaactatcctgtcgcctttactttgcatagtaccactgtgaatcatctactaaagtatgatttttgaaagcaattcacaacctgcttgtatataactggacgggctacagactgtgaatcatctactaaagtatgatttttgaaagcaattcacaactgcagtgagttgttttccagccaatgcctgactgtgaatcatctactaaagtatgatttttgaaagcaattcacaacctgtaatcttatctactgcagcggctgctactgtgaatcatctactaaagtatgatttttgaaagcaattcacaactgtttaaccatttaccatctgttgctttaactgtgaatcatctactaaagtatgatttttgaaagcaattcacaacttcttcagcttcatctattaccagcacgttactgtgaatcatctactaaagtatgatttttgaaagcaattcacaacaagagatgagtaaagactatccaagcctatactgtgaatcatctactaaagtatgatttttgaaagcaattcacaacttagggataacggcagcatgctcaaacaaactgtgaatcatctactaaagtatgatttttgaaagcaattcacaacccagaaactgcatagggttaaagctgccgcactgtgaatcatctactaaagtatgatttttgaaagcaattcacaaccgctaaggcttttatccgaaatgctatcccactgtgaatcatctactaaagtatgatttttgaaagcaattcacaactctgtgtataagtgtacccattacctgaagactgtgaatcatctactaaagtatgatttttgaaagcaattcacaactgatgaaatcaatataaccggctgtagtatactgtgaatcatctactaaagtatgatttttgaaagcaattcacaactataaagtttgaagatggcagttttaaagactgtgaatcatctactaaagtatgatttttgaaagcaattcacaaccaccgtttcggtaatctttaagaagccgttactgtgaatcatctactaaagtatgatttttgaaagcaattcacaactttgaaggtgcattttctgcggacttcatgactgtgaatcatctactaaagtatgatttttgaaagcaattcacaaccagcagaaggaaaagcgatatttcagacatactgtgaatcatctactaaagtatgatttttgaaagcaatttgcgactgaagctttggcagtgctgttcccagacgaactgttaatcaactaaaaaaataaaaccccgtatatcaatagattacggggttttttgcggagaaagagggattcgaacccccggacctgttacagtcaacggttttcaagaccgccgcattcgaccgctctgccatttctccagtattttaacaatctttgttccctgattgcggttgcaaatatagtaaccttttacagttttccaaacacattttttcaaaaaaaaagaaaaaatgcttactttatttttaatcctttcatttactgaaaattaaatttaaattaattttcatcaaaagatatatattctgttatttcaagtccgtagcctatcattcctacgcgttttgtttgtgcagaattggtaagcagcttcattttagatacatcaatatcgtgtaatatttgcgcaccgataccaaaatctttaacatccatttttatttgcggcgctttgtttattccctgcgattgcaggtttttaagttctttaatgcgctgcagtaattcacccggctggatttcctgatttataaaaagtatagcggccttttcctctttattaatacgtttaaaaatgctttcgagcttcttgtctgcattattggttaaagtgcctaatatgtcattatttacctgtgttgagttaatcctcgtgagtaccggctcaccggtattccagcttccttttgtcagcgctatatgaacctgcttgtttgttgtttgcagataagcccttaagcggaaagtaccaaagcgggtattgacttcaaaatcttctttcttctggatgaggctgtcgtgctgcatgcgataggcaacaaggtcttctatagataccagctttaagtcaaatcgcttagcgacttcatacagttcaggaagccttgccatagttccgttatcgttcattatttcgcatataacacctgccggcctgaaacctgcaagccttgcaaagtctatagcagcctctgtgtggcctgttcgccttagtacaccgccttctttagctataagcggaaatatgtgtccgggcctgcccaattcgaatggttttgtatcgaggtttacaagcgcttcaacagtttttgccctgtcctgtgccgaaatgcctgttgtaacgccattgccccgcaaatctaccgatactgtaaaagcagtttgcattgcatcggtattattagaaaccattacatttaactcaagttctttacaccttttctcggtaagtggagtgcatataagccccctgccatgcgtagccataaagtttatcatttcaggtgtaaccttatcggcagcggcaagaaaatcaccttcattttcgcggtcttcatcatccaccacaataatgactttaccctggcggatgtcttctatggcttcttctattgtgttgagttgtattttttgttcggtagtagtcagcattttgttactgttctttaggttttagattaaaaattttctgcaccagtttttgcaatggcagcaaaaggttgtccatatttatcagccctatatcattggtagccctgtaggttagcagcacggcaagcggtgctaatacaaaagatgacatccatgcgcctgcaaaaggaggaatgccgtcttcctgcgccagctttttaccaaatgtatttataaagtggaaaataataaaaatcagtactgcaaaaacaatgggcaatccgagcccacctttacggataatggcacccagcggagcgccgataaaaaacataaggatncaggcaaagccnattacaaacttttcataaagtgcatgccantgtccgttnatnttnttaattttntctttgagttcattctgccccgccattattataaagttcgagctgctgaggctgttagaagccaggtcaagaactttctttttatcttcggctttatctataagagataaaagatttgcaggaacactgtcttttactgctttaggtaaaggctttttttctatacctatactatcccgttcacgcaatatagtgcgcgaagcaggatttgcaagcacaatattagcacggttggttacattttcggttatactggctttttctttttgataatttgcttgtaaagagtccagtgtgtaattaagttcactgatattgagcatattattggtgtgcgatacctgttctttatcaccattactctcattaaacttagtaaggtcgatattcattacctgtcgcgaaaagctgctttttgcaaaaggtagcctttgtctttcggcagggtcttttgaggttacttcttcataataataaccgtcaaaaagctctaattgcaagaggttggagtcttcgctactgtgcagcaccccgtttttagaccgtataatttttgcattagatgatgcaggcttacgctggtgtatagttacccctttaagtttttcgccgttctctccgcttttcttatcaactttaatattaaagtcacctatggcgttaaactggccttcggcaatagccatggcaggcttgcgctgaacgatacttttacgaaggttgataaacttatactgcgctctggggataacgttattggcaaacaggaatgctacaatactaagcccgaatataaatatcataagtgcacgcatagccctgcctaatgatatgcccgatgacttcattgctgcaaactcataattctctgcaaaattaccgaatgtcattatagaagccagtaatattgataatggcaatacaagcggaacaatagtaggggagtagaacaaaagaaattttgttaccagccaggcatcaaggtctttaccggcaagctcggcaataaatagccagataccctgcaggataaaaataaagaacaggattataaaaactgatccgaatgttttaagaaaggaggtaaggatgtagcggtctaatattttcaccgtaaaatcagtctaatctattaatgtagtaattagggtatttactctctgtaaaggtaaaatgattttttgacaaaggctggtttgttttaaaagaatttatggtgaaggtagttttagtaccattcttatccatctttatcaggttatatatgtgctttgtctgcaggtctataccaataagcacttcctttgtagggttagatgcttcggttggctttagctttatgtattgtattttacgccctttaatgttttgggttatatcccagtaatatttatatcctgaattaaagaacgtaaacatttttgcaggcgtaagctcatcagagttttggttatcaaaggtagaaatagatatctcctcatcttcgggcactatgttataaaccttgctgccatcatatattcgggtgatgcccataatattaagcacatacttgtcgcctttaagggctacattgcctttgctttcctggtttatattatcagaagcattaaatatggtgtatttaaagtcgataacaatattatcgtagcttcttatttttgttgaaacctggtctaaaaggtcttttgccttttgagagttttgtgcgcctgctgatgataaaccgaaagtaaagataaaaagtaatgcaagttttatagtcctgtacattttaaaagtcattttcttcatttttaaaaaactgctcaagagaggttaagtcgggtataagtacattacgggctttacttccttcaaacgggccaacaatacctgcagcttcaagctggtcaataagcctgcctgcacggttgtaacccagtttcagcttgcgttgcagcaatgatgccgacccctgctgcgcggtaactataacctctgcagcctctctgaacattgaatctctttcggaaatatctatatcaagattagtgccagtttcctcaccaaagtattcaggaagcaggtaggcatccggataggctttttgagaaccgatgaattcagttactttttcaacctcaggcgtatctacaaatgcacactgaacccttgtaaggtcgttaccctgagtgtacagcaggtcaccacggccaataagctgatcggcaccctggctgtcaagaatagtgcgtgaatctattttagatgttaccctgaacgctatacgtgccgggaagttggcttttataatacctgtaattacgtttaccgatggcctttgtgtagcaataataaggtggatgcctattgcgcgcgctaactgtgccagccttgcaattggcgtttctacttctttacccgccgtcattatcaggtcggcaaactcatcaaccaccaatacaatataaggcaggaagcggtgcccgttttcagggttcagcttccgttgcttaaacttatcgttatattctttaatgttacgcaccattgcttccttaagcaggttgtaacggttatccatttcaacacaaagcgagtttaacgtgtttattaccttggtattgtcggtaataattgcatcttcagagtcgggcaacttggcaaggtaatgcctttcgattttattgaacagtgtgagttctacctttttagggtctaccagtacaaactttacttcagcaggatgttttttataaagtaatgatgttaataccgcatttaatcccactgacttaccctg

SEQ ID NO: 310 - DNA, 24200 bp, synthetic construct
  source 1..24200: mol_type = other DNA
  misc_feature 1..24200: note = Synthetic
tgggctggattacaaaattcagtaaagattttgtaaacagcgaagcgcttaaacagcaaaaagaagccggtgttagccgcaaacttgtaggctttgaacttacagaacgtggcataccacgccacgattacgaaattgtagatgcacagggtaccgttataggtattgtaacatcgggtactatggcgccatcgcttaataaaggtattggcctgggctatgtgccggtggcttatgctacagaagatagtgaaatatttatccgcatccgtaagaatgatatccctgcaaaagtggttaaactaccgttctacaaaaagtaaggatatacttatcaatatattagccgcaaatctttacaggtttgcggctttttttgtaaatatggggttaaaataaaaaatcgcttacagattttctctaaatttgagataaaccgcattactactatgaaaaagctggctgccctcgcaatccttataacatcaatttcttatgcccaggacaatgctaaagcatgccgggtgtttagccgcataagcgatgttttgcaggaaaaacattttaagcccaagcctgtaaacgacagcctttctgcctatgtgtttaatactattattgaccagcttgatgataaccacgtactgtttaccgaagatgaattcaataaattagctgtacataaactaaaaatagacgattatataaaagcgaaagattgttctttttttaccgattttataaatacctatcgtaccgccctgcaacgcaataaaaagtttatacaggagctggctacagaacagcttacttataacactacagataccatttactattctaaaaaaagttatccttttttaaaagacccgcagcgcattaaaaaatacctgcgcaaaaaaataacttttgatatactggaagatatttctgagctttctaaaaataaagattcgcttactaaacaattgccaaaactatttcctgccactaaaacaaaggttatagatacttatatatgccgcacagataacgacctggctcctgccgaaggttttgaagacagtatgtatggcaaattctacaatgtgttctgctcctattttgacccgcattctacctattttaattataacgaaagggcatcatttgtatcaggcatttctacacaaaattattcactgggcctgtatgtaagccagaaccaggaagaagaaattgtggtagaagaagtagttcccggcgggcctgcctttggtacaaataaaatagaaaagggcgacaagatcattaaactgggttctaataaaacagagtttatagtatcgtgcgcatctatggatgccattacaaacattgtaaacagcgacacctacagagatgtagacattacgcttcgcaaaaaagacggtactatgtataccgtaacgcttactaaggaggtaatgaaagatgatgagaacctggtatacagttatgccttaggcgaagggaaacaaaaaacaggttatataaaaatcccgactttttacagcagctttgacaaggaaggccaaagcggtgttgccgaagatgtagcaaaagaagttacatcgctcatgaaacaaggcatcagcgggctaataatcgaccttcagtttaatggcggcggctctatggaagaggttatccgcatggcgggaatgttcattaactttggccccatatctgtactcacagataaaaatatgcaatacaacaccatacgcgattacaaccgcggtatgctgtacaacggccctatggtagtgttggtaaatggcctcagcgcttcggcaagcgaattttttgccggggtaatgcaggattataaccgtgccgtaattgtgggcagccctactctgggcaaagctactatgcaaaccattatgccactggaagaaaatgacgaagctaattttataaaggttaccgttgacaggttttatcgtgtaagcgggcgtagcagccagtataccggcattataccagatgtagagatgccgatgctttttagccagataataccgcgcgaaagcgcaatgcctaatgctatgccaaacgatagtatagacgtgcaccttcgctatacaaaaatgccggataccgaaattaaaaaagcggttaccctgagtaaagagcgcattacaactaataaattcctgaatgagataaagacacttgacggccgcattaacgaggtataccagtctaaaaagccaccgctgccggtaacttttagccgggtgtacgaccagatacatagtactgatggtatttataaagaggtatctgcaatagcagataaagaaaatgctgtaaccgttacgggcagctttaatgctgcaggtacagatgcttataaaaaaacggtaaacgactttaaaattaaaagtataaagacagatccatacatttttgagagcattaatatattaaacgaccttagcaatcataaaaagcattaatagcactaattttggttttgtaaaaacggcgaataattatacttttgtgccgcaaatacataaacattatgggaagagcgtttgaatttagaaaagccaggaaaatgaagcgttggtcggctatggccaaaacgtttacacgcattggtaaagatatagtgatggccgttaaagaaggcgggccaaatgccgaaaccaactccaggttaagggctgttatacaaaacgcgaaagcggcaaacatgccgaaagacaacgtagagcgcgccattaaaaaagcatctgataaagataccgctaactttaaagaggtactgtttgaaggctacgcacctcacggtattgctatacttatagaaacggcaacagataacaacaaccgtacggtagctaacatccgcagttattttaataagtgcaacggtaccatgggtacacagggatctgtagaatttatgtttgaccatacctgtaacttccgtataccggctgaaggccgcgatgtagaggagctggaactggagatgatcgactttggtgtagaagagatctttgctgacgaagacggtattatgatgtatgccccttttgaaagctttggcgctatccagaaagaactggagcaccgcagcattgaaatactttcatcgggctttgaaaggatacctcaggtaaccaaacaacttaccgaagaccaggtagcagacgttgaaaaacttcttgaaaaaattgaagaagatgacgacgttatgaacgtgtaccacactatgcaggaataatgcatttaagattttagaattaagatttcagaatgagcttcactcggattagtgagcgttatcagaccggaattttaaattcttcaatccttaaactacaataatcaaaagctgtctgaaaagacagctttttttatgccttatccttatatacttctaaaattgctacattggcacgttaaaatcacggctcttatatcgttcggcaagcagttttaccggtaagagtgaagctatttctaaaatcttaactcttaaatctaaatattttctacccaactgtaacattttaaaaaaggccacgtcattatattaaaaccagtcagaaagacattgaccaagacagaccaggatatcgaccacttagttgccctatgcagggagggtaaccgtaatgcgcagtttgaggtgtacaaccgttattataaagctatgtacaataccgcactgcgtatagtaaaagatgcgcactgggccgaagatgtaatgcaggaagcttttttaagagcttttacaaaaataacatcgtttaagggagaagttgcttttggtgcatggttaaaaaaaattgtggtaaaccacagcctcgacagttacaaaaagatcaaccgcggcgccatggattcgctggaagatataatgtataaggtggaggatgataatgataaagaagaggcaaccctcaattttcagcaggtacagctacaacaggtaggcgcagccatagcaagccttaaagaaagttaccgcattatacttaccctgctgtatatagagggctatgaccaggacgaaatttgcagcatactggatattaccccgggcaactgccgcacaacaataagcagggccagggaaagcctgctaaacaaaatgaaaggactatgaaagaagagaatcaaaacgagttagacaacctttttagccatcttaacgggcagtgggataccgaagagcctgcacttgggcaccaccaccgttttatggaacggctagaaggaaagaaagaaactaaaaaacgcttttcgctaaagctggcagcacccgtagctgcagcaatagccatgatatttggcctgtatgccatattcaattctgtaagcaataatgctacagcactaaataatatgtcgcccaaaaaccgtgaggcacaggaatacttttcgctggttattaaaaaagaactggcacaggtagaaaaagaaaatacacctgcaactaaaaagcttgttagcgatgccctgcaacgtttagataagctggaaaaagattatgatgccctggcacaggaactagatcaaaaaggcgagagcaaaaaaataatacatgccatgataaccaacctgcaaacacggatatcatttttagaagaggtacttacacaaatagaaaacatcaaaaaaattaaagagagctatcatgaaaacaatacataattacctgttacttctgatgtttatacccacactggcatttgcaggtattgtaaagggaaaatacacaaaagagaaaaagataaataaagtgtatgccgtaaacaataacgccgccctacaggtaggaaacaaatatggcaacattgtaattactacctgggatgaagaccgtaccgatattgaagttaccattaccgttagcggcaatgatgaagaagacgttgtaaaaaggctcaacagccttgatgtagattttgaggctacaaaaagcctggtttctgcacgtacacgcataggcaactttagagccaggggtaggaacattaatatggagatcaactataccataaggattcctaaaaacggcacgctgggcttaaacaaccagtatggcggcatacgcctgggtaaaatatatggcggtatgaacattgactgccagtatggtagccttaccattgatgaagctcatgctgacaataaccgtatagacctgcaatactgtggcggatcgcacataaaatacattaaggcagcccagcttaaaatgcaatacagtgacatggatataaccagggcaggaaaaataataggcgatgcccaatacactcccgtaaaaataggcgatgtaggcgatgccagcatgaccatacaatatggcgactttaaagtaaatactgccgataaaataaaccttaaggcagattatactacctgcaaatttggccgtgtagataacctgctgaatgtaggcataaactatggcgacgtaaacgtaaacgaagtggccacatctgccaggaatattgtagtaaacagcacttatggcacaacaaagctggggctggcaaacaaccttggatttagttttgagtttagccttgaatacggaagcctaagcggcaaagacctgctaaagtttacagaaaaaatcgaaaaagatttctcggtatactacaaaggtaacagcgcaagcggtacagggcagtgcaaattgtatgcaaaagcagaatacggagacataaaattaagcaggaactaatcatccctgttacataggcaggcttaatcaccctgcctttataataatcatcaatcattttttaatcaatcattaaccgcactgtcctaaagcagtgtccaaaaaacgaacagttttatgaaaaaagcaattttacttgcactgggtatgttatgtacccttgcagccacagcacaagaccaatctggctttatagaagccgctaaaaaacacgttacagcacagcacaacataagcagctacagcaagctctatgtaaacggcccctttgatgttattttagtaaaagataaggccgatgccctaactatagagggtgcagaaaacattgttccgcttattactgccgaagtaaaagaccaggtgcttaccattgccataaaagacggacttaaaataaaaccgtctaaacacaacaggatacttattaaggtgccctttaatgcccttaatgaagtaagcctttatggttcgggcagcattacctcaaaaaaaactattgatactaacctgggcataaaactaaatggctcaggatctataaaactatcattgcattcgcctaagaccgatgttaacatggtaggatcaggatctgtaacccttacaggctattctgaaagcatcgcctgcaaattaaccggatcaggtaccattatggcaaaagaactgcaaagtgatgctgccgatgtagtacttatgggatctggtacgatcaaagttgctacaaataaatcaatcaaagggcgcataaatggcggaggtagtgttgcctttggcggcgaacccgaaaaacaagaccttatgcgcgaaggtaccggagagttttcagctttttaaatatagtactgttaaactgttagttagtagccctgccctatccggcggggctttatttttttgtaaatttatagtatcaacacaatacataactaactttatcgttattaaactataaaaatagttgtgtaactaaaaaaatagttttagctttgaaatacataaaaagataacccatgcaaaagttgaccaataaagaagaagaagtaatgcacatactctggaagcttgaaaaagcttttgtaaaagatgtactggcagaagtaaccgacgataagccacattacaatacatacagtaccataatacgtaacctggaagataaaggctatgtagcccataatgcctttggcaacacccaccagtattaccctattattgctaaagaagagtaccgaaaagcgtttatgaacaacgctatagaaaactactttggcaattcatacaaaagcatggtatccttttttgcaagagaagaaaaaatcagcgctgatgagcttcgtgaaatacttaacatgatcgaaaataaagaatgatatggaaaacctgctaccttacattttaaaagcttctgccctactggcagtattttttctggcatatcatacattactaaaaaaagaaaccttttttggtactaaccgcctttttttgattgccgggcttatcacgtctgcgctactgccactggcagagtacactaaggttatttttgtagaccctatacccgcacgtccctttacatcgcaggaactcaccatgatgaataccgctatgcttcaggaacaaaaaataccggaacctgcttttgaaataaactggttctatgtagcattaggtgtttatgcaatcgggcttgcattttttggcatcaggctattagcagatgtgtttaagataaggaaaatgctggctggtaaacgtgttacgaaatcagaaacatataaacttgtagactcagccgatgtcgattcgccattttctttcttcaattatatcgtatataattcgggtgtactacaacctcaggagctggatagcatccttacacacgaaaaagtgcacagccgccaaaaacattcggtagatatgctgcttgcacaaacattttgcatcgtgttttggttcaaccctatcgtatggctatataaaaaggctatttctcaaaacctggagtttattgcagattctgaggctactaaattagttgcagatgtaaaggcttatcaaaaaaccatgttgcgcctttcgatagagccacaatatataagcattaccaatcaattttatcaatcactaatcaaaaaacgaatcgttatgttaaacaaacaaaaatcgcgcaggcgcaatttctggaagtatgccattgtgctgcccgcacttacagccttcgtactggcctttcaggtaaaagttgtcgcacaggaaaaacagctccctgtgcagcctaaaatttctgaaaggattaaaatgtccattgaaattacaaaagacagtaaagatgaagaattacaggccgaaaaagacatctttaaagaagagtttgataccgacgtaaccataagtaacattaaacgcaacagtaaaaaagagattaccggcatcagggtagctgttaaggcaaaagaccaggataaagtatatgaagtaaacggtaccgatcctataacagcctttaccattgaagttgaaaaggatgatacaggccttcttaaaatagtttttggaagccatgtaagtaaaaaacttaccggagttacttatgcaaaagcagaggctatttctaatgctgttgctgccgattctacttattctataagcacttcaagcagaacatataccgactctcctaaaaatggtggtgctgtaaggacggtatcgaagccaacagaaataaatatgggagatgtacttatagttttaaatggtaaaaaattacctaaaggagaagttcttaaactacctgccggcgaagaggtagaaggaatgacagtacttaaaaataaagaagctaaaaagaagtatggtaaagatgcaaaagaaggtgtaattgagattacaacccgccgcaccgtttcagcaagagggtttgcaatgctgccgcgtacccaggcatatgcttacacttcagagcctacatctattagtacaccaactataaggcaacgtgtagttataggctcttacgttaatgacgatgttaaggcatatgaagagatgacagatgaccagtacctgttgataaaagacagcgatgaggcttatagcgatttaacgcttgatgagctaaaaaaagaactggcaacaaccagaagcgcaggaatttttactacagccactgcaaacggatatgacaacaggccacaacaaataagtgaacgggcagcagcgaaactacaaaaagagagtgcttacaaattaagtttctttaccgaaaagatgaaaatggaaatggagaaatcaaggcaggagatggatgatgcccgtaaagaaatgaaaaaaataagagcagaaatggaagccgaacgtgcaaaatataaagccgaaaggaagaaagcacaaaaggcacaaaaataatttgaggttaagttaatataataaataacaatttattatgaccagaaggcggctctaaaaggctgccttttgttatatttgattataccaaaaacgtaccgccatgtttaaaattttagcaaaactaaatcatatactactgcctaattatacaaaacagcaactggatttggctaaagccactaaatttcagaaagccataatagcctggaagtattgggtaacaacacgtgccgttaattaattagctttaaaagctgaaatattatcatctaattaactgtttctttttgaagcattgtaaagttagctgtattttcttaagatttgcccaattaacaaatcatttacaaatagtatcagatgtacgccttatatttgcattataagttttcgacctgaaaacttatattggttggttggtttgaaatgcccttcttcttagaagggcattttgttttttaagccgccccttcctttttaaaatatcccattataaatattgattgccctgtaccataatattatttttcaggtaatatactccccaagaaaaatccttggttaaatcagaacctgactcctattttgcttacaagtaaaatttttgctgaatgtttttgaatgatctcgtttgatttattttatcccttaaaataaaaaaagtcccacgagacgcaggactaaagattttcttcggcttatagccttattgtgaattgctttcaatactacgaatgtataaaaaataacttacaaagtacattttcgtttaatattttcttaatttagtttttgattaagatcaaataatcaccccttctaccaaccaacaataagatgagcaaaacattaggccttgatttaggcacaaattctataggctgggctataagagatactgcagcaggagataaccaaattatacatagcggtgtactaacctttgaaaaaggtgtagcttcagaaaaagggatagaatttccccgtgtacaaaaacgtaccgaaagccgcaacaaacgccgtaactaccagtcagaaaaatacagaaagtatgctctgctgcaatttcttatagaccataatatgtgtccgcttacaattgcagaactgaatgaatggcgaaaatatactaagccatacgggcgccgttatccgcagtctgaagcatttataaactggttacgttttgactttaacggtgatggtaaacccgattttcatttgctgggtaaagataaagatgagagttattatgcgtttcgtgcttttgccgccgatgagcattaccataatgtataccaggataatctacatgtactgggcagggtattttaccagctggtacaacgccgtggttttaaaggccgtgatgaggaggaagcaaaaacaggtagtgataagaatggcacagccggccgaaatgacattgctgcttatatagatgactatggcactctgggtgccgcactatatcaatatcaaaaagctcgtggcgggcgcataaggcaacgttacaacctgcgtaaagattatgaaaatgaactaaaagagatatgccgggtacataacattagtgatgaagattatcaaaaactatggaaagccattatttggcagcgcccgttgcgtacacaaaaagggcttataggcaactgcatttatgagccgggtaaaaaacgtgcccctataagccacccattgtatgaggaataccgtacctggatttttataaataacctaaacatagagccgcctgcaggcattgcaaaagcagattatctgaaagataaaatttatccgctattctttaaggcatctgatgattttgaacttaaatcaattttaacccagttaaaaaaagatggtgctgcaactaatgcaaggtttaaggaagacactaaaatagtttcggcaaagttgctaaagttttttaatgatattttaggcgataactggaaagataaatacggttgggatgatataaacaaccgcgaagccagacaacaaaaaaaaacaggcacaggatatacttttgaagacatctggcatgtgcttagtacctttgatgaccgcgaaagcctgaaagaatttgcggtgaataagcttggtttagatgaggatattgccaataagtttgcttcaaaaagcttaaagcaagggtatgccacacttagcctttcggcaattaaaaagatactcccttacctgcaaagaggttacatttacagccaggctgtgtatatggctaacttgtataaggttttaggtgccgatagcattactgatgggcttattgagcatttctctgaagaaaccgaaaaaatatttagagagaatggcaggcaaaaacagataaatgcagttgtaaacagcctgatagccgatgaactaaatgcaggacgctacaccatagaagatggcaggttgctggatgatgaggaacaggcacgtgtgtacaaaaaaattatagaaacatttagcaccaaaacctgggaagaatttaccgaagaggaaaaagaaggcataatagctgatgtatcagcaaaatttaaatcttttttaatgacatctgtcagagaaaaaagtggtgtatttacccagccactgcggctgcacgaccaggtttttgattaccttcaaaaagcatataaccttcctgataaaagaaagaactttttatggcatccatctgaacaggaaaactataccgctgctcaggaatatgctcattttacactaaagggtaaagatgtttatgtaccgtttaagaaaaaagaaacctttgtaaataaacacccggacgcagattatgaggggcgttcattaaagctgctaggcagcccggagccaataagcaaagggcttaaaaaccctatggcattaaagactatgcacaagctgaaacagctggttaatcatcttcttaaaacaaatgccatagaagaagatacccgcatagttattgaaattgcacgtgaacttaatgatgccaatacccgtaaagccattgaaaaatggaataacgagcgcgagcgtgaaaaccagaagttccgcgatattataagggaaattaatgccgaatcgggaaccacttttagtgaagatgataaaacccttgtgcgtaaaatacgcctgtgggaagaacagggcagaatatgcctatacacaggtaagcctattagtggtagtgaggtgtttaacggagtgatgtttgatatagaacataccataccggcaagcatgagctttgatagcgaacttaaaaatcttaccctggctgatacacattacaacaggcatgtgaaaggtaagctgttccctactcaactgcctaattacgagcacgacgcaactgttaacggcaaaacctatccggccattttaagcactatggagcgcatttttggtaaaaggtctttaaaagtagtaaccgacagaaagggaaaagaagacataagggaatcctggaaaaaaatcgaagatcttcagaaactttatgacgattggcgtaacagggcaaaatttgcttcaaccaaagagattaaagataactgcattcagcgcaagcatatggctaagatggatttagattactggaaatccaagctacgcacctttactcttgtagagtataatccggcgtggaaaaacagccagcttcgcgatacccaaataattactaaatataccctaccctacctaaaaacggtatttagcaaagtagcggtagaaaaaggcagtgtagtacatgcgtttaaagaaatttatgaggtaaatccgccttttgaaaagaagaacagaaaagtacacagccatcatgccatcgatgccgctatacttacgttaattccgccgttttatgacagggataagatactacaaaagtataacgaacaaaaggatagagacaatacctcgtgctatcatgaaaacccgaaggactggaaaaacttttcggcaggaaaaatacttggtattgagcaccaaatactgattaataacattgctgaaaacaaaaccactttacctacatataaaacggtaagaaaacgcggaaaaattgtaaaaaacaatgatggaaccatacgggttgccaaaggtgatactatacgcgggcaactgcataaagaaacacttttcggagctataaaattaccgcttagaaatgaagatggaaaaatactatttgaagaaaatggtaagatgaaacttgatgagaaaattcatttagtaatcagaaagccattagtttatagtaaagaccctaattctccggggtataaatctttagagcagatagagaaagaaatagttgacaaagatttattcaggatgattaaacagcaggtggaggcctcggatttcaaaacggctttgacagaaggggtatatatgcttggaaagaatggtgaaaagataaacaagattaggaggatacgttgtataaatgataaattaaagtatgattcggctattcgtgtccaaagacatagctttgcttcatcaaaagattataagcataacacattagctgaaaatggcggaaatcctgtatgcttgttttataagagtaaagacgggaatgataaaaatataaaagtattaagtataggttcactagcggagtcaaaaataatgaatgaccaacaatattttgaagaaccatattataatcatgtggaaatagggaaattaaaaaaatcaaaaagaattcctctacacgctgttttaaagtcagggataaaagcaatattctataaggattcgcctgaagaattattagaattgtcaaaggttgaattgtccactcgaatgtataaaatgtatggatttgaaggtgatgggaggataaggtttaagcatcatttggcggctggtatggatacggaacttaaaaaggataataaagaattaccttattacaatgcagatgaaaaaacaatgtttttacgtcttacccaaaagcaatggaactttattgtagaggggccggattttgagatggcacttgatggcactgtaatatttaaaatctgacaaatatgaataggtcttatttttttaaagacctttttaaatctatcaattatggtaaaacgcacactcttttttagtaatcctgcttatttaagtaccaagaatgagcagttagttgtaagttttcctaatgatgtaaaattgcccgtaaccatacctattgaagatttggggtatatagtgctggaacatccgcaaataacgcttacaaacgggcttatatgcaagctaatcgaaaacaagacagctgttataacctgtgataagcagcatttgccaaatgcgctattacagccgcttacaggacatagtgaacaaactgaacgctacaggcatcagcttaatataagcacaccgctaaagaaaaatctctggcaacaaactgtaagtgctaaaataacaaaccaggcatatcatttatctgcaagaggcaaagacagcaagaagctaaaacgctgggcagaagatgtaaaaagtggcgatacagaaaaccatgaagcaatagctgcggcacactattttcagagcttgtttaaccatatacccgattttagccgtaatcaaaagggaatagctccaaatggattacttaattacggatatgccattcttagagctgttaccgcgcgggctattatcagtactgggctgttaccatctgtaggcatttttcatagcaataaatataatgctttttgtcttgccgatgatattatggagccatatcgtatttatgtagatatgctggtctatgacgtaacgcaaaaaaatgataattttgaagaacttacaccagagctaaaagctttaatgctaagcattccggcaatagatgtggtattagaaggaaaacgcagcccacttatggtggccatgagccgtacaacaaacagcctgtacgaatgctatgcaggtatcagcaggaaaatactatatccggtttttgaaacaacagtttaaaccgcatggaacctgattactattcaaggttaaaccagtacaggagtatgtgggtacttgtattttttgatttgccaacagaaacaaagttagaacgtaaatcagcagcccgtttcaggaaagaccttcttgatgatggttttacaatgtttcagttttccatttatctgcgattttgcccaagtagggaaaatgcagatgtacataccaagcgcataaaacgcgtattgcccaaacgaggtaaggtgggtattatgcaaattacagacaagcaatttgggatgatggagatattttatgcacaaaaagaaattcaaaaagatactcctggtcagcagctagaactattttaggattaacagattacagatcatatgcttataatggggtataaaaagtatatgtttttaattcctattaaaccagttaaaaacaagtataccagcgttttatagctggtatactgtgaatcatccactaaagtatgaattttgaaagcaattcacaactgaatgtatataacagaaaaacagggcgttactgtgaatcatccactaaagtatgaattttgaaagcaattcacaacttatagaacacagcccagcgcataagataaactgtgaatcatccactaaagtatgaattttgaaagcaattcacaacggctcaatgatagttgtttagaacttatggactgtgaatcatccactaaagtatgaattttgaaagcaattcacaacccttacaatgtcttgccaaaaccagttttaactgtgaatcatccactaaagtatgaattttgaaagcaattcacaactggctaagggtgatgcttctgatttaatgcactgtgaatcatccactaaagtatgaattttgaaagcaattcacaactatagcattcagaaacccgcggtaacgaatactgtgaatcatccactaaagtatgaattttgaaagcaattcacaactaataaacactatgaaagcgattaaactaactgtgaatcatccactaaagtatgaattttgaaagcaattcacaacaagtgctacagcgtggacggcacttactaaactgtgaatcatccactaaagtatgaattttgaaagcaattcacaacttaattccgcacacccctgtattaaaaaaactgtgaatcatccactaaagtatgaattttgaaagcaattcacaacacacgtctgccaagaccatcaaatgaatatactgtgaatcatccactaaagtatgaattttgaaagcaattcacaactgttttagctgccacatgttattttcaattactgtgaatcatccactaaagtatgaattttgaaagcaattcacaacatgtgtgatatctagaataacaccgatttcactgtgaatcatccactaaagtatgaattttgaaagcaattcacaacccaaaggcaaggcaaagagccgccaggcctactgtgaatcatccactaaagtatgaattttgaaagcaattcacaacttctttatcttcctctttaactttgaaataactgtgaatcatccactaaagtatgaattttgaaagcaattcacaactatggaagattcgaaaaaaaaagtctttgaactgtgaatcatccactaaagtatgaattttgaaagcaattcacaacttcaaagctttgcacaggattttgaaccctactgtgaatcatccactaaagtatgaattttgaaagcaattcacaacatgccctcgatgataacgcagctagcatcactgtgaatcatccactaaagtatgaattttgaaagcaattcacaactaatccgggcttacaatactactttccacaactgtgaatcatccactaaagtatgaattttgaaagcaattcacaacacaacttcatagttttctaccgcaatgttaactgtgaatcatccactaaagtatgaattttgaaagcaattcacaacacgacggggacagctttgtagcaagtgcgtactgtgaatcatccactaaagtatgaattttgaaagcaattcacaacataacgagccttttgttatacctgcgtttaactgtgaatcatccactaaagtatgaattttgaaagcaattcacaacactgctgccattatgcgctgaacagccattactgtgaatcatccactaaagtatgaattttgaaagcaattcacaacgccaatgacaaaagcatctgttgatgattaactgtgaatcatccactaaagtatgaattttgaaagcaattcacaacttatacggttctatgcttgttctccctatcactgtgaatcatccactaaagtatgaattttgaaagcaattcacaactgcggtagaagatttgcaaaccgagggtgtactgtgaatcatccactaaagtatgaattttgaaagcaattcacaaccattatatctttattccacttaattacgtaactgtgaatcatccactaaagtatgaattttgaaagcaattcacaacttcgaacccccgataatcctctcacttgccactgtgaatcatccactaaagtatgaattttgaaagcaattcacaactaccggcataacgcttgttacacctaaagtactgtgaatcatccactaaattatgaattttgaaagcaattcacaaccctgttgaatgtttaaaatttaaagaggtaactgtgaatcatccactaaagtatgaattttgaaagcaattcacaactgcatttgcccgttttgacaaatgaaagttactgtgaatcatccactaaagtatgaattttgaaagcaattcacaactatattagattcaggggcttggatgacagactgtgaatcatccactaaagtatgaattttgaaagcaattcacaaccccaggcgttgtgtttgtaggtccgtaagcactgtgaatcatccactaaagtatgaattttgaaagcaattcacaactaaatgtacactacaggctcaaaaagtcggactgtgaatcatccactaaagtatgaattttgaaagcaattcacaactcatggtataaatgcaggacaaagtcacggactgtgaatcatccactaaagtatgaattttgaaagcaattcacaactggctaacaagcccgttgcgattgcaatagactgtgaatcatccactaaagtatgaattttgaaagcaattcacaactcattatcgttcttgccgcctacaatagaaactgtgaatcatccactaaagtatgaattttgaaagcaatttatttattcattagctaataataaaaaaccggaagatattctcccggctttctacattactcaaataaatactaaaggtctgtaaactttacacctacactaaaccatcttgatggcagcggaatagctccggcctcaaagtaggttgttttgaaaatattttgtgcgtcggcaaaaattacgagcttattaatggcctggcttagcctgaaatcatttatccaatatgatgctccggtagcccgctcattaaaacgtgttgcaaaaagcaccgtgaattttttatactgaaaatcaactgtatttgttacctggtgctttaacgaggaaataagatatttagaaaacacatcctgtttgatgtttttaaactcagaatctaaataagaatagcccaggttaaaactaaatttagaactatttgccagctctacattatatactgcacgcatattaataccgcttgtatttaggccgccaaagtttacactctgaaatggctctgtagtaacattacgtgtccagtcgataaaattggtaatgttcctgtaaaaataattagcattaaaagtaaatgccttttttaaaaatttaaaaccgatttcgctctggaaagcgttttctgacttaaggtcggggttgcctatattgcccgggcgctgattaaggtacaaatctgtaaaggaaggtatgcgctggctggtgccaatgttggctataattttaaaggcatcggtaagggcgtacccggcatcaagccccggataagcctgccatttataatctgaattataattaaggtaagcgcccacgtttacattgaaacgttctgtaaggtaggttctgtattctacatatacgccaacattgttacgattgtgctcgcctatgttagacgattttatatcttcattacgggcctctgcgccaaagcccagttctcccttttccattttatacgatgtattaacctcagcagctatcgaatttgtgtagtgctggcttctgcccgaatttaaattggcaatgccaaaatacctgtaatcgtcatagttatacctgtaacttacgcgtggtgccagcgaccatttatctgaaagatggtgtttagactgtatagatgcaaaggttgtctgcaccacttcgcttgagtttttatcgcccggagaagcatagaacccgttagcgccaaatccgtttttaatatacccaaatgcgcctaaaatctcgttattatcatttacctgtacattgccctgataaaacagtttgttgttttcaaagcctgtattgtaacggtagccattacttttatcatgcgatgcaaagatggaatgctggtgcttttgcttgcttataacaccccctaactgaattcctttaccataaaaggtatcaccattgccctctgcatctttctcaaaattagaacctgcgtaggtacttattaaaaacccagagtctgctggtttcttggtgattatatttatagcgcccgttaagctgttaatgccatatatccttgcagccgggccgcgtataacctctatacgctctataacttctaccggtatgggcaggttaagcatattgtgggccgtttgcgaatcgattatttttgcaccgtttagcagcacaaccgtctgctcaaaacttccaccatctatactgatgtctgcttggctgccaaagggtccgcgctgccttatatctacaccattggcatactgcaatatctcatttaaagacctgcctggcaatttttctattgttttgtggtttataacatatacattacggttctgcttagaaataggggtactaaagcggttttcattaattactaattcatcaatggttttagtactgtctttttcagtctgcgcatacatagcagtacctaacagtagcaacataccaaaataaagtttcttcatggtttaaaaattttgtcaaaagtagtaccttgccgtaccactaaagtataccagtttaagaataatggatagtccggttcaaattccttttaaaagcttcatcacactaaagcctcaggaaccaactgcggtgtacctgcaaatagtatttgagtttattaaagccatacaaatgggactattgcccgaaggtacaaaactgcccggtacccgcacactgtgcaagctgctatcggttaaccgtaatacgctcataaagtcgttccaggatctggaggcacagggatggatacagattttgcctaataaggggacgtttatactatctcaggcaaagcaaaattccaaggctgatgttagccaatctacaaacaaaagttctaaaattaataccggctttacctttacacgctctgccctgctggaaaatcctgtggaagtaagtaccctgccccaccagtttaatgatggcctgcccgacctgaggcttgtacaaactgatgtactggcacgcctgtatgtttctaaactaaaacggcaaaagagcaccaatacatgggaacaggtacaaacactgtcgcaccagagttttaaattacatttttctaattacctcaaccttacacgtggcatacgcattgctcccgctaacctgcttaccacaaccagtcacgaagttagcctgtatttagttacaaaactgctgctggctcccggcgacaatgtggtggttgcttctcccggatattaccggtctaacatgacacttgcagataccggagctaaaattatcccggtgcctacagataaagaaggcattagcaccaaagatttaaaaaccatttgtcaggaaaaaaccatcagggtactgtacctaacctccagttaccactaccctactacaactgcgctgagtgccaaacggaggatagagctgctcgaacttgctaaccagtatggttttgtaattttagaagatgattatgattttgactttcattatgacaataacccggtattgccactggctgcttttgattctaatgacagggttgtttacattgggtcgttcggacggtcgctgccggctggctttggttatggttttgttgcagcaccctctgaatttattgccgaattagaaaaacaccaaaatatactggaacccggcattgatgttattaaagaacaggcactaaccgaatggatacaggagggtgaagtacacaggctctctaaaaagaacaaaatacgttataaagaacgcagggatgcttttataaacctgctgtcaacccagctgaaagggcgtataaaatttcaggtgcctgcacgaggactggctgtgtgggtagaatggctggataactttaacctgattcagctgcaaaaagaatgcgcggctaatgggctgttcctgccaaaaaccattttataccaatccaaaaaccttacagcaacacggctgggattcgggcatttaacagtaaccgaaatggaagaggctattacaattttaagcaaatcacttgaaacggttttaaaaaacagccactaatttacaccggtcaatttgtgtaatttagtgaaattagcggctaaaaattctaaactatatagcgatgtagcgtttcgctaattaaactcaagctttgccagtatatcttttttcttattgatgattgactcatctgctttttccttcagcctttccttatctgtaaaatagtatttatacttggccttagtaaggcttattttatagtcgtcgaggttactgcctttaatatctactccggttttaaacggtatgggcgatttaagcaccgaaacgtggtagttgtaactcatgtccaggttttgcataccgccaactgccagcgtgtagcggtctatctctaccagtgcgggcagcacctccatatggctcttctcaattatcatttccatgttaagcgtgttgatggtatttttatccttttgcttaaacatcagcgtttttgccatctctttaaaagtttcgccatccagcaccataatatctgtggcctgtaacgcagcaatactggttaccgatggtataataacatccatcctgcggttaagcagcgcactgccctgcatccttaaatgccccttgcctacaaacgattttgtcattgggaacaggctgtccattgcgggcattactttagcaatatttgccatttctatatcatgcaggttaaggtcaaaatctaccttggctctgcggtcgtttactaccgaatagttaaggcttgtagtaagttttgctgccagggtggtcagttcaaaatggttcagctttaggtgcccttcctctaccttaagcacacctttaagatcctgtaggtcaagcgtgccataatgcagtttctttatgtcgctgttaaacacaaaattgatatttgcaggtattttaaacaccgtttttttattgcttacatttttaggatcatgtaacttatgctcagctacctgcttaaaatcaggctgctgttctttggcagctgtttcggtattcataattgccataatctcattggcatctataaagtttgaagttagcgtaagggtggcatcaacctttttatcaggcgattttttagccagcatattattgatctgccccgttagcgtaacatcagaattaccaaaaaagatatgcgcattacgcagcgtaatagcccgattattaattgatattttagaatgctccatgcgtagcggcaatgcaaactccggtgtataggcatacaggttattgaactctacatagccacgcggcatccagatgctgtccctgttcttctgaacaagaagcttatagttcccgttcttaatacctacaaactttttatcctgccacacacccgcactgtctactgtaaaggttgtacttatagcggggcggccttttgtactacgcggactaagctcagcagtaatactcgctttacgtatcacccccctaatcttatctgaacctgaatattttaaattggttaaccgtatctctgcagcaagttttgacatactgtctctttgctttttagcccttagctttacatccagccccgcaagtttaatattatgctggtttttataattcacggtaagatctgtagcggctattttaccaaaagacttgcggttcgcttcgtcttctgccttacgtccaaaaacaagttcggtttttttggtctgtacatagatcgtgtctttcgggtcgttaatcagcaaattggtaaacaatgaattacctttaaccttcatgttgttaaagttgctgttcataatatcgttgctcttaaatacggcattgatatctatgtgcgccaggccttttgcttcaatatccttagcaaacggaaacttctttttaagggtagtcaggtcaaggtcgcccttaatgttcgaatcaatttcagggtctttaagcaggttggttaccgtagcattgcccttaaggtctactcctgtaccttcaagcagcaactgctttatggtaaggatagatgcttcgggcttatcaaagttaagcagcgcatgcaggtcgccctccaagtgtcttatctccccggcaaacttattatacttaagcacaccgttgtcaatcttaaaagtaatgtcggttaatggtagcctgtctttactataaataccttttgcagtggctttaagcactacgttaccgcgcacatctatatcttcttttttgatgatatattcaggcacggtttcccaaagtgtttttaaagagggtactttcatttccagtataaggtcagtttgcacctcgtgagttata

SEQ ID NO: 311 - DNA, 24122 bp, synthetic construct
  source 1..24122: mol_type = other DNA
  misc_feature 1..24122: note = Synthetic
aaggagacgtttatctgggactagaggcagaaactctagattcgaaaggcttagaatttgcacaagagcatctgcgtgtcttgtctggactctacggactactgcgtccattggacctgattcaaccgtaccgcctagagatggggacgagattggcttttgacgactatactactctatacaactactgggaagataagattgtcaaactactgcacaaagacctcaaagcgcaaggtgataacatcgtcttgaacctcgcctccaacgagtatttcaaatccatccaacgaaaaagcctcaaagcaactatcatagagacggagttcaaagacaacaaagatgggcaatacaaactgatttccttctttgccaaacgcgctagagggctcatggctcgctacgtcatcgaccatcagatcaacgacgtagaaagtctcaaggcattcgactatgacggctactacttcgaccccaaagactctacagagaccaaactagctttcaagagagggtaagacaacaccattgaattgaaaatcatcgttcagtagacgcgcttggacggtcttgactcttgggtctacacagtacagccctcctacgaagggatctcttctctgccgtcggcatgctgtgcaaatctaccccgcatagggtcatgtacttgctccgatttgggccatggccatccaccaaactgcgtacgaccatactcgagcatggtttgatgtatctgttcgtgggtattcatcacgaatggaccgtgctgtacgaccggttcatggagtggcttgccctgcaacaggagtacatagcaatccgaactccctccttcgagtgttagttcggttgtactatccacatccaccagatggtagtcgttgatctcccgcccttcaattttcagccctgtgccttggtagaaatacaaggtacgatttgcttcggcgctttgtgcgccaggtagcactaacttggcgttcggctctagcttgatcgtccaaatcgccacctcatgttgatcatccgctgcccaagaatctggagcaggtgtcaaggcctgctgatcgccaaatgctcccgcgatcacacgcaactcgcttttcgctccgtcaacagtttgtgctacaaccggaattcgctcatgccaaaacatggaaaaatagggttctaccattttgctcttcgcaggcaggttgagccatatctgaaaaatctccaaagtgttttcttgatcttgatgaagaagtggaaacatctccgaatgctgtacccctttgcctgcggtcatccattgtacgtctccatccccaaagcgacctgctgcacccatggaatccgagtgatccaccgtgccttctttggtgatagtcaccgtctcaaaaccacggtgcgggtgagaaggaaaaccaggcactgtcataccatgatacatcctgaaaccatcttttatagtgaaatctgctcccatgtttcgaccagacagactcactgctggcccatggttttcattgcctttggggtattcgtctctatggtgtgcacaaaacaaaaaagggtcttgtgtacgccaagggaattgcataggctctatgttaagaattttctctgacatgattgtactgtatattgtatgttacaacatatatacaaaatcaaagcgatagggttgtctacccgtcactctttttttcgaaaatatctctataatcctccttgcgcatcaggtccaaacgtctagtcatttgatcaaactgcatttgatacttggggttggcggctcgactatgcatgtagtcaatgatggattgaaattcagcccgtagttctaccccacctccaagctgagctatccactcgatatgagcctccagcttggtttgggcattgtccttatctttgagatgagtgatgttataagccaaaggacgttcgagtagattgaggtagatcccacccaatggtatcaattgcttatcgaaaaagtagcggtgtatggctcccaactccatcacgttaaacacactgacagtgggagcaatctctacttgcacatgtgggcattcgttttggacacgtaggaggttgtcaagcagttggttccacttcagccctttgcgtatatattcggcctgttgtcccaaagcatcaatgctcactgacaattgtaccttatcaaatttctgccataggggaatcacttcctgagacttgagttggagtacactcagattggtattgtagcggatcagtggttgttgtctttggtccagcaaccgctccagcaatcggtagtgctcctccatcatgagcggctctcctcctgcaaaatagacttcttcgatctcatcggcctgatccatgacctctgcaatcaatgcggcattgtcagtcgtcgcacggatgatggcttgctcccccgccgtattcttcagttgtttggcttcctcataccaactcgaactcgccccgtgccagcacgtacgacacttcaaattacagatattggaaaagcgaatatctaagtagataggacgaatgctaccatcgatgagctgctcgtcttggatcttctgcgcgagcacagggtacttggagagcgtttctgtacgcatgctactcttgccagccacctcacgatgaaggcaagccgtgcagcgtcggtcgacaccagaggtgagtacctgctgccgaaaattgcccatcgcttgtccctgccatatctcctggatcgaattcttggacaaatccccaaaggtcacactcgtactacagcatgctttgaccagcccttgggtatcgacatggagatgcaaccatggcatggggcaaaatttatggtctgatatttgatctttctctgtcaatttggattatagattgggaacatttagattcaaaacaagtttaaaccatccgaaacaatttgattattcttgggacaataattaatggcagcatgaaacgaaatctcattccatcacttctcttggcactcttcatttttggaggttctaccttggcacaatctagtggcacggacgatacgctcaccaaaatgaaggttcagaatctccgatacaaattcaaagtcggctggttcaatttgggcggtggagacatgttttttgaagaaaacactatgctcatcaacaaccaataccatcatgtagtcaaggcatatgcttacacagacggcatggcggccttttttacagagatggacgacaactacatgtctatcatcaacagcagcaacctacacccctacctatccgaaaagcacgtgacaatcaaaaatggtttttgggatcaatggaacacttttgattatgaaaaaaaggaaatcactgtcaaggccaaaagaaccaaacgcggtgaaaaatcagacagaaactggacagtcaacatgacgccagacagctacgatatcgtgagtactttcgtttatttcatggccgtagactggaccaagcacaccatcggtgatacggtcacagtcatgactcattacaagaagaaggtctaccctgtctctctcatctacaaaggcaaagagaaaatcaaatacaacgatcaaaaagtcgacacctatttgacccagatctacttacctgcagatacagaatacacctacggtagacccgtcaatgcgtggctatctgctgatgggcgcaacgtcccgctgatgatccaatgcaagttggcgtttggcaatgccctctgcgaactcacagaaatgaacggcgaagaacctcacttctaatccgaaagacagtctagagatccatctccatcccccccactttggaacgaatgttaaagatcactcccaactggaaacgatcctgtgactcgatcgtacttcttgagtccgtattgtaagcttgcgacagcacaaaattgtatgtccccatcagcatcactggtcctacaaaagcctggagtcccacattgcccatccatgcatgcccccccgtattgacttgcttgaacccctcgtcggtatgcatctctgactgctcgtaggtcacccctacatagggcaacaagctatagttgggctgaatgaatgcataatagaacttggatgcgctattgaattgattcccaaaatgataatcaagcttattggtcgtattcatcttgtacgttgattcgatgttgagtccaaaactcttgtatttgatggtatatattcccgacaggagataatccaaactacctgttcccaattggaaatttcggttgattatctcgtcattgtcttcttcatcgaattttcccaaagggaatttaagtcctgcaccaagaatcaaggaatgattgaggtttctaaaggcttctgtactcgtattcaacacgttgaaataactcaataaaaccggatcaccaatcccagacacgctcacttgctgactgttgccatccatctcgttgaaactgtagggtatgatcccggatacctgccagcgcttgccaatcacatagcgtcccataagctccagcatgttgtatgtgtcatgcgaatactcatcaggcagcgtctcattgtctatataagccctaaactgcgcttggttgtagcgaaccccaataaagtgtgtcggattttgagccaaaatcccaaacgaatacccgcccaattggcacccacagatatcacacgcccatgcgctggacactatgaaggacaggaaaagtacaatgcttagctttctcatggtgcaaaaaataaagggttagacacgaactcttcatcggtcagggtttccaaaaatgctacaatatccgcctgctgctgttcgctgagcggtatacccaaaacgcccgctgattgtagcaatgggtccagcgtggcagacggttgcactccactattgtagtgctccagtaccgcttccaatgtctcgaatcgtccgtcatgcatatagggagctgtcagtgcaacattgcgtaggctcggcactttgaatttggccaaatcttcgtcttgttgggtgatcaagtagcgcccgacatccgtgacttcagcgtctagcccgttgttgcgaaaattgcgatctgtgaatagattgccttcgtggcaagccgcacagttgtcctcaaaaagtgctaatccacgcagcgcagaagcactgagcacttcaccttccaggagataccgatcataactagagttcgccgataccatcatcaccataaactgcgagagtgcgtgcagcatgcgtgcactgttgatctctgtcccctcaccgaatgctgtagcaaacttctgctgatacaaggcactggcctgcattttctcaatgacaactgctatatcctgatccatctccacgggattggcaatcggattgagcgggatgaaatccacatgggtcactcccccatcccaaaagaactcattgacgaaggccaaattgaaaataggcggtgcattgcgtgctccgacctgtgcatcgatcccgatgctgagtctatgctgaggatcagcgaatgccactctctggtcgtggcacgaagcacaagataccgtactgtctcttgacaaaagaggatcgttgaagatgaacttaccgagttcgaatccctcctttgatatcgggttgttgtccaatgtatatgtcgctgctggaaaatgctccggctgtacaaagccaaaaggaagctctcctttatctccgtcacaagccatcaatagccctagcactcccaaaaacaacaccaacttcttactcatcacaaggggttgttgtgtacgtgatcaaaacgaaacatctcggagatgttgtctgcataatctgctcctgtcacggcatcatggatactgttgcgcttcgaaaaatcaaacgccaagcccccatcgatgaactccgctatgtcaatgaccagatgaatctctggtttgtaatctggcgtgatcagtatctcatccatcgctagggttatctctctcacgttgttgggggacttccatccaccgatgtggtagccaaacccatgcggattggtctcttctatcgtatcaccaaaagcctctcctgccgaagcggaggactgtccttcgattttcatcccgatgtatcctgagctccatgcccaaaacatgccatccaaaatgatactggccccttgatctaccccttcttcttcgatccctatcttgaatgatatctgatcgtacacccctggtgtgatctgatctacagtcaaggtctgactgctcagattcgattcatcaatcaagtagtaccccatgacatcatctcctgagatagatagtgggacagcataatgtgccccatcggatccttccaagacgatctcactgacgatgtatttgaccagtgtcaaattgtaagcctgaccgagcgcattggtataggggtaatcctcattgcctggattagccagtagtcctgcctgtatgtctcccacgacattgtcaaatttgatctctacggtacccgtcgtagcaccattgtcctcttcagcacactggctgaagaggacgatagtggataccaaaagcgtataaactgcttttttcattcctttgtgattagtgtgcgtgtgttgcttccgcgtcgttctcgacagtagtcacggcaaaagcactcatcaggttgtttccgatcggttggctggcagctggtgcatgagcactagacaaggtcgtgaagtcaatgtctgtctctcccgtcagggctttcaacacatcagaggtgatcgtcacttcagaagcagacgcactgctgatcatgacgtgtgtatccatgtccaacgtgatggttttgatgttgctaaaatcctccccttcaccgcctaggtggtaagcaagagatgcagcttcactttgtctgccgtgatgctcacttactgccccatgtgctgcagcaccttcgagcttgtatccgatgtagccagagttccagctccacacgtatccattggcctcacttagtgcaccaccttgagcaccctctgagaggtagtccatgctcacaccgagagtaaaagtcacccccgtgtagtgccctacaggtacatccttgagcatgatcatgttgccagagataccatcaaccgtctcttctacaaggtaaaaaccaagcggctcttctgcactatacacgacttcatctatgtaatcttccgtaccttccatgcctgtcagcttgatctctgagatataatacccgagcaaacctacattgaattcttgacccagtgcattggtcaagttgtagtgggtcgaggcgtccgcttcgaagctaagatcctcatctcctgctacattgtcaaacatcagcgtcaccgtaccaggcatgtccatttcgctaccttcgtcctcattgtcacacgcactaaaaaatacaattgcagccagtgcaatcactatattgtaatatttcattatttcgaattgattaaatgtattgataatttcattgagcccaatgactcgggtgggacgatgctagagcctagactttaagaaacaagacattagatctagatgttagactttagacaataactgtagttcaagcccttcgcctgtgacacacagaccatgcagtgtgaccaaaaaccaaactagaaccgtcagccgtgataatcaatctaacaatccttcccacaaacaataaataatcaattcaaccccgaggtggtgtaaaaacctgctgtagataagccgtataattcaagatgctaggcagcacctgatacatgttttggatgagatcgataggcttgtcaaaagcaatcgtctcctgcgcctgactaaagaagaaaggtgcagacttgatgttgattgtttcgttctcctgctcttgttgttcttgcgctgcttgcagttttttggcgaggtagcatttgccatcacagtggagcatgggcttgtctctgttgatacacagcacctcagcgatgtagtcccgacgcatcccaaaatccatatagatcagcggcacagccaacgtactggcgagcgtattgagcgccagcaaatagatcaatatatgtttgacgtgctgcattgccgcaaaaatgaatcagtacaccccaattagcaagtgagacaaggtttttaatttggatttggtcagatcagagtttcaccattttgcgtcgacgcaaatactccacgaccttactgacaggaagtttttcgctcgcaggaccacttcgaatgtaaaatacctcttctcccaccttgggtttcaaataggccgctgcactcgcaggtcgcacctgcacatagaccacctcctgcccatcgataggtttcatgccaaaatcaataaattggaagtaactcggtccaatgtgctctttgatcaggttcttgacatgcagcaaacatttgtccacactggggaatctatccgctgacaaaccgatcacctctccctcatcgttgactcccataaacaacactccgccttggctattgagaaatgccaccacgcctttgagccaagccaattcgatttctttgcctgggttattggagtgcaggttcattcgcactgtacttttaaactctatttgcgacccttcccctttggcgatgaaagccttggcacttgcttcgaaattttgcatgtccaattcgatggttcgattcttcggacgagcccggtacaccagcgcataggctcccatgatacccagcaagatgatcaaagcagagaccgatcctacggtcggaaaattactctccaataccgaaaagaagttgtcctctttggaaaaagaggccagccagatgctatgctgtgtgatgtgcaaaggctgaagccctacccaatacttggacccagaccaatcaaaggactgactttggtagtcaatagagtcattccatgcgcccaacaccttttgaaaatactcatccagttcgctgctcgccacgaaaaactgtggagcacgctccggatcaaaaacctcttcttggtcattgaacaagaagacttcggacttttggttttcgccaaatttggagatcgtcgtaaacaactcctgcaaaggaatatccaccgcggcgactactgtatctccttcgctatcggtccaactgaccacaccactcactccccaccgctgtgtatgatgaaaagaataggcctccgtccagatcggcttcttgcgatgcaagtgcttgagtccctcttcgaaccacaggcgtgtacgcggatcgtatgagagcgtatcttgccaagtatcgacttcctgccctgcactatcgagacgtatccacttgaactcgttttgatcgatgagatggtagcgaaacacccatgaattctgctcctgatacacatagtaggagtagccgtgttggtcggcaatcgagagaccggagagcgctggattctcccgcagcagcgggatcagctgtgcactgagccgcttgggctcgtcgatcaacaatatctcctccttgccccaatctttgagcacagccgcgatgtgctcgatcggtgtataaaatgccgtaaagtgctccaacgaacgttcagaaagttgctggatcgcttccttggccagctctgtacgggcctcctgcaccgataccatcacaaatcccaacaacgaacccaccactaccacgatcagtagcgagagattcaaaaacaatttcctaaagcgtggtttcatacaaatgcgtcaaagtcgcaaatatagaaagatagcccagaccgcagtaaagtctcgatgaaattggtcagcactccggctgatgcattattatttttgatttaccacttttagcattagtttaactgtccgatccattcagcacggatcacagcacatctcgagaaaatcaattattggacaaatcaagcagaaatgcttggagagttggggtataaaaaaagccccacggagtacgcagggctaagaaaaatcttcggcttatagccttattgtgatatgttaacaaattggtattgactaaagtagagtaaataattgatatatgaaaagaacaattggaattgatttgggtactaattcaataggttgggctattagagaagaaaatcaacgactcgaaaatcaaatcataaacaaaggtgttttactattcgacaaaggagtagcctctgacaaaggaaacgaattccctaaagttcaaaaacgtacggaaagtagaggtaaaagacgaaactatcaagcagaaaagtatcgtaaacaccaactcctacaatatttgatcgaacgcgatatgtgtcctctatccatggatgaactagatcagtggagaaaatacagaaaaggggagaaaaggcaatatccacagtctatcaaattcattaactggctcagatttgattttgacggagatggtaaacctgattttcatcttttgaacaaagacaaatacgacagctattatgcatttcgagctctagccatcgacgagcagtttaaggatgtttttgattcaaatcctcacattcttggtcgtgtcctatatcaactagtacaaagaagaggattcaaaggaagagacgaagaagaagcgaaaacgatgctgactggttctaaaaagacaggtacagctggtcgtgatgaaatcgcatcttacattgatacacacaaatcactaggtgctgcgctgtattactaccaaaaagacaaaggggtcaccacacgaattcgtcaacgttacaaccttagaaaagattatgaaaatgagctagcggaaatatgtcgcgttcatgggatcaatgaatctgaccaaaagaaactctggaaatccatcatttggcaaagacctctcaggacgcaaaaaggatcggtaggattatgtacctatgagaaaaataaaagaagagtcagcttaagtcaccctctttaccaagaatttaagacttgggtacttataaataatctaaaaataattgccccagcaggattagaccaatctacatacctcaaaaataacatctatcccctattcataagaaaatcagattttgaaatcactcacattgtgaaacagatagaaaaagacggtggacgcatggactcaaaatatgcttcaaccaagcaacagaagactaaagtagtttcacttagtaacttctatgatttcgaacaactatttggttcagactggaagggtgtcttaaaattcgaaacgagcatacacgatagaccttcacagcaaaccaaacaagtaaaacctgaatatactattgaagatatttggcatgtacttaacacatttgacgataaagaaaaactgatcgaattcgctaccaacaaactaaacttagatcaaaaaagcgcgattcgattctctgaaatcaggttgaatggtggtcatgccacattgagtctctcggctgtcaagagaatccttccatacctcaagcaaggcatcccatacagtagcgcagtatatctcgccaatatgccaaaagttttaggtagtaactccgtatcagctgaccttatccaattctttattgatgaggtatctcttatcaatgaaagggtaagtaatactaaaacattgaatcaaacagtcaatggattaatcaaagaacacatgaacgatgacaatcgttattttatcgacaacaaccgcgaattggatccagaagaacaccaattaattgaagacaaactttcaaataattttggagtcaagacatggacagatttagataaaaaaatgaaagagcaatacagcagctatgttgccgatcattttaagagttttctacaaaaacgcatcacagacaaaaaagacatattcctacctgctccacggtttcaccaagaattgttcaatgcactacaagagaaatatgacataccggatgaaaacataaaacatctctggcacccctcagaacaagaaaaatacagcaatgccaaattgcaccacaaattcagcctacatggcaaaatactgtttattgaagaggatcaaatagaaaaattcacttcaaataatccaaatgcagaaaatgaattgatagcactcaaacttttgggtaacccagaacccatcagtcaaggattcaaaaacccaatggcattaaaaaccttgtatcgtctcaaacaactgatcaattatttactacaaacagatcaaatagacgaagacactaaagtagtcatcgaaatagcgcgagagctgaacgacaacaatatgcgagctgccattcggagatatcaaaatcagagagaacgcgagaacaaaaaatatgcagcacaaatcgaagagatcaaccaagaatgcggaaccacttttgatccaaatgacaaaaaactcctcaataaaatacggctctggaacgaacagaataaacagtgtctctatacaggagctactatccacctatgtgatattctcgacgggaataaatatgactttgaacacacagtccctgctagcatgagctttgattctgagcttaaaaacctaacaattgccaataccacatttaaccgaaacgtgaagaaaaaacggctcccatctcaacttgaaaaccatgaagacattctgcaaagaattgaatttatgaaagagaaagtcgaaaaattagaaagggacctaaagaataaactgagagataccaaaaccttagtagacaaaggaaaaaaggatatggctattcaggatcgccacttgatcaaatttgatctcgactactggaagaaaaaatacgaatcgttcaccattgaagagtacaagccacagtggagaaatagtcagctcagagatacgcaaacaatgaccaaatacgccctgccctatttgaaaacagtatttagaaacgtaaccgtacaaaaaggtagtgttgtcaatgatttcaaatacatatacaaagtcctgttagacgaaaagaaagaccgaaataaacacgctcaccatgcacaagatgcagctattttaaccttgatacctaatgctttccacagagaaaaggttttagaacaatacaatctagccaaagaagaataccgcacatatcatacaagcccaattggatggaataatttcaaagcatcatatatcattgatatagaagatgaagtactcgctaataatctagtcgatgaccgcacactcacacagacatacaaaagagtgagaaaaagaggccgtatagttagagatgagaagggccgatcgaagtggtcaacaggcgacacgatcagaggacaattacactctgagtcattctatggtgccatcaaacaaccattaaaggatgaagatggtaaagtccaatttgacaagaatggtcatatgaagctagaggatgagatcaaaatggtcatcaagcgcaacttaaaatacaaagtcaatcctgatgatgatggttttaaaactttggacgaactcggtaaagtaatggttgacaaagttctttttgaaaaaatcaagaagcaaataggtagcacccctttcagagaagcactcgaaaaaggaatatggatgacagatagacaaagcaatccagtaaataaaattaggcatgtgaggtgcttttttaatgccctgaaacacacttctgctctgcctattcatgagcacacttacgcatcaaataaatcatataaaaataccacatattcaaagaataaaatgaatgcttattgcctttactacgaaggggaatcaaaaggaaaaattgataagtccatagagatcatcagtctattagaattatcaaaactaaatttaacaaattcgcaagagctatacacccttccattataccagtcaaaagagaccaaaaaggggactttgcctttgagaaagattcttaagtcaggagataaattcttgctatacaaaaatcataaacaagaacttcaagaacttaatgtaaaacaattgtctcaacgattatatacggcctacgaatttgaagcagatggtagaatcaagctaagacatcacttactcgctggtgatttgacggtagccaaaaagcaataccctgaagcatctgcattgaattttggctcctatactccactttatagaataagtaaaggaaattggaattttgccatagaaggaattgatttcaatattcaaatcgatggtcaaatcgaattcctattctaatgtactgttcaaatcatcaaaatcggagaataagaataaccacgaacaagccagacctgagaggttttagaaacctctcaggtctaagagataaatcagtaccaaacaaaaaaacagtttcaagcaaaacaacccctacagcccaaaaaacaagtactgacaacaggaaaacaactatctacagacaaaaaacaagtactgacgagcaacaaacgaccctgtgcaatcgacaaacaaccacttacatccaaaaaatgaacgctttcaatcaaaaaacaaccccttgcaagagaaaaaggcctcctgacttctaaaaaacgactatttgcatccaaaaaatgataagaccatacaggcaaaatgagaaaaattggttgtcattttttttaactaaaacaaaagtcatgaatcaaagacaaattaatcaccttgaaatgttccaaaccaccaacgactacctagaaaaacaggcagctgtatggaacgccatccctatcattggcaactacaaaaaccaactcaacaccacgctgttggcaatcaaacagatggctgccgatcaggctgatgcccaagtgtacatcggcaagtcggtcatgggtttcaaaaaaaccatcgcagagaagatggattatctagacgacctgttggaggcctatggagaagatgtcggcaatgccgaactggtctcacaggcccacaactccaaaacagactatatcgcactcccctacgaaaacttcgaaaccaaggtaaagcaggtcattagcctgctcgaatcaaacctaaacgacatgactgactatggactcactgccgaacaaatagaagatgtcaaactcgatttggatcaatttctcacttcacgcggcaaacctcgcgcctatcaagtagccagtcgacaagccacccaaagcctagagtctctctttgatcaaggcaaggaatgtatagaaaaactcgaccgagtactcaagcggtacaaacgtgccaacgccagttttcacaacggatacctctctgcgagcaaagtggtgaatgattgatacactaaatcttaaacatcaacttttccaaagtttgaaactttggaaaagttcaccccaaaaccacaaccaacaccatgcaacccgaaacctactaccatgtctacaatcacgccaacggaagcgaaaacctcttccgctcagacgaaaactatcgttactttctcaggcaatacaaaaaacacatctctcctattgccgacactctttgttattgtctgatgtctaatcactttcattttctattgaaaattaagggacaaaatgaactgtctcaaacttttccaaagtttgagactttggaaaagttaactccacatctaagcaagcaattttccaacctattcagctcttacacgcaagctttaaataaacaactaaatagaaaaggcagcctgttcatgaaaaactacaaaaggaaaaaagttgatgatgaagtctacttgaaaaaattgatacactacatccattataatccagtgcaggcgcaattggtgatcaatatggaagattggaaattctcttcttaccaggcgattgtatccaattccccaacaggtatcctaagagaagaagtcatcgcccatttcgataatctagaaaactttgaatactgtcataaacaccctccccatctcacagggattgaatgaagtagctcagcttgaacttttccaaagtttcaaactttggaaaagttagagaaagtagaaccaaaacaccctaaacccatgatcaaacgaaccctatactttggcaatcccgcctacctcagcaccaaagaccagcagctaatcatacggtttcccgaaggggaaaaagacaacgtgaccatccccatcgaagacatcggcgtagcgatactcgatcactatggcatcacgatctcccagggactgatgcatcgcctgatggaaaacaacgtcgcactcatcagctgcgacgaccgccacctccccactggactccatctcaacctcgccggacacaccctccagtccgaacgcttcgctgcacagacgaccgccaccgaacctaccaaaaaacgtctctggcagcaggtcatctcctccaaaatcaaaaaccaagctgctctactagaagccatctgctacgaccatgacaacatgctccgctgggcgggcaaggtacgctctggtgacccagacaactacgaagcacgagcggcggcctactactggaagcacctcttcgccgcgcacaccgatgacttcaagcgtggacgctacgaggacgagcccaacaacatgctcaactacggctatgccatcctgcgcgccatcaccgcacgatccctcgtcggttcggggctgctcccgacttttgggatccaccaccacaaccgctacaacgcctactgcctcgccgatgacatcatggagccctaccgccccttcgtcgacgaactcgtcctctccatcatggacatggaggacatagacatctatgacctctctcccgatctcaaaaaacacctgctccaactccccgccatcgatgtgatgctgggcaaagaaagacgcccactcatgatcgccatgcaatacacgactgccagcctggcggactgcctgatgggcaaacgagacaagctcaaactccccgagagatgcaaacccatcgcctaaaccaatacagaatcatgtgggtaatggtgttttttgatctcccgaccgataccaaaaaggacagacgcaatgcggccaacttccgaaaaaagttgttgaaagatggatttaggatgtttcagttttcgatctacctgcgccactgccccagtagagaaaacgcagcagtacatatcaaacgtgtcaagatgaacctgcctcccgatggctatgtgggcatcatggtgatcaccgacaaacaattcggtaatatggaactctactttggcaaaaaggaaaaggaattgcctgctgtaccgcagcagctgtccctattttgaccatagcctgaatcaatcgatcaaatagggagggcaatacctccctaaattcggcagacaacttcggcacggattgatcccttgtcctcgctgcgaacgagaacaagggacacaaatcaataaaaaacccgacagacttttgaaaacctgtcgggtttatatagcattttttcaccacccaactccccttaaaacacaacagcacagatagttacgactacctgtgctgttaaaaataccaattcgttagccaatcacaacaggtagaagatctatatgaagtagatggaagctgttaaaaataccaattcgttagccaatcacaaccgggtaagcggccatggattcaattgtatcgctgttaaaaataccaattcgttagccaatcacaacacggcaacgtgttagtagtccctgcaacaggctgttaaaaataccaattcgttagccaatcacaacatggaaatgtcttagtagtccctgcaacaggctgttaaaaataccaattcgttagccaatcacaactgttgaccattcgcaccctcggctattccagctgttaaaaataccaattcgttagccaatcacaacgaaaccatgctagaagaaattatcaactccgctgttaaaaataccaattcgttagccaatcacaactaatagctaagtatttctcgggtatgaaaagctgttaaaaataccaattcgttagccaatcacaaccgcactcggggttttttacccacatctcaagctgttaaaaataccaattcgttagccaatcacaacagattctcagtgattttcacctctattttggctgttaaaaataccaattcgttagccaatcacaacctaccatcaggtagtcatgaaagaagaaaagctgttaaaaataccaattcgttagccaatcacaactatgcaagttgtcattcgcttctaagatcgctgttaaaaataccaattcgttagccaatcacaaccggtcatacgctcctagcttgagcatgatgctgttaaaaataccaattcgttagccaatcacaactgtccagccctagatgccaagtctgacggtgctgttaaaaataccaattcgttagccaatcacaactcattatagatgctgagcagctcaataagagctgttaaaaataccaattcgttagccaatcacaacaatgatacagtatcaatacatggaaactccgctgttaaaaataccaattcgttagccaatcacaacaccagagactggatgtgatcctgtgtacctgctgttaaaaataccaattcgttagccaatcacaactatgaaaatgcgatgtcatatttggttcaggctgttaaaaataccaattcgttagccaatcacaaccataagaaacgacaaaaagaactctttccagctgttaaaaataccaattcgttagccaatcacaacttgatcacataagccttgatcagtctttgcgctgttaaaaataccaattcgttagccaatcacaacagcgatcgcagacgaagttcagtcgcgggggctgttaaaaataccaattcgttagccaatcacaactgctctgtgatcatgtcattattcttttttgctgttaaaaataccaattcgttagccaatcacaactgtcgcagcaacagaagagccgaatggacagctgttaaaaataccaattcgttagccaatcacaactgtgctgctttgttgtacttcaaggtcgtggctgttaaaaataccaattcgttagccaatcacaactgacggggtttccttaaactgctcactgcgctgttaaaaataccaattcgttagccaatcacaactttctctcttgatgtattcttattctcttagctgttaaaaataccaattcgttagccaatcacaacccaagagtggaagaatagcatttctacctgctgttaaaaataccaattcgttagccaatcacaaccgtcaagcaattggaactgaatgtgaacggctgttaaaaataccaattcgttagccaatcacaaccgccacagcatgttatcgtcttgatcgcccgctgttaaaaataccaattcgttagccaatcacaaccggtcatacgctcctagcttgagcatgatgctgttaaaaataccaattcgttagccaatcacaactcagatgtgcaaaatcatccgtgaacctatgctgttaaaaataccaattcgttagccaatcacaacagctcaagcaagtgctagaaatcgagccctgctgttaaaaataccaattcgttagccaatcacaactttagatgcctcacaatggaacgacttgcagctgttaaaaataccaattcgttagccaatcacaacccgcgtggttggacccgaatagtacggagcgctgttaaaaataccaattcgttagccaatcacaactcaagtgcatgatagtttgactactgacatgctgttaaaaataccaatctgttagccaatcacaaccctggcagggaaatgatgagaataggataagctgttaaaaataccaattcgttagccaatcacaaccaatgagtacaaagtattacaaagggcagttaaaacaccccatacatttgttcatcgcaagatatctcttctccgatcttatcctgaagttcacctagcaaattctgcagttcaccgaaactcacttgaagacgtgagcaaaagcctctatccttgtcttgtaattgatgaaaacaacaagcgagtaatcaatcacagagctgaaaagctccactgaaatagaatagtaatttagtctttcataatcatgcttaagctgctgatccggacgggatgagcagcttttctttttataggctattgacaaatcctattggcccttacggatcacgccgtatttctggggcattgatccaagatcacttcgaaattcaacagtcatggttcgacattcatcattacttttttgctaaacaaccacctactatgagtctttgaaccaatgtatacacaatggaaagcatgaatatccaatgcgccatgtcgaatattgatttggattcctctatttacggactcatccgttggtactggaggccgacattttacaatatactcgattgaccctttcgttggtttcggatcagaatcacaccccatgcgatcaatacgcccgaactggccatcgcagcaccgacgagatcggcagaggtcaatccatagcccaaagcaatgggtaagcctgcaaagtaggcaccactggcattgcccatattgaatgcgctttggttgagcgaggagcctaggatttctgaacctttggcggtattgatcatcaccatctggatgggagtccccactgtgaaagccactacaccaatcacaaaagtcatcaccagtacccaggtaggatcatgtgccaggaaggtattgatcaccaagagcagagccatcgtggcgaagctcacgatcaccgagtgaatcggcgacaggtaatcgatcatcttggctcctagtatgttgccaagtaccatacccaaacctgccaaggtcatggcatagctcactacatgatctgggtgacctgccacttcggtaatcaggggtgcgatgtagctataccaggcaaatagtcctccagtccctactgtggtgagcatgatcactgcccatagttcggggtttcgaaacagcttgatatcctgcgcaaaacccgcagcagaggacttgggcaacggtggcatccaggctttgatactggccaaagccaacaagcctacacctcccgtaatcatgaaagcaagactccaatggaaatgatgcccgaggtaggtgccgatgggtacaccgatgacattggccactgtgagaccgccaaacatcatggcaatggctcgtgcagacttgcccggcttgcacacttgtcctgccaccacagcgccaattccaaaaaaggccccatgaggcatccctgacaaaaagcgcgtgaccagcagtaccgcgtagctctccgaaaaggcagacagcgtattgaataccgtaaaccaaatcatgaggagcatcagcaccacatgcgaaggccagcgccctcctattgccgaaaacaacggagcgcctaccaccaccccgagggcatatgccgctataaaatgtcccgcttcgggaatcgtcaagtccaaggctgtggccacatctggcaagatccccatcatcacaaattcggtcattccaatcccaaaccctcctatcgctagggccaacaatgctttgttcatatttcttccattcagggtacaagattagaggattgcttgcacataatcaccattcagaccctatacgattcgctgtgatttgacagtgctttacctcaggtgtgatttccccacctggacgctattgcacacaaaaaaaccggccaatgaccggtttttttgtgtgcttgcttcctgtatcagggtttcgctacgatatccaacttgatcgtgatgtcatctgacaaaatcatgtcttccatatagtgtacccagctcacctcatagtcctgacggtcaaataccaagtcagccgaagcggtcaatccttctggagtagctgtcaaagaagtgatggtggctgtttcttctttggtgatccctctcacagtcaaatcacctgtcaaggtgttgccactgtgcgatttgatcacgaaggtagaggtcgggttttcttcgaccatgaagaagtcctcggtagacaaatgcgccaccaagtcagaggcagggtgctcttccgaataagaagccgaatccaaaggctgaatggtggtcatgtcgatgaccactgtacctcctacgatcgaatccccaacagtgctcactgtaccttcagcgataccgatcaagccgttgtggccatatacgcctgctacttcgccagaccaattcactgtagaggcactttgatccacggtgtatgtcatggccttggcctcagaggccaccgcatcggtagtggcttcttctgtcgtacttttctttcctccacaagcagtcagaatggctgccgagaggatagtcatcatcaatgtatttctcgtattcatggtaatagtttttgtttgctttaaagctaacaaataactacaggaataaatatatgtcacaacatgcaattgaagaaatatacagcgatcagtcgaaaaccaccctgcacaagacacctactccataggctgggctactacgacaccacaggccacccgctctcccgctgcaccagagggttgtgaggaaaaatcatctgcccctgcatggaggatcacggctcggtctacgatattgctccggtctgcgccaccgatggtccagccttgtatgctcagcgtcagtgccgcttgaccttgtgcgttggcaactagattcgcgacatccccttgatgaaagacatcgctcccgcgctgaccgtgagggctatctgtcgggttccaatgcccccctgctgattgggcatctgtggcgctacagtccccattttcgtgcagatggagtgcgtgtttgcctgggctaaggttgctcaccttgacctgcatttcgaccgtgcgcgcacccgtctgaacaaaaagcacctccccctctacttcgctaccactcgcactgtagaggatggcttgggcctgtgtgggtgccgcgggtgactccaagacttccacatgctctttcgtcactatttgatccttgctctgtaggtcgcgttgctctttgttgggggattgacagctgagcaccactagggatacgcacatgagcccacacaaagcccctctcttggttctgctactcgtttgattcaaatgtttcatggtttgattgttttgatgtatctacctctagggttgaaataactataccaacatacaaaatcctccctgaccgcctcaaatccactgtatggccgtgacaccagccccaccactgtagaaaccaatacacacattgtgcaaaacgaataccaccccaaaagacatgtacgcaacaaaaaaaggcgaccctttcggatcgccttttacaaaatgccggcatgacttgccgtggtataggggttattgtttgatcacagcatgagtatatgtcccttgtgtggtgtacacacggaccaaataatgtccacgttgtaaatgactcacatctaccccttcgaagtgctcactgacgcggtgaaccaagactcccgtcaaactatagatttgcacctcctgtatctcatccgaagaagcgatcgtcagttgctctacagcaggattaggatagacagcaagcgtggggcgttgctcctccagatcatcgatccctagagtacgtgccgacgagacatcatacgatacgctcatgtaatagaggttgcccgtatcgtccttggtcagttcgtaagtacccgcaggtagtgccaaactcaacaccccagaagtgactccatggctggtaccgttgactttgatctcgtcttggaagctgtcgttgaaaactaaggtcaatgtagctgccgcttcggtctcgaaagcaatcgacgtgctggactcgattttgaggcattgcgtcagggtgagcccctcataatacactgtccccttagaagtggagaggttgcccgtgatgctaaagaaatcactactcattcctgactcagtaaagttgtgaatctcatcgcctggcgcctctacagctatttccacgaatgtggccgtcacgttcttgtcggcatccatcacgacagtagccgtggtacccgtgtatccaccactccagctatcgaatacccagccactggcaggagtcgccgtgaccgtcacagcagtcccttctgcatacacacctgcacctgatactgtgcctgagccattgaccgtagttgtcaaagtgtacgagttagggacaaccaccgcgttgcagtctgcagctgctacaccgtcaccagatacagtgatgtagtcgatgttgcccaa

SEQ ID NO: 312 - DNA, 24116 bp, synthetic construct
  source 1..24116: mol_type = other DNA
  misc_feature 1..24116: note = Synthetic
aattgaacaagttcagatttcaataattaatgatatcattgaaaaacttgaaagaaataaaaatgaaacaatttctgaaaaaggattatggttaaaggaatatataaactttaaaataccctcgacaccttttcaatatattagatttagaaaataataacgcttgctagctcaagcaaaatactcactcaaacgtaacaaaacgctaaacaaaaaaaaatcccgaagcctaaacttcgggattttctattttaaaaaactttttttatttcaattcaaaactcacagaaacatttgccgttacttcgatctcccctatcgctaaggtttctctcggtgctgcatcggccatttctgctactgcataggttttatacatcggtctcgggtaattaacctgtgagttatcgctaatttgtaacgccttgcccactttttgtcctaaaaccgaaacatagtcttccgctttctttttcgcgtccagcatggctttaacacgcgcttctgactcgtattgctctaacgtagacgatttgaattccactccctgaatgttgttcactccggcatcgaccaaactcattagtaaagcatcgtattttttcagatcttttaagtgtatgctgatggtttgattggcataataactgtatttcttctggttgtaatcgtaattcttgcgcaaggacacattctgtgtctggtaatcgcttgccgggattccgtttttcttaatggctttgatgatggcatcaaccgtctcatcgtttttcttttttacctctgtggcatcttttcctgtattttcaacgcctaaagtaataaccgcctgatccggtactactttaattttaccttctccgctcactgagatctgaggaacaggttcctgaatttgattttgggccatcatagctgttgttgcaaatgttaaaatcagaactaattttttcatactatattttgtttttcagataatttatccaattgtcgtgccaaaatcttacaacttattgtttttgtacaaataaaaaagcagcagaataggtattgttaacaagatcagcattttagtattggtcactaacatcgacggatctttgagtaaagtcatcagatacccggcgatcgctcctccgaaatgcgccgtatgaccgatattatcatttttagcacgcattccgtagatcgagtacagcaaataacctattccgaaaagataccccggaataggaatgaaaaaatacaacgctaaggtcatttccggatacaagagtatggaactgtaaataattccggttactgctccggaagcccctacggctctataataatagtcgtctttgtgcaaatacaacgtcagcaagtttccggcaactaaacttccgaaataaatatacaggaaatacatgttgcccaaagtatgagaaacaaccggcgcaaaaaagtacaaggtcagcatattaaatgcgaggtgcataatatcgacgtgcaaaaagccgctggtcaatatcctgatctgttcgcctgctttaacagagccaacatggaactcgtatttcctgaaaaaagccatgtcgttaaagcctttaaagcttaccaaaacattaattccgattatagtcagtaagaaaatatccattgatttgtttttcggtaaaattactaatagttaatttattttaaaactactttaaaaaaagtatttttgtaaaaagtttttaataaatgcagcgtattgcctattactttgcttacccgatattatggatagtatctatacttccgttccctatattctattttgtttccgattgtataaaggtcatcatttacaacattatcggttatcgtaaaaaaacggtcagatctaatattgaactggcttttccgaacttaagtaaaaaagaacgattagccatcgaaaaaaaatcgtaccgccatttatgcgatatgtttatggaaatggtcaaaaccatgactatttctaaaaaagagattcaaaagcgttttaggtttaccaatctggatctgttcgaagaatacgaagataaaggcaaaagtatcattctgttctatgcccattacgccagttgggaatggtccgttaccttaggaacttacatacggtttaaaggattcggcatctacaaaagaatcaagaacccgtactttgaccatttaatgagaagtatccgttcgcggttcgacgctactttactggataccaaacacacggtaaaagaagtgactgaaaaccaaaacaaaggaattctgggcgtttacggatttatcagtgaccaaacgccgggcggtagtagcagagccaaatattgggatacctttctggggcatgaagtaccgatccataccggaggtgaaatgctggcaagacatctggatatgaatgttctttatatgaaagtaaagaaaataaaacgcggttactacgaggccacttttatcccgataacggataacaatattgaaaccttaccggaatttgaagtaagcagacgttttatccgagaagtggaaaaacagatctatgaagctccggaatattatttctggactcacaaacgttggaaattcaaacgaaataagaagaaaaaataaggcttttcaatctcattaattttaccccagatttatactgatctgttttttataaagtaaaccaatcttctatcgttttatggatcgtatcctgagcgtttttatgggtaaattcatttgttttactagaatatgaatactctttagcccattctttatgattttcggctaaggcaataatactatcacacacatactcgatctctgcatttgtcgttgtaggatggatcgacatacggatccaacccggtttatgttccagatctccggctgagatctgacatacgatagtatgagaggtttcctgatccacatgcaacaaataatgtccgtaagttccggcgcaactgcaacctccgcgagtttgtataccaaatcggtcattgagtaattttacgcctaaattatagtgcagctcgtcaatatagaacgataatacccctaatcggtcctgatgctgcggcgccaagatattgatattcggaatatcttgtaaacgatcgaaaatataagcgaccaattcgtgttcgcgttccaaaatatggtccactcccattttatcttttaactctatcgctaaagccgttttaatcacttgtaaaaacccggagtaccaccatcttccctatcttcaatgctgtcaatatattggtgttcgcccacggattcgtccattttactgttcctccgcccggacaatccggtacgttatttttatacagatttttattaaagaccattactccgcaagttcccgggcctcccaaaaatttatgcggggaaaagaaaatagcgtccagatacgattcctgatcttccggatgcatgttgatctccacataaggtccggaacaggcaaaatcaacaaaacacacaccgttgtattggtgcattaacttagcaacttcgtaataaggtgtcttaattcctgtaacattggaacacgaagtaatggaagcgatcttaaaacttctgtctttatatttttctaataattgtttgaaattctctaagcaaaaaagcccttcatcatttgccggtaccaccaccacatcagcaatcgtttctatccaggaagtttgattggaatggtgctccatgtgagaaataaacacaataggctttactgcctgaggaatatgtgcaaactctttcaggttttcaggaacacgcaagcctagtattcgttgcaacttatttaccactccggtcattcccgttccgtgcgtgattaaaacatcatcttctgaagcattaacatgttctttaatgatatgacgtgctttatgataggctaaggtcattgcagttcctgtaatagaagtctcggtatgcgtattggcaacaaacggaccgaaatcgtgcaacattttctcttctataggtctatacaaacgtccgctagctgtccaatccgtataaatgattttctttgtaccgaaaggagaggtaaaagtttgatctattccgacaatttcttttcgaaatgtatcaaaatacgtttccagttgcgattgcgttgttgttgccatttgtataaaaatttgtcttcaaagatacatttttttaaagattccaaagggatcctgaagccaattttgtaactttgacaaaaagctatgcaacttcctgttaccactattttcacagaaaagcttcctgccgatcctgaaacgagcaatgaaatccgtcaggtttatgaagctatgttctcttatgtgactcctaaagttcctttgcatcctaaattagttcatgcgtcagcagaggtggctcaattgatcgggctatcggagcaatcaatcagttcggatgattttatagctgtcttttcaggaaaaaaagttttagaaggcactaaaccttttgccatgtgttatggcggacaccagttcggaaactgggcaggacagttaggcgatggcagggcgattaatctgtttgaagtccaaaatcaaggacaaaacctgatggtacaacttaaaggtgccggaaaaacaccttattcccgcagaggagacggtttggctgtattgcgttcttctatccgtgaacatttatgcagtgaagccatgtatcatttaggtgttcctaccacccgatcactcagtgttatggaaaccggtgaaaaggtattgcgtgatattttatacaacggtaatgcggcttacgaaaaaggagctgtcgtttgtcgtgtagcacccagttttatacgttttggaaattttgaaattttcgctgcccgacaggatgttaaaaaccttaaactactagctgatttttgtatcgagacctatttcccgtcaattacaacaaccggaaaagagagatacattgctttttttcaggaaatcgcaacacaaacaaaagaattgctgatccattggcagcgtgtaggttttgttcatggcgttatgaacactgataatatgtcgatccatggcattacaatagattatggtccttatggatggctggaaggttacgatccgcattggacacctaatacgacagatgctcagggcaaacgttatcgttttggtaaccaaccccatattgctttatggaatttactgcaattggcaaatgctctgtatccgctgatagaagaaacgcaagctttggaacgaattttggaacaattcaatactgattttcaatcggattttaacgccatgatgttaaataaattaggcattacgaagcgccataaagagaatgagaacctaattcatcaattgttgatcaccctccaggaaacggaaaccgatatgactattttttatcgtttactagctcgtatttctaaaaatgattcggaaagtgaagctttacaaaaaataaaacctgccttttatcaggaagcagaaataaaagattccgtgcaagaaacgtggtatttctggttgtctttatacctcaacagtttaaagcaggaaactgttgctgatgctgaacgcaagcgcagcatggatctggtaaatcctaaatatgttttacgcaattatatggcacaactggccattgaagcggctgaaaaagaggattattcattagtcgatgaattagccgaacttttaaaacgtccgtatgacgaacaaccggaatatgaaaaatggtttgctaaacgaccggattgggcacgaactaaaataggttgctctatgttgagttgtagttcgtaatttcagaatgaatctgctaaatttggcataactcttgtaaataattctatataaacttaaaaaaacaaacacgatgaaacccctaaaatcgaataccgtattagtgctactaactttagtttttgctgtgttcttcacacaagatatcttttctcagggtccgccaccttgggctccggcacatggttatcgtgctaaaacgagacatatttattttcctgagcaaaacatgtattatgatctgcaaaaaggagtttatatctattatgacaatggaaactggcaggttaatgtaaatttacctactattttcggttctgttaatttggggactacccgacaagtacaattagattattatggaaatgatccgcaacaatacaatgctgatcatgtttctaaatataaacccggaaaaaaagctaaaaagaaatcaaaaaagaaaaagaaaaaataagcgaaaaggtcttgttttgagaaccttatcattatttttatcttcatgatcgtattgctttcgggtaaaaagatcgttaccagccgatttttaaagaattttgaagaaagtttaaaagaacattcaccgtttttcagatgtcataaatcgtatatcattaatacggaatacattgtaagttacagtaaatctgacggcggaacggttactttacaaaaccagattgaaattccggtctccggaaataaagtggaagaattattagccttgtttatccgagtgatcagataacaaagatgagatagcctaacaatgagccaagaaccccatataaaacgatcaacagaatttctaagcgatattcctgtagttttcttttcataacttttttatcaaatataataattattataagacaatatgaactataagtttatgaaaagcacgtatgagtttatgaaagagccaaatggatagcttaaataaaaaaaccacctgcaagcaggtggtttttttgtatcgctaattttaagaattattctacattttcaacattagcttctgctatttgtttgtatgtgccgttcgttaatttttcgcgaatagcttcaaatgctgctaaagtttcttcaatatcttgtaaagaatgtgaagctgtagggatcatacgcaacaagatgattcctttagggattaccggatagacaacaattgacaagaaaataccataattttcacgtaaatcgtttaccattaccatggcttccggaatagatccttctaaatatacaggagtaacacaagtattggtatctccgatattaaaacctctttcttttaagccgttttgtaaagcatctacattttcccataattttgctttcaattccggcatcgtacgcaacatttccaaacgcttcaatgctccgatcgtctggatcataggcaatgacttagcaaacatttgcgaacgtaaattgtatttcaggtaatcaatgatgtctttgtctccggcaataaacgcaccgatactggccattgatttagcaaaagttgaaaagtacacatcaattccgtcctgacaaccttgctcctcccctgctccggcaccagtttttcctaatgtaccgaaaccgtgtgcatcatctaccaataaacggaaattatacttttcttttaaagctacaatttcttttaatttaccttgctgaccacgcattccgaaaacaccttccgtgatgaataaaattcctcctccggtctcttcagccattttagttgcacgttgtaaatttttctcgatgctttccatatcattgtgtttgtacgtaaaacgtttgcccatgtgcaaacgtaccccgtcaatgatacaagcatgtgaatctacatcgtatacgatcacatcgttcttagttaccaaagcatcaatggtagataccattccctgataaccgaagtttaataagtaagccgcttcttttcctacgaattcggctaattcgttttgtaattgttcgtgaatagttgtatgaccactcatcattcgggctcccatagggtaagccgccccccagtctgcagctgcctgagcatctgctttacgaacttcaggatggttagccaatcctaaatagtcattcaaactccaatttaaaatctcttttccgtgaaacttcatgtggggtcctaactcaccttctaacttagggaacacataatatccttctgcttgtgaagcccactttcctaaaggacctttattttgttgaattctttcaaataaatctttcaccatgatctgaatcggtattaaaaaatcgggacaaaagtaactatttctacctaacttttatacaattatgggtattttttaatccccgtgtattttctttttcctgacattctgaaattttgtgctgctttttattaggattttcttaaaaacatcccaacctaactctccgtaatttgctttattcatttcctgactcattttatttgcaacaacctctttgacagttctatatcttcttcttttccggtatgcttctgaggctcatctgatagttttattaccccggtccatcttttctcttcaggcaatgctttaatcatcttgatcacgatattcataggctgtaacccgacatcattggttaaactggttcctattccgaaagaaagtccgatctttcctttaaaatgactggcgatccgttctaccttttcataattaagtccgtctgaaaaaataatggtcttggtcaacggattaattcctaattttttataatgtgctattgttttttctccgaattctatagcatcaccggaatcatgccgaacgccgtcaaatagtttggcaaactttttatcgaactggtcaaagaaaacttcagtggtgaatgtatcggtcaacgcaattcccagatcgccgcgataaacatccacccaatgctcaagccccatgacatttgccatcttgtatccgtatttagcggcatgaaacataaaccattcgtgggcatgtgtcccgattggttttgtatcgtatttcatggccaaatacacattgcttgtcccgatgaaagttccttttcctttttcctgtaatgttctcaccactaagtcctgcactgccaaagaatggcgccgtcgggttccgaaatcagcaaactgaatacctaattctttgtattttttcactttcgtttgtaccttttcgatgactttaacatcattctcccgctcctgacccgtcaattgatagtacaattcgctgatgagagccataacagggacttcccacaagatcgttctgtaccaatagccttcaataatgaccgacacatcggttccgttttgttcaacaaccacttccgcaggatcgtatcggtagccctgaagaaagtcaaggtatgtaggatctaaataagggcaggtctcctgtaaaaaatctttttccttctgactcaattgcagatcagccatctggtcaatagcctgtcgtaaatgaatagcaaatttttcaggaaagggatgttctccccgattgataaaacggtattgggctttagcatacggaaatagtttgataaccgcattctgcatggtaaatttatagaaatcattatcgagtatagaaggtgaaaccgcagtcttgaaactcatgtttttgttttaaaaatacaaataaatcgccaaacacctatttgttttttaataatgacccggaaactgctttaaaataaaaaagcccgaagatagtcgaggcgctagatgttttaattaaattctatacaaaaataacaaattaaaaatctttttgtggttttccgtaaaacggataaaagaaatattattaatttgcaacaaaaccttttttaaggtttattcttacgtggaaaaaaattagtattttagatttatgttaaaaaaaatcccacggagtacgcaggatttaagatttttcttcggcttatagccttattgtgaattgctttcaatttagcaaatataaaaaaaacaatccacaatacatatattacttaaaataatttaactataagtaaaatatgtaaaaaaggctaaacataattgtcaaaaagaggttttggaagcctattttaatattgagtgcacacaatacttttacctttcaatggtaaagatataaaatattttttgatgtaatatatgtaaaccctaaaattgtatattttaaaaaaaataatttaatatgactaaaataatcggaattgatgcaggttcaaatagtttaggttgggctatcagagatacagatataaaagataatcaaattattgattacggcgttttaacttttgacaaaggtgtcgcttccgaaaaaggaaatgaattcccaaaagttcagaaaagaactgaaagtcgtggaaaaagaagaaattatcaggcagaaaagtatagaaaatatgaacttttagaatttcttattggaaaaaacatgtgtcctttgactattgaggaattagacaaatggagaaaatactcaaaaggtaaaaaaagacaatatcctcagtctgaaaaattcattcaatggttaagatttgattttgatgaagatggaaaacctgattttcatctattaggcaaagataaagatgaaagttattacgcttttagggcttatgctattgatgaagtctataaaaatgtttatcagagtaatccttatgttttgggaagaatattttatcaattggtacaacggagaggttttagaggaagagatgaggaagaggcaaaaacaatgcttcaaggaagtgagaaaacaggcacaaaaggaagaaacgatattgctaattatatagaagaatataaaactttaggttccgcactttatcattatcaaaaagagaacggaggaagaattcgccaacgatataatttaagaaaagattacgaagaggaactgaaagaaatctgcaaaatacaagagctttcggattcggattctcagaaattgtggaaagccataatttggcaacgacctttgcgaactcaaaagggtctggtaggaaactgtatttatgaaaaaaataaaaagcgtgttgctgtaagccatccgatttatgaagaatacagaacgtggacttttatcaataatttaaagattgaaccacctgtcggaacagatagagaaacttatttgaaagaaaaaatttatcctttgttttataagtcgtctaacgattttgagtttaagacgattctcaatcaggttaaaaaagacagggcgacgatcctttcaaagtttggagaaaaaacaaaagtaatttcagctaaacttttaaaatcttttcaggatttattaggagatgattggaaagaaaaatacaattggaattcaataagccaaagagactctcaaccaaaaaagaaaatagaaaatggttatacttttgaagatatatggcacgttctcaatacttttgacggacaggaaaatttaaaaacctttgctctcgaaaaattaaaattagacgaagaaaaagcagaaaaattttcaaaaataaaacttaataaagggtatgcaacattgagtttatccgctatcaaaaagattttaccttttttacaaaaaggatttttgtatagtcaggcagtttatttggctaatttgtataaagttttgggagctgataaaattacagacgatttaataaattattttgcggaagaagtaaaagtaattttagaaacaaacagagaggaaaaaacgctaaataacatcataaatagtcttattcaagatgaattaaatgaagaaaatcgttactctattgaaattgaccgagaattagataatgaagaattaagacaaattcaaacgaaaattattgatgtatttggagaaaaaacatggaatgaatttaaaggcgaaaagaaatcacacattttaaattatgtttcaactaattttaaagcatttttaaagaaatccgttttatcgaaacacaatgtttttatagaacaaccacgactacacgaccaaatatttgcattgattcaggaaaaatatcagattccaatcgatcgaaaaaaatatttatggcatccatcagaacaggaatcgtatgttccagcctctgaatatgcttattttactttaaataacaaagatatttatatcaaagaagaggaaaaacagacttttatcaggaaaaatccaaatgcggattttcagggaaaaagtttgaaacttctgggaagtcctgaaccgattagtaaagggtttaaaaacccgatggctttaaaatctttgtacaaactcaaacatttactcaattatcttttacagacagaaaaaattgacgaagatacccgtgttgttattgaaatcgcacgagaattaaatgataccaataaaagaaaagctattgaaaggtggaataatgatagagaaaaagagaacgaaggatttaaaaagataattcgggaaatcaacgaagaatgtggaacaaactatgacgaaaacgataaaacattaattcgtaagataagactttggaaagagcaaaacggaatatgcttatatacaggtgcaacgattaaaaattgtgatttgtttaatggttctaaatatgatattgaacatacgattcctgcaagtatcagctttgacagtgaattgaaaaatctcacgttagcagatacaaacttcaatcgaaatgtaaagaaaaaaatgtttccaacacaactttcaaattatgaagaaataaaacaaagattgaaatttatggaagagaaggtggggaatttggaagaattattcaaagaatggaaaaacaaagcttcgtatgcatctacaaaagatgttaaagatgcttgtattcagcgttatcacttgataaaaatggatttggattattggagagccaaattacacacattcacattagaagaatataaaacaggttggaaaaacagtcagttacgggatacgcaaatcgtaaccaaatacgctttaccttatttaaaaacagtttttagaagagtttcggtagaaaaaggttctgttgtaaatacttttaaggaaatttatgatgtaaaattaaaaaacgagaaaaaagaccgaagcgtacacagtcatcacgctattgatgcggctgttctaacgcttattccgccacattatgacagagataaaatacttttaaaatacaatgaggaaaaagacataaaaacagggaaaatataccacgaaaaaccaaaatattggaaagatttttctgcatcaaaaatcttaaaaattgaaaatgagatatttataaacaatctttcagaaaacaatacaaccatcccgacatttaaagctgtccgtaaaaaaggaaaaatcgtttggattgataagacaaacaatatcaaaaagattgcacagggagatactattcgtgggcaattacacggagaatctttatacggagcaataaaacttcctaaaagaaatgagcataatcaaattctatttgataaaaacaaaaagatgattttggaagaagaaccaattttagttatccgaaaagaattagcgtacaaaaaagatgcaaattctccgggatttaaaactttagaagaaatcgaaaaagtaattgtggacaaagatttatttcaaatgattaaaaaacaaattgaagaagctactgatttcaaaacagcccttattgacggagtttatatgttggataaaaaaggaaataaagtcaataaaatccgtagaattcgttgtaaagaaacattgaaatttgacacagccgtgaaagttcatacacaaacatttcagtcaaacaaagagtataaacgatatacattagccaaaaacggagagaatacactttgtcttttctacaaaaatcaatcaggcaaggcaatgaatattctttctatcggacaagttgccgaatcaaaaatcaggaatgataaaagatattttgaagagcctttttacaatcaaacagaaatcggaaaagggaaaaataaaactacaattcctttatatgcagttttaagaacaggacaaaaagttttgttttataaagactcaatggaagaactgaaagaaatttcaagagaagatttatcaaaaagactatttaaaatttatcaatttgaaagtgatggtagaattaaatttagacatcatttggtggcaggcattgatacagaattaaagaaagagaacaaagaatactcatcttttaatatagaggaaaattctgtatttttaagattaacacaaacacaatggaattttgctattgacggagttgattttgaaataaaattagatggaagtatagaatttaaacattaaccaatgatcaaacgaaccctctttttcggtaacccggcctatctcagtaccaaaaacgaacaattagtggtcaactatcccgatgaggaacaagctactaaaaccgttcctattgaagacatcggggttatcgttatggaaaaccaacagattaccgtgaccaacggactgctggaaaaactcacctataataatgtggcacttatcaattgtaatcagcagcatttgcccatcggcttactgatgccgttaaacggtcatagcgaacaatcggaacgctttcgcacgcaaatcggagcttccttgcctttaaaaaagaatttgtggcagcaaacggtttctgctaaaatactgaatcaggcaggcattttacaggaaaaaggaatccctgttaaaaacatgcaacattgggcaaaaaatgtaacttcgggagatacacagaaccacgaagcccgggcagccgcttattactggcaaaatttgtttcctatagaaggctttaaccgccagcaaaacggtatacctcccaacaatctgttgaattacggttatgctattttaagaggaattacagcccgtgccttggtaagctccggaatgcaccctactttcgggatcttccaccgcaacaaatacaacgcctattgcctggcagatgatattatggaaccctaccgtccgtatgttgattggatcgtaacggatatcgtgaaccaacaaggcataccggagcaactgaccactgagttcaaaaaacaattattggggatcattactatagatgtaaaactggacggtaaacgaagtccgctgatggtagctatgagccgaacgacgaattcactttacgaatgtttcagtggttcggcgcgaaaaattttatatccggaatatgtatgaagaccgtttttcaagacttaatcaataccgtagtttgtggatcttagttttttttgatttgcccacagagaccaaaaaagaccggcaaattgcaacccgtttccgaaaacatcttttagatgacggatttgccatgttccaattttcaatttatatgcgtttttgtgccagcaaagagaatgccgatgtacatgtcaaacgtttaaagaaccatttgccgccacacggaaaaataggttttatgcaggtcactgacaaacaattcgggatgatggaaattttttacggcaaaaaatcggtagagccggatcaacccaaccaacaattagagctattttagaattaaaaaagataaaatccaaactactgactcccagaaaatcaggcttcttttttatttccaaaaaccactataactcacaacataccaacactttaacaaggggtatgctgtaaatcatagtaaaattagaacttttgaaagcaattcacaacatgagaactttacatttgataggcgatggtgctgtaaatcatagtaaaattagaacttttgaaagcaattcacaaccctaaagctaataaagcactttcagccattgctgtaaatcatagtaaaattagaacttttgaaagcaattcacaacaagatcaaataatttcttctttaactctatgctgtaaatcatagtaaaattagaacttttgaaagcaattcacaacaaatacagtacagctttaagtaattccttagctgtaaatcatagtaaaattagaacttttgaaagcaattcacaacagcggtactataatctataaagattggacagctgtaaatcatagtaaaattagaacttttgaaagcaattcacaactgtttataatacatctgttcaagtaggttagctgtaaatcatagtaaaattagaacttttgaaagcaattcacaactttatcaactaacgttgaatgtttccaagagctgtaaatcatagtaaaattagaacttttgaaagcaattcacaactgaagatgaattggaagaattatgcgagaagctgtaaatcatagtaaaattagaacttttgaaagcaattcacaacacacaatcgattgattgaaagacaaagaatgctgtaaatcatagtaaaattagaacttttgaaagcaattcacaactacaagtttaaaaatgctgttgggatgggagctgtaaatcatagtaaaattagaacttttgaaagcaattcacaactagtacaaggtgcattcaatgctgttatgggctgtaaatcatagtaaaattagaacttttgaaagcaattcacaacggattggttaccttatcttgacaaagatatgctgtaaatcatagtaaaattagaacttttgaaagcaattcacaacatggtcggttatacgccacaaaacggtgatgctgtaaatcatagtaaaattagaacttttgaaagcaattcacaacaatgctttttgaataacttcaacaatatcagctgtaaatcatagtaaaattagaacttttgaaagcaattcacaacaagaacctctataggtgtctgcaaatgtttgctgtaaatcatagtaaaattagaacttttgaaagcaattcacaaccataatgaacaaatccgggatataatcccagctgtaaatcatagtaaaattagaacttttgaaagcaattcacaacagttgaggcgcagtgcctgcaactgcctctgctgtaaatcatagtaaaattagaacttttgaaagcaattcacaacaccgcttcaaaaggttcagcaattggtgttgctgtaaatcatagtaaaattagaacttttgaaagcaattcacaacagagattttaaaggtgttgtaaaagcatgcgctgtaaatcatagtaaaattagaacttttgaaagcaattcacaactccgtcgggttcgggctttcgttaccacgtgctgtaaatcatagtaaaattagaacttttgaaagcaattcacaacactgatggggatactgtaaatgtattagctgctgtaaatcatagtaaaattagaacttttgaaagcaattcacaacaaggttcttttaatagatttagacactcaagctgtaaatcatagtaaaattagaacttttgaaagcaattcacaactattactacttgatatatatatgcgcattggctgtaaatcatagtaaaattagaacttttgaaagcaattcacaaccatcaggaaaattggtatgcaggcgatcttgctgtaaatcatagtaaaattagaacttttgaaagcaattcacaactatgtcaggtcatggtattgcagttggcgagctgtaaatcatagtaaaattagaacttttgaaagcaattcacaactatcatcgtaaccgtcatcaggctgcatttgctgtaaatcatagtaaaattagaacttttgaaagcaattcacaacaacgtcctgagtacttaggtggtggtaaatgctgtaaatcatagtaaaattagaacttttgaaagcaattcacaactatgtcaggtcatggtattgcagttggcgagctgtaaatcatagtaaaattagaacttttgaaagcaattcacaacccctacagctattattgtggcacactaacagctgtaaatcatagtaaaattagaacttttgaaagcaattcataactattcctgcacctctggctgagtagcagtagctgtaaatcatagtaaaattagaacttttgaaagcaattcacaactagtgcgaatttgagtgttgacctttcagggctgtaaatcatagtaaaattagaacttttgaaagcaattcacaacaatatcaatgcgttgccttttgcagctttgctgtaaatcatagtaaaattagaacttttgaaagcaattcacaacgtgataggacttatgtccgtaatgcctaaagctgtaaatcatagtaaaattagaacttttgaaagcaattcacaactagtgtgccactaagcagcgcagcgttcctgctgtaaatcatagtaaaattagaacttttgaaagcaattcacaactgtgtcagcgacctatcgtattgaaagatagctgtaaatcatagtaaaattagaacttttgaaagcaattcacaactagtgcgaatttgagtgttgacctttcagggctgtaaatcatagtaaaattagaacttttgaaagcaattcacaactacttttaacaggtacgccagcacctaatgctgtaaatcatagtaaaattagaacttttgaaagcaattcacaactcagatataaccattcccttacaagatacagctgtaaatcatagtaaaattagaacttttgaaagcaattcacaactagcttttgctatgtttaggcactcagcttgctgtaaatcatagtaaaattagaacttttgaaagcaattcacaacagttgggtacaggttaaaaattggatagacgctgtaaatcatagtaaaattagaacttttgaaagcaattcacaactactttgtccattattaagcatcttattttgctgtaaatcatagtaaaattagaacttttgaaagcaattcacaactgtaaatggattctgaaactgatcgcgactgctgtaaatcatagtaaaattagaacttttgaaagcaattcacaacgcttgtccctatcatgtgtgcagatgttttgctgtaaatcatagtaaaattagaacttttgaaagcaattcacaactcgccgtcaacgacggtactcatcacttatgctgtaaatcatagtaaaattagaacttttgaaagcaattcacaaccaccgaagacggacgagtttacgaactaagctgtaaatcatagtaaaattagaacttttgaaagcaattcacaacctggcgaccttacgagtgaatcgtatgctagctgtaaatcatagtaaaattagaacttttgaaagcaattcacaacaacgtcttaggaaacgcttatctaaggttagctgtaaatcatagtaaaattagaacttttgaaagcaattcacaactctttttcatttcttctaaaaaacgattttgctgtaaatcatagtaaaattagaacttttgaaagcaattcacaactattaccaagagttaaagtctatgtttccggctgtaaatcatagtaaaattagaacttttgaaagcaattcacaaccacctacttacattcaaaaaatgagatagagctgtaaatcatagtaaaattagaacttttgaaagcaattcacaacacagagagtacgcttaatacacataaatctgctgtaaatcatagtaaaattagaacttttgaaagcaattcacaactcttccgctgatcagacaggaacctctattgctgtaaatcatagtaaaattagaacttttgaaagcaattcacaactgtgaacaagcgttatagcgcttgttgcaagctgtaaatcatagtaaaattagaacttttgaaagcaattcacaactattaccaagaattaaagtctatgtttccggctgtaaatcatagtaaaattagaacttttgaaagcaattcacaactaatactaaattagacgagtaatgccattagctgtaaatcatagtaaaattagaacttttgaaagcaattcacaacaaagtaatattgattggaatagctaatgggctgtaaatcatagtaaaattagaacttttgaaagcaattcacaacagtttctggagagtggttaatatttacctggctgtaaatcatagtaaaattagaacttttgaaagcaattcacaactgaaaaactattcttttttcaaccaaatcagctgtaaatcatagtaaaattagaacttttgaaagcaattcacaaccaattagcaatggttctataatcaggattggctgtaaatcatagtaaaattagaacttttgaaagcaattcacaactgctccatttggcgccgttaatccgtctgtgctgtaaatcatagtaaaattagaacttttgaaagcaattcacaactaggtgtggcatttagaaaattttgatcggctgtaaatcatagtaaaattagaacttttgaaagcaattcacaacaaaaaacaaccttgcttaacgcgccaactcgctgtaaatcatagtaaaattagaacttttgaaagcaattcacaacagaaaggtaatgatgttatgatatctattggctgtaaatcatagtaaaattagaacttttgaaagcaattcacaacaaaactaaacgacctcattaccacgtattggctgtaaatcatagtaaaattagaacttttgaaagcaattcacaactagatgtggcactaagcagcgcagcgttccgctgtaaatcatagtaaaattagaacttttgaaagcaattcacaactgaaaaactattcttttttcaaccaaatcagctgtaaatcatagtaaaattagaacttttgaaagcaattcacaactcaaggttaacaggttctaaagaatatctggctgtaaatcatagtaaaattagaacttttgaaagcaattcacaacccataggattagcagctttttttggaattagctgtaaatcatagtaaaattagaacttttgaaagcaattcacaacgtatttttatctctaattcttttatattgggctgtaaatcatagtaaaattagaacttttgaaagcaattcacaactactcgacaagtcggaaaagttggagtacggctgtaaatcatagtaaaattagaacttttgaaagcaattcacaacccacagctatagctaatgttgttgcggccggctgtaaatcatagtaaaattagaacttttgaaagcaattcacaacctcaacacgatatagatactttggcgttagctgtaaatcatagtaaaattagaactttacgccaaaatctgcttgttaaaaagataaaatgttcaattcaataccaaaaaaacaaaaaattcctttcccgatcctacttttgagagcaaaactaatcagcagctctttttaaacaatgagaaaaaaacacctgaactattttatcaatctactcctccttactattatagcaaaaacctacggacaggaaaaaagggtcctcccgttagaaaatactccgattgaaatgtatgtgttctctaacacacctcaaccgatgtctaatatcagtgctcattttatcattttaccggaagatgtttctttagaaaacggatcgcaaacggatctaatcaaaaatgaaaaaatagaattcgctaccgactatagtttttattactatctgaaaattccgcaaaacattcttcattcccatgaagttatccgttttttagaaactattgtaaaagaaacttttgaccgggactttttcaacaggaataaagttcatctatacctgaagaatacgaatattctttttaattgtagtgatttggacagcttaaacacttactttgccagtatttgggtttctaaaaccaatcctgtctataactgtcataaagactttatagcagatattgccagtactaatctgagagctaaaaaaagaaacagcactacttccgtttcctacgagaccgtaacaactaacaaagctcaggaagttcaggaaaataacgaattcctaaattctttgagtaaattaagtcgaaaagtacaattctcttttgcaattggctataatacgatcaataaaaactaccaaacagaatttgatcaggaaacattgatcgatttcagcgaactcaataccatttggaccattaacgccggttatatgttctcaaaaaaatggggcagtttattcaatctgaattttctgaataaaaaagaaagttccgatcaggaatacaaaaccacttacaacaacattattatttcgggtaacggaagtggtgccggtatggtcaaattcggattaggcttgcgtttcattccttatagtcacaaaagatggagtataacgactgacctgacgtatggtttactaaccgctaaggccggaggtggttccggtaacataaccatttatagcggcggaacgtatagtgatattgaacgagtagaaaaggaagaaaaaacaaactacactgatctaactgtcagcacaaactacaaattagggaaagttgtctttctgtatagcagtttcaactattctttttctaaatttgataatgctataggatctgtaaaaggttttaccggttatactatttctttaggactaggattcaatttttaaaaaatacatcttataaaattaaacttatactaatataaaatttacaaagtataattttatactaaatttctttattttaaaatcactttcttataactttcagttgtttttcgttcaatagtttagcacaatttaattactaaactatactacatgaaaacaaaaattacacaactattattatttttatttacaacagccttttacggacaggttacccaagccggagacattgcttttgtcggctttaatgctgatgccaatgatgacttagcaattgtcacttttcaggacatactacccaataccactattattttctgcgattcggaatggaacggttcttctttcggaacagatgaaggcgattttacctgggattccggtgctactactattcctgccggaacgatcattacttttaatgctatcagttcagctttaacaccctctgtaggaagtattacggtaaataatgccggagggatcagcagttccagtgaagctatatttgcttttttaggtactcccccacgtacagtaagtactatgctgtctgctatagcaaatgacagtggtgctttcggaactttagacaatagcggacttacattgggtactactgctattgttttaccaaacggagctgatgtggcacaatacaacggtccgagaacaggcttaacgcaggcttcttttttagccgctcttaacaatatgaactattgggattcagaagatggcagcggtgaccaatctgctaacggttcggctcctgatcttcctttcgatactactgtttttacattaggaacaacttcttatccggtggttaattttgataactctatttcggtggttcaggaagatgccggaaccgtagttgtttcgatctctttatcagaagccgctattcaggatagttctatagatattgagcttagcgcaggcggaaatgccacaaatggtaacgaattcagtttttccgatcaaacggtaactttcctgaccggagaatctcaaaaagacataaccattaccttaaatgataacctgacatctgatattgatgttttctttgctgtttcacttcacaatccgaataacatcacactgggtagtacaacacaacagttggtttatattttagataatgaaatgagcgctccggcaggttctaacaccttaggggtctcttatttaggcagctacacggtagatgcttccggttcagctgaaatcgtagcacacgacccgggtacccaacgcttgttcgttctaaatgctacggctgctaaagttgaaatattagatttttctaacccttcctctgtttcacccattaattcagtagacatgaccgcctacggaatcggtgctaccagcatagctgtaaaaaacggaatggttgctgcaaccgtagaagcagcttctcaaggtaacggaaaagtcgtttttatggatacaaacggtacgattacagatgtggttactgtaggtattttaccggacatgcttacctttacccataacggaaccaaagttgtaacggctaacgaaggagaaccaaacgatgactataccctggatccggaaggtacaatttccattatcgacgtttcaggaggtttaaacaatattgctcaggctaatgtggctacattgaatttcaatgcctttgacagtcagattgctactttaaaagctaacggcattcgtatcttcggaccgggatcaacggtttcccaagatcttgaaccggaatatatcaccatttctgatgacgatacaacagcatgggttact

SEQ ID NO: 313 - DNA, 24110 bp, synthetic construct
  source 1..24110: mol_type = other DNA
  misc_feature 1..24110: note = Synthetic
ttctgttactaccacgccagagagcaaatggttatgatctttcaccgttccagtcacggtttttcctgtttgtgcaaataggggtgtagcacaaaccaatcccaatagcacacttattgtatgcctattgagtttaaagtaaaatattttcataattttacataagttttttaaaattcaacattagttttaaaagccactccttttccagtacatcgcgccaactttgtttttgggaaaggggtttttttacgttttacgtgatacgcttaacgttttacgtgttttttatcaattctatctttaaccacaatagaaacataggttttattaagttttacacttaacgttttacggattttgtcattctgagcctgtcgaagaatctcttctttttcattttttgagcgcaaaaaacatttgaaattaaaaggagaagccatagtatggcttaggtattccatttctttaatgttactttttacttgactaaaaagtaaccaaaaagtcaaggccgtaaacctctttactaaaaatgttctcattccactaaacgttttacaaaccctacgggctaaaacctttttaacgctccactcaaccattttcttaacttgagagttttaatgccggtttttcatcctttttcaatattcaaattcactttttaataacaaattttgtcattctgggcttgtctcagaatcgcatcccatatgtcatttcgaggtatcgagaaatcttttgtcactttttttattcattgaacatctattttaattattggtattcatatgcccttcggggaacagtcaaaaaaactaacgaaaaaagacttgtctttgattttcgacggtcaaaataagtttcagccattcaatgttttaaatcatttgctacgcaaacagtaaaacattttaaccatttacttcaactttttgacactcgcctccaaatcatatgacatttttctaatccttttttctaattcaaattcgttgtcatttttaaaaatggattttgtcattctgagcttgtctcagaatcgcatcctttataaatcccccgatatagacaagttttaaaaaatacattaataaatgaaataaaaattaacactaattactttatgaagatcatttactttcttcttaggttgtcttcgggggatagagtgtgaatctgtttactctttcataatttcacaatagttttttaattcaacattagttttaaaaaccactctttttccagtacatcgcgccaactttgttttgggaaagggttttttattaagttttgcgttctacgcttaacgttttattctttcttgctgtcacattgagtgattttcgtttcatagaaaaagaaaatagtatcgaaatgtcactttatttaatgtcactttttttcgtcaaaaaaactaacgaaaaaactcttgtctttgattttcgacggtcaaaattagtttcagtcattcaatattttaaatcatttgctacgcaaacagtaaaacattttaaacatgactttcaactttttgacactcgcctacaaatcatatgacatttttatgatcctttttcaaatacatagtacattttacataatacaacaaacaaaaaggtagcagaaccccaataaatttggaaaatgatattaaacgttttacatttagtgtgcgattaaaaaagataaaacgaatgccgtcaaagtctcattaccgaggctctgatagagagcgtgtaaagaaagggtacccctttgctttacgatccgtgttttaaaaatgttataaatacggagtattgttctttaaaagaatgggaaaaactaacagactttgtctggcggttttttacggatgaatggaaattgtttcgttctcatgtgttttggtttttatggaacgatgttgctcgtgtatgaagaaatacttgcaaaaaaagcaaggcggcttcacactttagtaccgtgggcgaccaaacccagcttaaaaactcgaaagtttaaaagttacccctaaagcatatgtgaaaaccgcccatgccgtatgcgaaagtacaaaacttttgagacatggagcgattccacgatactctcgaggtaaaattggtcatttcggttcgagattacatcgtttaataatgactattaaaagtctaattatcaattcgcttatacaaatataacaatattttttaatgtggcaataaaaccacaattatttttttacaatgaaagaaaattatacaacttattacaagctaatcggtgaaaaaataaagaaaaaaagaaaagaaaagggactaactcaaaaacaagtagctgaaaaaattccaaaatttgatagatcaaaaatcagcgatatagaaaatggtaaagaagattttttattttctactctattaaaaatctgtgacgctttagatattagtcttaaagaattaatagattagtacttcttaaaaaagtaatagaaaaggtaaaaagctcttttctatttatacgaaatgcggatatagctgattttttacgaaacaaatgctatagtagtttcgtaaaaaattatgttatcagcaatccgaccgaaacttgtccctaaaagaaaaaccgaaaagttcaccataaatagttttttgggatatcgcatctttacaatattttttgaatgaaagtgaatgaaaaataccgaacaaaacatattaatccgaagcaaagaaattaccgaaaactattttcagtttttggacaaacacattgcagatgtggtttcgggaaaaattgataaatttatggaaatcaaccaaatatccagtgaattattcatttctcataagcatttgacagatactgttcaaaaagaaacaggaaatcatccctgtcatttttatgatttgaaaattattgatgaagccaaaaaaatgctttctcaatcagataaatccatatctgaaatagcgagaattttgacgtatgacccgtctaatttttcaaaattctttaaaaaatttgtcggaaaaaccccaggacaattccgaaaggaaaataaaaaataaaacttccgaaaagttcaccataatttagattttataaattgtcaactttgttttttaatcgtaaaacatttaaaatcaaacaaaatggcaagaaatgatttaaacggaaaagtagttctaattgcaggaggtgcaaaaaatttaggaggtttattaagtcgtgattttgcggctaaaggagcaaaagttgctattcattataatagtgatagtacaaaagcagaagcagaaaaaacattagctgatattcagaatacaggtggagaagcgtttttatttcaggctgatttgacggatgtaaaaaacatcaccaaactttttgatgcaacaatcgaaaaattcggaggaattgatattgctataaatacagttggaaaagtactgaaaaaaccttttgcagacacaaccgaagcagaatatgacagtatgagtgatattaatgcaaaagttgcttatttctttattcaggaagcaggaaaaaaactgaacgataacggaaaaattaacacaattgtaacttcgttattggctgcatttacaggatattattcaacttatgcaggagctaaagcaccagtagaacattttaccagagctgcttccaaagaatttggttcaagaggaatttcggtaacagcagttgcacccggaccaatggacactccgtttttctatggacaagaaagcgatgatgcagtagcttatcacaaacaagcttctgatttggggggacttacagacatcaaagacatcgcacctttagttgaatttttggtaactgatggttggtggattacaggtcagacgatttttgcaaacggaggttataccacaagataactatgaacaacggacgatttaagttttttaaatcgtccatttttatttaaatcaaaaaattttatccaatgagtaatacaaataatgtaatcagaagaacagcaacacacacttatccaaagaaaaaaatactttgtttggtttctaacacagcagacttgcacggtataaaagttggattttttgcagaagaaatgacaagacctttctttgattttatccaagcaggatatgacgtagatgtttgttctccaagaggaggatctgtgcaatttgatgcacacagcaatcctgaaaaccctgaaagtggttatcaaaatgatttaattagtattgggtttgtatatcataaagaatttgggaaatggatgcaaaacacaaaatcaattgctgaaattgatattgcagaatatgacgctatttgcgtggcaggtggtggagcaccactaatcacttttaaagatgatgataaattacatcaactaattgcaaatttttatgaagcagaaaaaatcgtttgtctgatttgccacggaacaagtttgcttttatggacaaaattaagcaatggcactttacttgctgatggaaaaacctggacaggttttgcagatagtgaagaagaaatggtcaatcaaatgttcggaatgactgtcaatgattataccattgaaactgaagctcgtaaaaatcccaacactaattttgaagttgcaggagcattagaaccttttgcagtaagagatggaagactgattacagctcaacaacaacacagtagctttttagcttctcaattggttatcgaatcattatctgaatagtcctccaatggttataaaaattctaaactcaattttaattctttttgctgtgtttatgggaataaagcacggttggaatatgctcactgcaaaacccgaaatgctggaaatgttcggtaaatggaatttcagtaaaaatgctgtgatgataaacggaatagtaactttgttagcttcggttttaatcttgtttccgaaaacttttatttggggaaattttctgatggcagctggaattctgatgataatctgtttgcaattactaaacaaagacctaaaaggcgttgctatagaaatcccctttttattgcttaatttggttatcatctacttgcaacatcctttaaaaaacaattaaaatgaaaaaattatttatcattttgttttgttcatttgtacttacttcttgtggacaaacacaaaataccaatcaaacagaaaatcaaaatacaaaaaaaatgcaggacgaaaccgtattaaaacccgtaaaaacattgattgaagcaatgcaatcagaaaatgctgaacttatcagagctcaattttcggaaacagccactcaagcctatggtgcggatggagtgatgaaaacagccgaagaaaccaaaaaatggtttgaaagcgatataatcagtcgtcaaggtaaagttgcgaatcctcaatatactgtgattagtgaaaatcaggttgttgttacaggacaatattcaagtatcggttatacaaacaaagcagattttttgttcactgttgaaaacggattgataacaagttggagaatgagatattaagtacgaaagtttattgtcgattaaaatggactgctgataataactaagctttcgtcttgcccggagggctagagatgaaagcccgttgaacggaaccggagtagctttatgtattatggggttttcgaaatgtggctttaagatatacaagcagtaattttaggattactgctttttttgtgtttacttggaatgcgaattagaaaaaccttagtttttaggtataaaaaatgcaaaaaagtataaataataacctctttagaagcgattttagggaggtttttgtttttacgtgaaaccgtaatttattgtatatttgagtttaatttactaaatgtgcactaagccacaaaacgttagccacaattttataccaaaagccgttctaaaatatcgaatttattttccttaaatttgaacaaaactaactaaggaaatggaatatgacttctctaaattaaatgatcgagaatttgaaattttagcggcttctgttattgagaaaacacttactactaaagtggaaatttttaaatctggaagagatggtggtgttgatggtagattttggattggaaatggaaaagaaggaattatacaatgtaaacattatttagaaactccctacactcaattaattttaaaattaaagactgacgaattagctaaagtaaaaaagctaaatccaagtaaatatatttttgttacttctcaaaaactttcaagaattaacaaacaggaaatcaaaaacatttttcaaccttacattataacagaaagcgatatttggggaaaagaagatttaaatacttttttatctaaaagagaaaatcaagatatcgtcgaaagaaattacaaactatggattacaagtacgacagtattagaaatcctctataacagcgctataaaaggtagaagccaaagtacgatacgagaaattgaagaaaaatcacatagatatatagtaacagaaaatcacaataaaggattaacaatattagaagaaaataatgttgtcattttgactggtgaaccaggaattggaaaaacaacactcgctaacaatttggtaattaattacattgctaagggatatgaattttgtgatattgaagaaaatatcagtgaagcagaaagtttatttcgtgaaaatgaagaaaagaaaatactttattattgcgatgattttttaggaagtaatatgtatgatgctgtcaacaataaaaaagattcccatattgtaaaatttattaatagaattagaaaggataataacaaaaaatttattcttacatctagaacgaacattttgaataaagcttatagcttaagtcatatttttcaaaatttaaaaattcgtgataatgaatttttactaactattgaaaatttgaataatattgacaaagcaaaaattctttataatcatatctatcattcaaaattatcagaacaatttattgatgttatatataaaaacaaaagatataaggatataataaaacatagaaattttaatccacgaataatagaatttattactgactcttcagttattggcaatattatgcccgataattattgggaacatattattaaaagtctagataaacctgaaattatttgggaaggctattttcaaaatcaaactgacgactttgtaagagctcttacattcttaactgtttttaataatggaaaaataaatgaagataatttgcgagattcttacaataaatatctaaatattcacccagtaaattttggtgataattctgataaaagttttgagtcagttagaaagttagcaacaaaatcattattgaataggaatcaagtaaacgatgagaactatgagtatgttctatttaatccttctatagcagatttcgttctaagtgcgtatgcaaaagaaattgatttaatttgtaatattcttaagtctttagataaccaggtttctattgattatttacataccttattaatatcaaaaaaaattgccaataaatataagtctaaaattttagaaaatttgtttgatttcttcttcgaaagtaaattgaaagatgaagattgggattttttaatttctctttcttacattgactttcttaatgataaagttaataaaagaatagaaacctttttgaacacattagtaaatgcaaataacccgaaaggtgagaaattatgggaattattaatgattttatcagattttgaaccccaaattaaattcaataattttagattcctatataatttcataagtgatatatatgatgaagactcattaaaaaaactattcgattttgtagatttaaacaatattgaagatgaacatattttaatgcaaattgatattttacttgatcgatacctaagaagcattgttgataataatgatttagatattgattatgcaaagtacattaatcaatcttacaactattatgaaagttatcctgaaatagatattgatataaatggtgttgaagatgaaataagggaaaatcttgattcctttttagatggatttaatgaaaatgtactagaaaaaatttcattctctacgtcaagtatagtctcagaaatagatgtagactcaaaagttacgagatttttagaaagttatgaacctgaatacgatagagatgctcacggaggttattattatggaagttcaggagaagatgatattgacgcaatatttgaacgttaataagataaaaaaaaactgtcgctaataactaagctttcgtcttgcccggagggcatgagatatattgcaaaacgattgaagacaaaaagaataaatatacagcctcggtaagtgtttttagtgagggtttgttttacgtgaaaccgtaatttattattaaaaggttgttgtatatttaaaattaactttacgaaatgcagatatagtttttttttttacaaaacttttatattatttacttcgtaaattactatattagatatacaaactgtttaaataatcgtaacctaaatggatatttcaaaacattttgcacttcttgaagaattagaaacatcgaataagttaatacgacttggttttggcgaattacaaaaccttaatatttctaatagcttttattttttaccatttcaactattatcacaaggatttgaaagattaatgaaagcttatatttgtattgctttctatgaaagaaacgacactttacctgattttaaatacattataaaactaggtcacgatttagataaacttttgactgaaataattgaaaattactattatgactatagtagaatacaatataaatgtgataaagagtttttgacaaataataaggattttctacatttattgcacataatctctgaatttggtaaacacgcacgctattacaatttcgatgtcataacagatagtaacaagccaagtatcaatacgattgaagaatggcagaattatgaaaatgaattaataaaaaaactagaaatttctcctgaaaaaattctaagtcttgatattaatgtaaataacgaagtgtattatgaaatttcaagacacattattataatctttgaaagatttgtttccgctctttcgagacaaataatttttggaaaattaggtcaaattggaaaacaattgaccacaagcaatatttttgattttggtttattatatgataaagattttggcaacacagattatagaaaaataactaccaaatactctgaaacgccaaaaagagtacataaaagaactattttagacgacttagaaagacgtgtaaatccaaattacaaatctaaagttatcaaaaaagaagatttcaaagaagattggccattttatagtaatgaggttaccgtagaatgccgacacaaacattggtgcataataacaattgatggttatgactattcattaaatggctctgcaaaaggaaggtataagttagaaaatccacatgatgctggaatggcaataataggaaaaagtctttctgagtttataaaaattgccagagaactttaaagtccagccactaatatgggtaaatcttgcacaactttaattttagataaaaacacaaaatagtataaataataacctctttaaaagcgattttaaggaggttttttgtttttacttaagaagaataaaaaaaaaccgaagatagtcgaggcgaaaattttctaaaaatatctttcattataaataattaagataaaaaatttaaatcaatttacggttttccgtaattaatcttatactttactatttatatttgatgtaattaggagttaaataaaaatcccacggagtacgcaggatataagtttttacttcggcttaaagccttattgtgaattgatttcaaagtcaaatataaggatttttattaaattacaatataattaagaataaaataaaaaattttgagatatcaaaaaccaagaaatataaattactatgagaatattaggaattgacgctggtacgaatagccttggctggtccattagagatacagaagttataaataatcaaatcatagattttggggttcttacttttgaaaaaggagttgcttctgaaaaaggaaatgaatttcctaaagttaaaaaaagaacagagagtagaggaaaaagaaataattatcgagctgaaaagtataggaaatgggatttattatattttttaattgaaaataatatgtgcccactttcacatgaagagcttaataaatggaaaaattataaaaagggaacaaaacgtaaatatccacaaaatgatttatttttaaattggttacgatttgattttgacggcgatgggaaacctgattttcatttgataggaaaaaataaacatgatagtttatttgcttttagagctttagctgttgatcctaattttcattctgtttataaaactaatccatatttacttggaagaattttctatcaacttgtacaaagacgtggttttaaaggaagagatgaagaagaagcaaagacgatgttgcaaggtagtgataaaaatggtactaaaggaagagatgatattgccgaatttatcgaaaatcataaaacgttaggagctgctttatattattatcaaaaagaaacaggtgaaagaattagacaacgatacaatcttagaaaggattatgaagcagaattaaagcttttatgtcagctatatgatattaatgatgaggattatcaaaaactatggaaagccattatatggcaacgacctcttcgtacgcaaaaaggcttagttggttattgtatttatgaaaaaaacaaaaaacgtgtacaggtaagccatccattgtacgaggagtatagaacatgggcttttatcaataatttaaaaattattcctcctattggagttgataaacagacttatattcaagaaaaaatttatcgtttattttttaagtcatcaaatgattttgaactaaaaactattcttaatcaacttaaaaaagacggcggtaaaatagattcaaagtttaaagaaaaaacaaaagtaatttctgctaagctattaaagtcgtttcaagatatttttggagataattggaaagagcttttgcattgggataatattaatgaaagagatagtcagccatctaaaaaacagaattcatcttttaattatgatgaaatttggcacgttcttaaaacttttgatagccaagaaaatttaaaagattttgctttgaacaaattaaatcttgatgatgagaaagctgagaagttttctaaaatcaaactaaatcaaggttatgcaacaatgagtttgtctgcaattaagaaaatacttccttttttgcgaaaaggtattccttatcattatgccgttttcttggcaaatctttataaagttttgggaatggaaactatttctgataagatgatcgattatttcattgaggaatttagagaagttgaaaaaagtaacgaacaaacaagattgttaaatacagttgtcaatagtttggttttagatgagttaaacagtaaatatcgttattcaattgaaaatgacagagatttagacgattctgaaaagaaaaatattaatgctaaactaattgaaatatttggagagaaaacttggcttttattatctgatgatgaaaaaacagcatcttatgattatgtagccaaatattacaaagagtttttgagaaaatcagtcctgtcaaagactaatttattcatggagaatgagagaattcatgatcaaattttcaatgtaattgctgaaaaatatgacataccagaggataagaagaaatttttatggcatccatcagaacaagaaaattatacccaagccgaagaatatgattattttacgctaaatggtaaacctgtttatattaaacaaattgatagagagaattttattaaaaataataaagatgctgaatttcaaggaagaagtttaaagttattaggtagtccagaacctgttaccaaaggattaaaaaacccaatggctctaaaaacaatgcacaaaatgaagcagcttatcaatttccttttgcaagaaggtaaaatagatgaggacactcgaattgtgattgagatagcaagagaacttaacgatgccaatagaagaaaagctattgaaaaatggaataacgagcgagaaaaggaaaatctaaagttcagtgaaactattattgaaataaataaagaatgcaacaccacttttaatccaagtgataaaacgcttcttcgtaaaataagattatgggaagaacaaaataaaacttgtctttacacaggtaaattgattaaactttgtgatgttttagatggaaataaatacgatttagagcatactattcctgcaagtataagttttgataatgagttacgaaatttgactttaactgatacggaatttaatagaaatataaaaaagaaacaatatccgtcacaactttataatcatgtagatattttgaataatatccagtttatgaaagaaaagatagagcatttggaagatttatataaagaatggaaaaataaagcttcgtatgcatctactaaggaaataaaggataattgtattcagcgttatcatttcataaaaatggatttagattattggagttacaaatacaatacatttattttggaagaatataagtcaggttggaaaaatagccagttgcgagatactcaaattattacaaaatatgctctgccatatttaaaaaccttatttaaaagagtgtcagtagaaaaagcaagtgttgtaaatgtttttaaagaagtatataatgtaaaattattaagtgataaaaaaaatcgttcaactcatagtcatcacgctggtgatgcaagtattttgacattaataccatcagcatttgatcgcgaaagaattcttaaactttataacgaagaaaaagacaatcatacgggtaaaatttatcacgaacaacctaaagattggaaagatttctccccaagttatattaaagaaatcgagaatgttatattaattaacaatatagttgaaaatagaactactgttccaacttataaagtggtacgcaaaaaaggaaaaatcgtttgggaagataaatcacttgataaaaaacgaattgctcaaggagatactataagggggcaattacatgatgaatctttgtatggagcaataaaattaccattaagaaacgaagaaaataaaattttgtttgatgataatggtaaaatgaaacttactgaagagccaattttggttattcgaaaagatttagtttataaacaaaatgcagattctccaggatttaaaacgcttgaagaagttgaaaaggtaatagtcgataaagctctttttgaaatgataaaaatgcaagtggaagatgctgtcggatttaaagaagctttaacaaaaggtgtttggatgtttgataagcaaggaaacaaagtaaataaaataagaagaatacgctgtaaaggtttaatgaaatataatacagcattgaaagtgcatacgcatgcttttacttcaaaattcgattataaaaaaacaacattagcaaaaagtggagaaaacgcactttgtttattttataaaaacgaagatggaaaagcaatggagatattaagtatttctgatgttgctcaattaaaatttaagaacgatcgttcttattttttagaaccagaatacaatacaaaatcaataggaaaaggaaaaaaatcaaaagaaataccgctttatgctgttttacgttctgggcaaaaagtattgttttataaagatagtattgaagaactaaaagaattagataattctgatttaacaaaacgtttatataaagtatatcaatttgaaagtgatggtcgtatgaagtttagaaatcatatggcagcaggaatagacactgatttaaagaaagaaaataaggaaggggcatcttttaactttgagaatccaagtatctttttaagaattagacaaggtgaatggaattttgcaattgacggagttgattttgaaatgaaaatggatggctcattaaaatttaaataatatgctaaaacgtaccatttacattggcaatccatcttatttgaaattgaaagacaatcaattaaaaatagaagatgtgataaccaaagaaatcaaaggctctgtacctattgaagatttgggttttttggtattggatcattatcaaataaccattagtcatcaacttatagtgacattacaacaaaataatgtggcaattattagttgcgacgatagtcatatgcctttgggattgatgttgccaatgaatggacatgtagagcatagtgagcgattgaaacatcagattaatgtttcggaaccattgcgcaaacagttgtggaaacaaacgattgaagctaaaatttatcaacagaaagcattgttaagtaagtttggttttgtagaggagccaatgcagaattatttaacgaatgtaaaatcgggagactctacgaatatggaaggaattgctgcgcaatattattggaaacaattatttgacaattttacgagagaacgagatggtgatgctcctaataattttctgaattttggatatgctattcttcgaagtatggttgcaagagctttagtgagttctggattaaatcctaccattggtatttttcatcgtaataaatacaatccgtattgcttggctgatgatataatggaaccatatcgaccttatgttgatgaattggtattagaatggatgaataagccttttcgaccgactgaaatgagtaaagatgctaaagcacatttattacaaatagcaacaaaagatgtgaaaatagatggtttgaaaagacctttgttggtagcgataagctctacaacaagttctttgtataagtgtatgacaggggagcagcgtgtgattcgttttcctgaaatgacatgagttttagtcgttataatgcttatcgtattatgtgggttttagttttgtttgatttgccaacagaaacaaaaaagcaaagaagtcaggcaactcgctttagaaaagagttgattgacgatggatttactatgtttcagttttctatttatttgagacattgtccaagtagagaaaatgctgaggtacatataaaacgaaccaaatctaaattacctgaatttgggaaagtaggaattatttgtattacagataaacaatttggacaaatggaaatatttttctccaaaaaagaaaccgatttaccaacaggtccacaacaattagaattattttaggaataaaaaaatccgatagaaaactcaacttctatcggattttactttttttctcatttctaaatttcttctcaaaccctttatgataatggtttgttaaatgaggttgtaaatactttgataaatataccaagatttgaaatcaattcacaaccacgcacaccaactccattcgctacctctcgttgtaaatactttgataaatataccaagatttgaaatcaattcacaacgaaaaagagttcaacgtatcacaagaaattgttgtaaatactttgataaatataccaagatttgaaatcaattcacaaccaattaacagcagaggctgaatttgacttagttgtaaatactttgataaatataccaagatttgaaatcaattcacaactggcatattaagcgaaacacgaatagagcggttgtaaatactttgataaatataccaagatttgaaatcaattcacaactgagtggaggggattgtatcaaagcgagaggttgtaaatactttgataaatataccaagatttgaaatcaattcacaacactaatggatcatttggacttacggagattgttgtaaatactttgataaatataccaagatttgaaatcaattcacaactcttcaataaatcgttttacagcttctttggttgtaaatactttgataaatataccaagatttgaaatcaattcacaaccaacaaactgcttatgaaagattagcagaagttgtaaatactttgataaatataccaagatttgaaatcaattcacaactgttacaccgttaagtgaacacactaagttgttgtaaatactttgataaatataccaagatttgaaatcaattcacaacgtctggtgttaacgttgcgccgtctccgttgttgtaaatactttgataaatataccaagatttgaaatcaattcacaactaaaaattctcgatccgtttttgtttttttgttgtaaatactttgataaatataccaagatttgaaatcaattcacaactgctattttattccgtttaaaaattctaaagttgtaaatactttgataaatataccaagatttgaaatcaattcacaaccagatattactcacctttgctttatggtaagttgtaaatactttgataaatataccaagatttgaaatcaattcacaactaaaaactaaatcgtttcgaaaaatcatttgttgtaaatactttgataaatataccaagatttgaaatcaattcacaaccaacctattgacgtaatggttattcgttttgttgtaaatactttgataaatataccaagatttgaaatcaattcacaactctgaaacaatctctacgtgtggatttttagttgtaaatactttgataaatataccaagatttgaaatcaattcacaacctttggttggagtggtttaataagcagatggttgtaaatactttgataaatataccaagatttgaaatcaattcacaacagaagatactaaaagtattgaattagttcagttgtaaatactttgataaatataccaagatttgaaatcaattcacaactccttttgaagatgcccgaataagcagatcgttgtaaatactttgataaatataccaagatttgaaatcaattcacaacttattttctttgcattcgtttaaaaaagtagttgtaaatactttgataaatataccaagatttgaaatcaattcacaactggttgaagttaaaattaatccaataggaggttgtaaatactttgataaatataccaagatttgaaatcaattcacaacgttattaactctggtaatgggagttgggttgttgtaaatactttgataaatataccaagatttgaaatcaattcacaacctcgtattacatcaactgacgttgaagcaggttgtaaatactttgataaatataccaagatttgaaatcaattcacaacgtgggagcgttctacaccttttggaaacgagttgtaaatactttgataaatataccaagatttgaaatcaattcacaaccctttaattggttggcaggaatcagtcgaagttgtaaatactttgataaatataccaagatttgaaatcaattcacaactctttcaatgacatattaaatgaacaagaagttgtaaatactttgataaatataccaagatttgaaatcaattcacaaccaagtcataactcaaaagttggaggagaaagttgtaaatactttgataaatataccaagatttgaaatcaattcacaactctaaagcggttttgaaaggagatgttatcgttgtaaatactttgataaatataccaagatttgaaatcaattcacaactaacagaaaacgaactaatgaaaccccttggttgtaaatactttgataaatataccaagatttgaaatcaattcacaaccaagtcataactcaaaagttggaggagaaagttgtaaatactttgataaatataccaagatttgaaatcaattcacaactctaaagcggttttgaaaggagatgttatcgttgtaaatactttgataaatataccaagatttgaaatcaattcacaactaacagaaaacgaactaatgaaaccccttggttgtaaatactttgataaatataccaagatttgaaatcaattcacaacttgaatttgttttaaatcgcatagtttttagttgtaaatactttgataaatataccaagatttgaaatcaattcacaacccaatttcagagcgtgattggtgtacttctgttgtaaatacttacgtaaaattactaaaaaagctcttatccaagagcttttttgttaaagaaatgttttgggtaaaagtactttttaccgagcttaaaacaaggaatcgtcttgtttctcctcatgcgatacaacgttttgtcactaacgttaagcagcctttttacatctgcactgtcgtagaatccgtgatctttgtccgtgggttgtatattcgtaattaattctactaaaagaagttttaactcgttgctatccttctctttttgtgtaaaaaagtaagtgttttgcatacgttttaatttacttaatttcagtaagatacgtatttcatttaaataaaacaaatcataagaggaagtagggatagggagggaatgttactttttttattgattttctgttttaaatattcgaatttctttttttaatgtcactttttacttgactaaaaagtaaccaaaaagtcaaggctgtaaacctcactactaaaaatgttctcattccactaaagatttaaaaaaccctacgggctaaaaccttttttacgtttcattcaaacattttcttaacgtgtgagttttaatgccgttttttaattctttttcaatattcaaattcacttataataacgaattttaaaaccgtcattgctgaaaagtcgagtgtcaattcgacgtaatgagcgttaaaaatgatttactgttcacattttatatgtgaatgatttaaagcatttagcgattagtcgttattgaccgatttgtaggcactatacctaagctccagtggagcttctcctcttaatctcaaatttttaatttcaaatgttttttcatcaaggttccccgtagggcatatgaattcatttgaaacaataataactcatgaataaaaaatgaatgaaatatagttttgaaaaacgagaataatctttctatcacttttttgagagcaaaaaagtaatcaaaaaactcttggctgtaaacctcacgactaaaaatgttctcattccactaaagattttaaaaaccctacgggctaaaatcttttttacgttgcattcaaccattttcttaacgcgtgagttttaatgccgttttcttaattctttttcaatattcaaattcacttttaacaatgaataaataaagtaattaacgagtagttgttatttatcgtctaagtcttcgatacaacgttttacaaacgtcactctgactgacgataaaaagaagctgagataaattcagtttgataaattacatctcacatctattatctcaaatctcacatctcctatgccattaaaacaaaaaataccaagaataaaattctatttctaaaaccttattctcggtaataactaaacaaacagtagatagaactgagatcatacgcttgttataacacctcgtgtttccctaaataggtactggtactagcttgtgttcttttttctgtgttgaggtaaatccacacatcaacttctttgttttggtaaggcgtaggtaaattaacacttgctaaaagcgtgtcacgtgtcgcaatttcttcggagatgtagaagctattcagttcctcgcaatagcaaaccacgtttacaagatccgtttcttttgcattcccttgccctgagttgtcttcccaactaaaactaaatgtaccagcagttgtagcatcaagctccggaagctgaaaatctaataactcgcctttggtaataagaacacgtgctacgataataacaggtaagtctagcaccatttctacagcattggttagggtataggaagtagcattgttaaaacgtgattgtttacctgctttatttccaaaatacctgttttggatagaacgcaatggttgtaaaaaatcaatagttttcctaaactttacccgttggattaactgctcctctgtaggtgctttttttgatgctttcggtagacttcggataatatcctttccacgccagttgacaccaatcactgttcctacttttcctgagaatccgccaaggattccttttttaatttcggccataatcttaattttttatgttatgtagcagcaagttagtggaataatgcattggttttgaagtttgcaagacaccatgtctagtatagaccattaatgaccgctattgtccatttttgtctggtatggaggagagataaaaaaagacagaaaacacaactttcctttattagaaagggtttgaagcaaaaatgataaaactagaaatagggtttgttcgagtgttgttcgagtgtccttcgacaacggttcggaaaaaggggtgttttgtcgaacaacggtcgaacaagtgtcgaaggattgtcgaacaaaataggggtgaagtgaagggaaaataaataggtttttatttgaaacggaagttgtttttacaatttattgctataaatgtttgactataaaatttttaaataaccagttgtgcattttgaataaaaattcgtcaattcgagtgatttttagaaatgaaatgaataaaaattgtatcgagaatagaattttatcttctaaaaccttattctcgatacaaaattcttacagaattttactccaattgacggtttaattgctaaaattatcaaaatacacaacgggtttaaataatctttttgaataaaaaaatagttttaaatttaaaatttatatcgtaatattgcgatgtaataaaatgtaaaatgggaattactaaaacagagatgtttacaaaagaacaaaatagattagctgtaatgtttaaggttttaggacatccagctcgtattgctattttgcaacatattatcaatcaaaaagcttgtatttgcaatgatttggtagaagaattgggattagcgcaagcaacgatttctcaacatttaaaagaattaaaaaatataggaattatacaaggttctatagaaggtaaatctgtttgttattgtattgaagaaaaagtatggaaagagatacaaaatgaacttgttactttctttaatcaagaagtgaaagttaatcaatgctgttaaaggcatttttttttaatctagatccatcgtaatattacgattaataaataaagaaaataaatttaaaaactcaattcatatgacacttgaacaaatcaaagagatattgccaaatttagacaatgttgaatttcaattagaagatgggacatttgtaccagaatatttccacgtaacagaagtaggacaaatcaccaaaaactttattgattgtggtggaacaataagaactgaaaaagtcgtgaatttccaactatggaatgctgacgattttgaacatcgtttaaaaccaaataaattgcttcacatcatccagctttcagaaagtaaattagggattgagaacagcgaaatagaagtagaatatcaagccgaaacaattggaaagtatgatttagaattcaatggaaaacattttgtcttaaagaataaacatacagcctgtttagcagaagatgcgtgtggtatttcaaatcaaaaacctaagttaaaattatcagaaattcagtcatcttgttgcacaccaaactcaggatgttgttaaaaaatcaaaaaaaatgtattcaatattaaaagaaaacataactaattttcaaaattttgaggcaataactacaggtagaaaggctgttttacagactttagtagaatacattcaacaaaaattagacaatggacaaactgtaaatcttaactttatttgcagacacaattcacgccgaagccatttttcacaagtttgggcacaaatggcagcttcttattaccatattgaaaatgttttttgttattcaggtggaacagaacaaacggcgctatttccaaaagtagtagaaacattaagtaaccaaggctttcatattttcaaaattgcagaaaataacaatccaatttacgctattaaatatagcgaaaatgctctgcctatcataggtttttctaaaaaatatgatgattttttcaatcctatttctgaatttgtagcaatcatgacttgttcgcaggctgatggcgaatgtccatttattgcgggtgcagaaaaaagaatatccctaagcttcgaagatcccaaaacttcagatggtataccacaacaaaatcttatttatacacaaagaagtactgaaatagcaacagaaatgttttatgttttttctcaaataacaaaataagtatgcaaccgaaactaaaatttttagacagatacctcactctttggatattcctcgcaatggcaatcggtataggattgagttatttatttccatcaatttcaatccttacaaactcattgagtgtcggtactacaaatattccgttagcaataggattgatcctaatgatgtacccacctttggcaaaagtagattattctttattacctcaagcttttaaggataaaaaagtaatcggtatatcattatttcttaattggtttgttggctcactgttaatgtttggcttagcaattttgtttctaagaagcgaacctgattatatgacaggtttgatattaataggcttagcaagatgtattgcaatggtaattgtttggagcgatttagccaaagcaaaccgagagtatacagcaatgttagtagccttgaatagtatctttcaaatactttcttacagttttttggtttggttattcatcaatgtcttacctaatcaattagggttagccaatttcaatgtaaatgtatcgatgaaagatgtcacagaaagtgtactaatttacttaggaattccttttttagcaggattttttagtcgttacgcattgattaaatcaaaaggtttgaaatggtacaacagaaaatttattcctaaaatatcgcctataactttatatgctttattgtttactattatattaatgttcagtttgaaaggaaataaaatagtacaattaccattagatgtcataaaaatagcaatccctttaatcatctattttgtactaatgttttttattagcttctttatcaataaatggctaaaagttccttacaataaaaatgcatcaattgcatttacagcaacaggaaacaacttcgaattagcaattgctgttgctatcgctgtatttgggatcaattctccacaagcatttgtaggtgttataggtccgttagtggaagttcctgtgttgatacttttagttagggcaagtttgtggttaaagaaaaagtattaaaaaactcttattaatactaatatgagcttttaatttataatttgattcgttctaaaaatcgtcttcaataattttctgcactcgtccaatttgtccatccatcaaacgaacttttatactatgatgatgataagacgtagaagtcaataaatctttcacgataccctctgtcaatcttcagttcgttaatcctttttcaataaaaattaaaaatttagattttttgagagcggttttttgctttttggtcaatgctttattaataaaatcttggataccttaatgttaattacggtatccaaaacaataatattattttaattaaatgtatttcgaaattctaaagaagaaaaattaacctttttatagaattatttttttaaatcttgtagtatattccaatccctactcataagcaatttcgcttactgatagttttgtagttgttaaccttacttttgtttttcaatcaacatattatgaatattttcttgagtattttttcaaataactattttaagtaaactattcaggcgatttggagttacatttaacttgaagtgctatctccgttaaactagatatacttttgttaatattttcttcagaattaaaatgataattcaacaattaatatctttcaagtactcttattttaaatattttttcataatactcaatacatttttgagagattgttcagtaattaaaatggttgacttttctatcgttct

SEQ ID NO: 314 - DNA, 24104 bp, synthetic construct
  misc_feature 1..24104: note = Synthetic
  source 1..24104: mol_type = other DNA
acccaattggaaaaagtaccgtagctaaactgaattccctttggcctcaccctagttttgaaggtcagtttttaccggataaccatgaagtaaccgaaagcggatttagtgcagaatggtctattttcgacctaaatagaaattaccctcagcagtgggtgggcagtgaacatagaattgcagattctgagtttggtgttaagctttttcaaccagtagataactatcagcaaaacactcgttcggccaaatatgcagtgctgattctcttcctcacctttatcacgtttttctttattgaaattcttaataaaaagagaattcacccaatccattacatactggtcgggctcacactaaccatattctataccctacttttatctatttcagaacacctcaattttagtgcagcctactggatttcatccctggtaattattgctatgatttcgctgtactccatgtctattctgaagagcaaaaagctagcaggtattttattcatgttcttcagcatcatctacacctttgttttcgttgtgctgaaactagaggattacgcattgcttttcgggagcgttggcctactaattgtactaggcatatgcatgtatctttcaagaaatatagattggtataatattaaagctaaaggagggttgaaccatgcagcaacagaagcttaagtttctactaaaatttagcttagtgttagtaagaatctattgttggtttaggcagaaaaagaacctagagaggctcttagccgcctttctattagtccctgccatacttttactagtccctagctatacatttaaactcaccctgttacagtcttttctgtttcaggcaatgttagtgtatggagcgctgagtgttttctggatcgtaaagcaccattaccgattagcgggtgtcaattttgtaatctactttctccttctggtaaaaatcagtgggccaatcagcaagacttatagaatagatcagggggaagaatcactcagagtacttcaattcaacgtactttctattaatgataagtatgacgaaaccatcaatagcgtattgaatctagatccagattttgtctcctttcaagaggttagtcatcaatgggcagaatctcttgttggcggcctaagtgctgactatccattttacaaagttgttgaacacgaaaaccaaggccaaggcattgcggtattcagcaaatacccattacaagaggttgaagaagttcatttggatgagacagcgaacattactgggaaaatcttggtgggaaatgaagccgttaacttcttggctttgcacaccaagtcaccaacaaccagaagcaagtggaataacagaaaccaacaccttaaatgggcagaagaatacgtcaataatcaacttggggaatttttagtcttaggcgactttaacaccgtgccttgggacaatagaatgctacattttcagtcttctacagagctcacggatagccgtaaaaagctgactccaacttacccgacttggaatccatttattgcgcaaattccgatagactacatcctccactctaaaggaattggctgcgactcgctcgatgcagttagaatcacttctgaccacaaagcgattatgggtagtttcttagtggcggggaaatagcacattgaatgatcgcaacaaccaacctttgacaaacttgaactttctgaaaatggctcaagccgaaaaaatgatgagcctttggattaaggtttgtcaaaggttaataccgagtgaaagacccgctattttcccatcctgagtttagcgaaggatctgcccaataaactagcttggcagatccctctttcatcgggattgaaaacgattctatcggtcatatgaagaacctttgacaaacttatatcaccaaaagctccatagccattgactttaaagaagtagcttactcaagtttgtcaaaggtagagcactacactttccaatcctgaccatgccgaaggatctgcccatttccccaatttcctaattgcccatttccccaattcaccagtttccctaattaaccaaagcccgaaactttaatcattactcctcagttgtatttgcgttggtaaatcgagacctttgtgaattctgcgctgccaccccgttctgatggaaaaattcaaagaaaatgcgacaattgagcctgctccagtagatatttcaggccatgaaaatatcgaagtattcggagctagagagcacaatcttaaaaacatagatgttaccattcctagaaataaactggtagtcattactggtatctcgggttctggaaaatcatctttagcctttgatacaatttatgccgaaggacagcgcaggtacatggaaagtttctctgcttacgcccgctcttttattggcgacatggagcgcccagatgtggacaaaatcaatggcctcagtccagttatctccattgagcagaaaactacttccagaaatccacgatctactgttggaacactaacagagatttacgatttccttaggctattgtatgcccgagcaggaattgcctactcctacctaagcggcaaaccaatgattcgccaatcggaagatcagattatagatcacctgattaagaatttcgaagggaaaaaactcatcattctagccccagtggtgaagggtagaaaaggtcactaccgcgaattgtttgtgcagattcgtaaaatgggctttactaaggttcgagtagatggtgtggtgatggaaatggtgcctaaaatgcaggttgaccgttacaaaactcacgacattgaaatagtaatcgatcggattattgcagatccaaacgacagattccgaattgctcaaagcgttaaaactgcaatgaaccacggtaatggggtaatgacggttcgtgatgaagacaaccaaattcaccatttctctaagtttttgatggacccagaaactggtctctcatacgatgaacctgctccaaataacttctctttcaactcgccatacggtgcttgccagacctgtaacggactcggtcaaattgaagaaataagcaaagagagtgtaattccagatccgaatttgagcataagcagaggaggtattgcccctcttggagattatcgtgacatctggattttcaagaaactagaagcgattctaaaaaagaacaaggccaatttaactactcctatcaaagatttacccgaaggagttttagacactcttctctatggagatgatgttcccgtggctgtcagttcaaagaaatacccaggaaccagctggaacaccaagttcgaaggaattatcaaattcctagagaagcagatggaagaaggaacggagaaaacccgccagtggatctctgactttatgactgtaaaaacttgccctacctgtgatggagcaaggttgaaaaaagaatcacttcacttcttaattgccgacaccaacatttctcagctcgcagaaatggatattgagagtttgtctcaatggttcgttggtttggaagaaaggctaactgacaaacagaatcagattgcccctgaagttctgaaggaaattagaaagcgaatcggttttttgttagatgtaggcctcgattacctcaccctaaaccgacctttgagaacactttctggtggagaagcgcaaagaattaggttagctactcaaattggtacgcagctagtgggagtgctttatattatggatgaaccaagtattggccttcatcagagagataatgttaagctcattagtgctctgaagaacctacgagatattggtaataccatcatcgtggtagaacacgataaggacatgatgctcgcttcagactttatcgtagatattggcccaggtgcaggcagacacggaggaaatattgtagctgccagcgagccaaaaactttcctagaagaaggaagcaccactgctcaatacctaaaaggtgaaaagcagattgaaataccgaaagaaagaagaaaaggctccgaaaatagcctgacattgaagggtgcaagcggtaacaacctgaagaatgtaacactagaaattcctttgggtaaaatggtgtgcattacgggagtttcaggaagtggaaagtctactttgattcacgacaccctattccctattctaaatcaccatttctttaggtctagaaaagctccattggcttataaagaaatcgatgggctgaaggaaatagataaggtaattgaagtagatcagtcgccaattggacgtacgccaaggtcgaacccagctacgtatacaggcgttttctcggatatcagaactttattcacagaactacctgaagcaaaaattagaggctataaagctggccgattctccttcaacgtgaaaggtggccgctgcgaaacctgtgaaggtgccggaatgaagctcattgaaatggatttcttgccgaacgttcatgtgccttgcgaaacctgtaagggaaagcgttacaatcgcgaaacacttgaagttcgattcaaaggaaagtctatctcagatgtgctagatatgacggtagagcaagccgttgaattcttcgaaaatcagccaaagattgtaaggaagatcaagaccttaaacgatgttggcttgggatatatttcgcttggtcagcatgccactacgctttctggtggagaagctcaaagagtaaaactggctactgagctttctaagaaagacacgggtaaaacactctatattctggacgaaccgaccaccggactccactttcaggatattcagcatttgttagacgtactgaatcgcttggtagacaaaggcaattctgttctgattattgagcacaacctagatgttatcaaagtggccgaccacatcatagaccttggtccagaaggtggtgacaaaggcggtgaaattgttgctcaaggaacacctgaagaagtggctaaaagcaagaaaagctatactgctaagtttttgaaggaagaactgacctcccctaacccctcctaaaacaggaggggaattttagtgcaatccgagtatccttttccattctgaacgaagtccaagaaccgaccagacaaagttgcatggcagatccctccgctaaggtcgggatgggaaaaactcaacccacttttctttataagtttggcgaagaatgaggggagtattaataaccgcaaagggcgcggagttcgcagagcactcgtaaaccaacgtgctagtccttggtgtcctcaccaagacaaccgctcagtgaatcggtggggacacctattctggctaaaaactatactgcttacctttgaaagacgagctgaccacccctaccccccctaaaacaggaggggaattttagtgcaatccgagtctccttttacattctgagcgaagccgaagaatcaaccagacagattcgtttggttgatccccagtcttgatgtcctcatcaattgcggctaaaattaatcgacaatgtgctgtctttgacaaactttgagccgctggtacttctaatgcttcttattccaaaccagactgtgaagtcagtttgtcaaaggtttgaggagtatgccttccttattataagcttcctaagaaactaagtttggcagatccctccgctaaggtcgggatgggaacgaacccaacccactattctttctgattgtctcaatagtgaaagtatctaaccgcaaagcaagcggagttcgcagagcactcgtaagctaacgtgccagtcttggtgtcctcaccaagacacatgctcagtgaatcggtgtccccaccgattctggctaaaagtaatacacctaaattttgaaagaagaactgacctcccctaacccctcctaaaacaggaggggaacatttctgcaatctgagtcttcttttccattctgagcgaagccgaagaatctgccaatcagagtcgtttggcggatccctccgctgcggtcgggatgggaaagtaaagacaaaaaaatagtgctgccgcatacgcgaacagcaccatcttcaaccaaaacattaaaatcaacacattaatctaacacctcatcgtcaggctcgtttgcccgacttcaatcatcgattttaattgcctttttctgtctctataacggaatgcccaatggcctattatagtgttctagctattatttgtctttttaacactttttgactcttcaatgttccatcaaatttgtttcattttaagaacccaaaatgaaaggctcatgttataaccacaaaccattaatatgagcccattcgaccatctccatctggagattccaacctctgataaacctagactggttattattggaggtggttttgctggcatccaactggtaaaatccctcaaaaactccaattatcaaatcgtccttttagacaggcataactaccatacctttcagccgttgctgtatcaggtagctaccgctggtttggagccagactctattgcgggagcgttgcgccagctttttgaaaaacacaaagacttctactttagaatggcgcgcgttacaggaattgatccagagaagaagtgtatcaaaaccttagtgggcgaactgagctatgatctcttagtaatagctaatggatctaaaaccaactactttggagatcagcaaatgtacgatcgtacttttccgatgaaacaggtgccacaagcgcttaaccttagaagtcatttgcttcagaacttcgaacaaacagttttagctaaagatgatgaagaaaaagaccgactcaccaactttgtgattgtaggcggtggcccaacaggagttgaagtagccggagcattaggagagctaaagaagcatgttctacctaaagactatcccgatattaacttcgatataatgaagctccatttagtagatgctggcccgcgtttattagctggtatgtcggaaaaatctagtcagaaagccgaaaagtatttgaaagaattcgacattgatgttagggtaaagactatgctcaagtcttacgatggaagagatgtagtgctaagcgatggcacccaaattcctgccaaaacggtaatctgggctgcaggagtaacgggtaacattgttgacggacttccgaaagaaagcctgaaaggaggaagaatagcagtggacagcttcaataaagtggaaggtgttaaagacatttatgcgcttggcgacattgccggaatgtacagtgaagcttttcctaaaggtcaccctatggtagctccggtagccattcagcaggccaccaatttggctaaaaacctaaagcgaaaaagtcaggctgactggaagcctttccagtataaagacaagggctcaatggccacagtaggtagaaacaaggcggtagtagatttacccaaattccattttgggggcctttttgcgtggatggtatggatgtttgttcacctgatgtctatagttggtttccgaaacagactggttatactaaccaactggatatggaattacatgacttatgaccgtggcaccagattaatcatcagaacatttttaaggaataagaactataaaccaggagatactctctgatttccaaccatattagctcttaacctcttgtattattgcttttctacgaaaggctaagtttgcttatttttcaatttcgaaaatgagaaagagaagactttactggattttgcaattagtaggttgggggttatacttctcggctaacttcatttctcaaggcttcgacccccaaagcttaggcgagcaagtagtaagaaaccagcgcattgagcttaccattcattccattttctttttcctcctttctcattacttcattaggggtattactataaaaagaggatggctacaaatcaatattaccaaggttattccaagaatactgggcgtaattctactagcttccatcatagggaacattctttcttttagcctatactttgttgtgggtaccagaactccgagcgatcagagtttgcaaactgaaattccattgctatttgggtcttcttttgtgctctttgttttgtggtctacagtgtattttctctaccattatttagagagtaacaatcgctcgttaaagtatgaggccgccatgaacgaaatgcacctcaaccaacttaaggctcaattgaatccgcattttatctttaatgcactcaatagcatgagagctttggtagatgaagaacctactaaggctaaaatagccattacacagctttctaacattcttagaaactcgctgattacggataaaaaacgagtggtaaacttcagaaatgagctaaatacagtaaaagattacttggcgttagagggcattcgttttgaagaacgattgaaaataaagtataaaatagacccacggtctgaccattttgatataccacctatgatgatgcaaacgttagttgaaaacgccattaaacatggagtttctaacctaatggaaggtggcctcattgaaatacagtcgaatgtaaccgattctatgctcaccattaagatcagaaacagtggtcaactgagcggaatcaagaaaaaaccaaccaatagaacaggtgttgggttaataaatacgaaggaaaggcttaaattaatctatggcgacaccgccacgtttaatatttataacgaaaatgataagtttgttgtgactgaagtgaaaatacctcagcgcatataattaataatctatgagagcactaatagtagacgatgagagattggctcgtaaagagctaaccaaccttttgcaggagtttcaggagattgaaattgtgggagaagcggtgaatgctgaggatgcggaagaaaaaataaacagtctgaagccagacttgttattcttagacattcaaatgcctggtaaaactggttttgaactattggagtctctagattctgtgcctgatgtagtatttacaacagcttatgatgagtatgcgctaaaagccttcgactataacgcaatggattatttgctaaagccgattgagccagacagacttaaagaaactgtgagtaagttaattgctcgtcagtctaaaaaagaagaagaaaaaacagaaactgagccttctaaactaggtcctagcgaccgagtatttgttaaagatggagataagtgctggtttgttaagctggaaaacatccgcttattcgagtcagacggaaattatatcaaaatttacttcgataattttaagccaatgattcataaatcattgaatgcattagatgagaagttagacgacagatcttttttccgtgccagccgtaagcatattataaatcttacttgggtagaaagtattgagtcttggtttaacggaggcttaatggttgtactcagaggtggagacaaagtggaagtaagccgtaggcaagctgcccgatttaaagaaatgatgagtttataactcgttaaagaaaacctcgcgctcgcgaggttattgtgtgtgtttattggccctgacgttacgcgtcagggtttttttgtggtcaattcttttaatgaagctgtagcctaaaagcaacaacctttaataaccctaccaacctgaaattgattaaaccataaaaaaccacttgtaaataccaatttttataaagtacttctgtgcctgttctgaaagacacacctgaaagacctcacgtttattggaacaaaaaaagccccacggagtacgcagggcttaagaattctcttcggcttatagccttattatgatttgctttcatctaaagttatgaaaaaatcaaatcataacacactagcttactgatttttggtaaagcttaaaaaaaagagataagcagaggccagaaagagactttggacatcttattcaaaaaatggtgcgccattttctttttctctttaaaacaaaagtagtacatgtacaaagcaaatattttataaaacacagaatatcatggttttaggaattgatctcggcaccaatagtattgggtttgccatacgaaacccgcacaaaaaaggaaaccaaataatagataaaggtgtcctactcttcgataaaggtgtggctacagaaaaaggaaatgaatttcctaaggttcagaagagaaccgaaagcagaagcaaaaggagaaattaccaagctgagaagtatagaaaatttgaacttcttaaattcttaatatctgcaggcatgtgtcctttaaccatggaagaactggacgattggagaaagtacaccaaaggagaaaagcgaaagtacccgcaaagtgaaaaatttattaattggattcgctttgactttgatggtgacggaaagcctgactttcatcaattagataaatccaagcacgaaagttactatgtgtttagagcatacgccataagtgaggagcataaagatgtctatcaaaacaactctcaactcttaggcagagttttctatcagttggttcaacgtaggggttttaaaggtagggatgaagaggaagccaaaacaatgttggaaggctccaagaaaaacaacactcctgggcgggactccattgcagaatatatagagaaataccgaacccttggggcagcgttgtatcattttcaaaaagaaaaagggggaagaattaggcaacgctataatcttagaaaagattatgaatatgaattaaaagaaatttgtagtgtacagggcataaaacatagtgactatacaaaattatggaaagcaattatttggcaaaggccattaaggactcaaaaaggacaaataggcctttgcacatttgagaaaaacaaaagacgtgttgcgattagccacccactttatcaagaatacaaaacttgggttttcatcaacaatttaaaaataaagcccccctctgggcttgatctctcagactacttaaaagaaaaaatttaccctttattcgttagaaagtctgattttgaaataaagcatattttaaatcaattgatcaaagatggagcttccattcattcaaagtatgcacatcctaaaatggaaaaaaccaaggtcgtagccttgtccaacttttatgattttgagcaaatttttggtaaaaactggaaagagtctcttgactttgaaagcacatttgatagaactgcacaaccaatcaagaagcaaaacaaaggctattcgatagaagatatttggcatgtacttttaacatttgatagtaaagagaagctacatgagtttgccataacaaagcttaacctagaagaagataaagccaagaagttctctgaaataaggttagacagcggctatgctactttgagcttatcagctgtaaagcgaattctaccttacttaaaaagaggaatcaaatatagcagcgcagtttatctggccaacctaccaaaagttattggcatccatgaaatcaccgataacgatatagattatttcgtggaggagcttgaagagctaaccaaaagtaacagccgaaaaaaactattaaactcagttgttaatagtttgataaaagaacatttagaagaagattatcgctatttcattgaggataaccgcaatctcgatgaaagtgaaaattccaaaatccgtgaaaaactgataacagaatttggggagaagagttgggaaaaactcgatgatgaaaatcaaaaggcaaattttgactacgtagctgaacacttccactcgtttttaaaacggtcaataagtgataaaacaaacctgtttttaaagctgccaaggtttcatgaagaactatttaacaccctacaattaaagtatgatctacctgatgagaatataaaatatctatggcatccctccgaacaagacagctatccaaatgctgagacatacctaaaatatagactaggaagtaaggacgttttcattagtgaaaaaagtgcctctacatttgagaagaaaaactctgacgccttcaacgaactagtttctattaagctcttgggaagtcctgaacctattagcaaagggtttaaaaaccccatggctttgaaaacccttcataagctgaaacaactattaaattacctgcttcagaaaggtaaaatagacgaagacactcatattgttgtcgagatagctcgagaactgaataataacaatatgagagctgcaataagggcatatcaaaaccaacgagagcgagagaatacggaatatgctaagcgcattgaggagattaataaagaatgtcaaaccgatttcgatccaaaagatgcaactcttctaactaaaatacgactctgggaggagcaaaatagaaagtgtctttatacaggagaatccatcgggatttgtgatgtattggatggaaacaaatatgacttagagcataccattcctgtaagcctttgcttcgactcagagttaaaaaacttaacgctggccaactcagaattcaaccgaaataaaaagagaaaaagacttccatctcaattagagaattacgaagaaattaaaaagaacatcaagttcattgaagataaagtagatgtacttgaggaagccttaagaaaaaacctgtatgtaacaaaaggaatagcagacaaggctcaaagggactcattgatacaaaaaagacatctaattaaatttgatttaacctactggaaagcgaagcttaaatcgttcaaaaatgaagaatacaaacctcagtggagaaacagccagttgcgtgacacacaggttgtaacaaagtatgctcttccttatttaaaaactgttttcaaaaaagtaagtgttgagaaaggagttgttgttaatgatttcaaaaacatatttcaagtacaattagaccagagaaaggacagaaacaagcattcacaccatgcagttgatgctgctattttaacacttataccagatagctatcaccgagaaaaaatactagaagcttataactcagctaaagagattaacaaaaagtatcatgccaaacctgcaaattggaatgactttaaagcttcttacattatcaacattgaaaatgaaatcttagctaacaatttagttgatgacaggactctaacaccaacctataagaaagcgaggaaaagaggtgtagttgataaaactgattcaggaaaaaccaaatggaatagaggagatactgtaagaggtcagatacatggagaatccctttatggagctgttaagcaaccaaaaagagatgaaaacaataaaatagcttttgatcaagacaataaaatgattttagaagatgaaatcaggcttgttaaaagaagagaattaaagtttaaaggtcccaatgattctgacggattcaaaaaccttactgacttggaaaaggtcattgttgataaagcattattcgaacaaattaaacttcaagttggtaacagcccctttaaagaagcagttgagaaaggaatctttatgcttgacaggtctggaaggcctgttaatcgcataagaagagtaaggtgttttgaaaataatcttaaacacaaatcggcaattcaaattcacgagcatagatcagttcctaaagcagactacaaaagccatacgtatgctaagaatgaacaaaatgcctattgcctttattacgaagggctaattaagaaaaaaactcaaaaagctatttcaattattagtttgtacgaactctccaaactaggcttagaaagcccaaatcagttctacagtattccatactacagccaacttgaaattaaaaacggagccttaccccttaaggctgttttgaagagcggggatcgatttatattctttaaaaactcaattgatgaattaaaggaactagataaagaaacactcttacaaaggctatatagggcataccaatttgagtccgatggacggatcaaatttcgtcatcatcttttagcaggggatttaactcaggctaaaaagatacactccgaagtttcaagcctttcgttcgacaaatacgaaccactattaagattaagtaaggctcagtggaattttgctattgaaggaattgattttgaaatagagattgatggaggaattgtttggagggattgacaatacccaatccttggaaagctttaagctttccaagggtgtttaaaagagcctctaaagccataaaacagaagcacacatgcaaacagaaaagtcatatcatatttataatcatgccaatggtagcgaaaacctctttcgggagacagagaattacctttacttcttacggcagtgggacaaatacattagcccaatagccgaaaccttagcttactgtttaatgcccaaccattttcattgtttggtgctaataaaaaaacaagaggagattgaagcaacttttggaaagttcgaaactttccaaaagctagagtacctcttgagcaaacagtttgctaattttttcagtagctacacacaagcttacaataaaagatacaatcgaaaaggaagccttttcgcacctaacttcaaaaagaaggaaattacctctaatgattacatcaccaaagtaattgcctacatacacaccaatccaatccaccacaggtttacccaagatttaagaaagtggagctttaccagctattcgagcatgctctctactaactctacaaaattagctcggacaatggtactcgattggtttggtggtaagaagccattcgaggactttcaccaagcttatataaacacgattcccggtgaagaaatgaatatttaaataataagcttttcaaaagcttagagctgttggaaagttcaaacgaataagcctatgataaaacgtacactcttatttggtaacccggcccacctttctacaagaaaagagcaactagtagttaagtaccctgatgatgatcaaaagaaaaccatgcccattgaagatattggcgtagtgcttttggagcatccacaaattaccattacacacacgctaattagcaagctcttgggtaaccaagttgctataattacctgcgatgctcaacatttgcctcaaggtttaatgcttaacctgaatacccatcataagcaggtagctcaaatgcgacaccagctttcggcaactcaagtattaaaggataggctatggaaacaaacaattcaagctaaaataaagaatcaggcagcactgctaaaaatgaataacattcctgctgaaaatatggagagatgggccagcaaagtacagaacggtgaccctgaaaactttgaaggtcgcgcagcagcctattattggaaatgtctatttactgatcttattcaaaactttaaaagagggcgatatgaaggtgaacctaacaacttactcaattatggttatgccattctaaggggagccatagctaggtctttgatgatttctgggctactaccgaccatgggttatcaccatagcaatcaatacaatagttattgtttagccgatgatctaatggaaccttaccgtccatttgtagaccaattagttttagaattgataagaacagaagatagctataccgaactgacaccgtcactaaaacaagacttacttaaggttccagttctcgatgtaattataaacaatcaatccagcccgctaatgttagccgctcaacaaagcgcagctagcttagccaagtgctatagtaaagaagaaaaagcacttaaacttcctagcttttgagttttgacaggttcaatcaatacagagttatgtgggtaatggtattcttcgatttaccaaccgaaaccaaaacagatacaaagaactatcgcaagtttgtagatgtactggagaaagatggcttcactcgctttcagttttccatttttttgcgtcactgcccaagcatggaaaatgccaaagtccacattaagcgtataaaacaaaacttaccgcctaaagggcatgtaggaatcatgcatattaccgacaagcaattcggtatgatggaggtatatttttctaccaaaaaagaagaagtacctcaaccaattcaacagttagagttgttctaggattctgttggcttacactccattagcttctggaaagcttgaaactttccaaaagatccaaaaaaaccctgattatcgttaaaaacaaccagggttttacagccgtaatcaacaggttttcaattgtttacgaaagggtatcttcttctaagatacagtttgaaagcaaatcacaaccagatagagggtactcattagagcctgtaccttcttctaagatacagtttgaaagcaaatcacaaccatggctatattggttaatatggccgcatgcttcttctaagatacagtttgaaagcaaatcacaaccatgacacaaatttaagactaatatataaacttcttctaagatacagtttgaaagcaaatcacaaccattgatgacaagttttacgatgacataaacttcttctaagatacagtttgaaagcaaatcacaacctcagccacagaagactgttcgaaccacaacttcttctaagatacagtttgaaagcaaatcacaactagcccttatatttgtcctcataggcgcgtcttcttctaagatacagtttgaaagcaaatcacaaccgtttcgttaattgagtcactcctaagcttcttcttctaagatacagtttgaaagcaaatcacaactaaactaacctcttgtctccctcccggaaccttcttctaagatacagtttgaaagcaaatcacaacgggttaaattgttttgaagaaacttttttacttcttctaagatacagtttgaaagcaaatcacaaccagctctaccgcataagctatccatttcgccttcttctaagatacagtttgaaagcaaatcacaactggttaaggtgttatgctttggctatgtagcttcttctaagatacagtttgaaagcaaatcacaacaatgcctgtcttgctttctatggcaaaactcttcttctaagatacagtttgaaagcaaatcacaactggtgatggtaaaatatatgttgatagtggcttcttctaagatacagtttgaaagcaaatcacaacgcagatcaatgcgctaagtcaggacgaagccttcttctaagatacagtttgaaagcaaatcacaactcgataacggctacaaagccaaggcgcaaacttcttctaagatacagtttgaaagcaaatcacaactacgacaaatatcaaaaagtcataaaatcacttcttctaagatacagtttgaaagcaaatcacaacatggctttggaaagtacaattctgagctgtcttcttctaagatacagtttgaaagcaaatcacaacctcgttgttcatggtatcgtggaaaggcttcttcttctaagatacagtttgaaagcaaatcacaaccagtctaacagttgagtctctgcgttaaaacttcttctaagatacagtttgaaagcaaatcacaaccagcactggccgattcccctttctcaccttcttcttctaagatacagtttgaaagcaaatcacaactaacgtgctcgatgtgttcttcaataatgacttcttctaagatacagtttgaaagcaaatcacaactcaaaagttgttcaaaaaatatcggacggtcttcttctaagatacagtttgaaagcaaatcacaactggttcactccataagtatgtaacaccagacttcttctaagatacagtttgaaagcaaatcacaactggcctactccaacaagtgtacagcgggaccttcttctaagatacagtttgaaagcaaatcacaactttgctcctcattaagcactggtttagtgccttcttctaagatacagtttgaaagcaaatcacaactgaacatgcgaaagtttatcgaacaacatcttcttctaagatacagtttgaaagcaaatcacaactgacgattatcaagaaatgaaaaagatatgcttcttctaagatacagtttgaaagcaaatcacaactatttacctcctatagcctgtagtctctggcttcttctaagatacagtttgaaagcaaatcacaactattcaatcaagtgttaccacaaaggctctcttcttctaagatacagtttgaaagcaaatcacaactatgatgttgaagatcaggatgatctagacttcttctaagatacagtttgaaagcaaatcacaaccaatatgtaaaagggcaaaactcgctagagcttcttctaagatacagtttgaaagacattaacactccaactttgacattacttttaaaattgaatcagagaatcaaatgaaacacatctccctctactctgttcatatctatatgcaaatgtgactttttagtctttgtgcgtctaaccttgatattgattttatctggctgcttaaaacattttatgcccaatacgctgtcaaatttatatattgaccttaaatgaaagctttactctttgctatagccatactttggcaatccgtactttctccacttagcacagattctactgtggttcaacaagaggtacaccccttaatagaaaaaggaggtgttccggtagatgcagattcaaccatattcttatttaacggtattggcccttactctttaaatcagcgagtacaaaagttgagaactgagttagaaaacctaaaaagcaatcagcaggatttaagagagtttactgtaaagtatgaggaccttgtaaatgacattatagtacaagaaaaaattatactaagcattaacgatgctgatgccaaagctttaggtctaagtcgcagaggagctacagaatactacttagagctaattgaaaactctctaaagattgaagaacctgcattcagcaacattcttttcgtaaatatagccattgccatactgattatagttgcctttatttttgggcttaagtattataataagctgtttaggctcatcagcataaaaatacaggcacaaaaaggagtaaaatttaaaggcttcagtgtaaaaggttacgagcttcttacccaagagaagcaagtagctatcgctacttggggtcttactattataaaatatgccctactcctgtttttgatttacttattacttccggccatttttggcttattcccttggacaaggggcattgcacaaaaactaataggctatgtggtgcatccgcttaccaacttgggtattaacatcctcaactacatacctaacctcttattcattgttgtaattgttatcattctaaggtacttcttaagaatgcttgccttctttacagaagagatttctaaaggtaggttagtaattaatgggttttattccgaatgggcaaaacctacttttaacatagtaagaggcattattattgccctaggctttgtaggcatttggcctcttttaccaatgtctgactctaagatatttcagggagtatcaaccttttttggtctgttagttgcccttggtggtgctggggcattctctaatattattgccggtttagtaatcacttacatgcgttcgttcaaaattggcgatagggtaaaaattggtgaagtaattggcgatgtaaaggaaaaggccttattgaataccaaggtcaaaaccatcaagaatgagattattaccattcctaactctcaaatgctgaatagccataccattaactataccacagcaaatgatgagcaaggacttattttacacactactgtgactatcggttatgatgtgccatggcgccaagtacaagaattgttggtaaatgcagcgctggccacagaacatgtaaaaaagaaaccacttccttttgtactacaaacgagtcttgacgatttttacgtgagttatcagctgaacgccagaacgagagaaattcaaaaaatggccgttatctattctgaactgcataaaaacattcaggataagtttaatgaagctggagtagaaattatgtcgccacattatggtgcgcatagagacggaaaccaaagcaccattccgcagaagtatctgccagaagactatgaggtgccttggtttagaattaaaaacaaagaatgacgcttagaaaaaagctgtacataatcatcttcggtaccgataccccagcagggaaagcttttgatgttgccctacttgtggccatacttattagtgtacttgcggtaatgctagaaagtgtacctagcctaaacaaccggtttggatatgttttcaaatatgctgaatggatattcactgtagtattcagccttgagtacctcactagaatttacgtaactgaccatcgtaaaaagtacatctttagcttctacggtctaattgacctgctttcacttttacctacctatttgagcttcatttttacaggcactcaatacctattaatcattagagcattgagattattaagagttttcagaattctgaagcttggtaggtttgttggtgaaggagagcaattaggaagggcattaaaggccagtaggcataaaatcacagtctttatgggtactgtagttatgctggtgattctactgggtaccgttatgtatttggtagaaggcagagacaatggttttaccagcattccactgagtatctattgggcaatagttacgctcaccactgtgggctatggagatattgctccgcaaaccattttgggtcagagcatcgcctcatttgtgatgattcttggttacgcaattattgctgtgccaacgggtattgtcactgttgagcttcaaaaagatagagagaaccagaaaaacaaagcttgcaaaagctgtaactcaaaaggccatgacactgaggccttatattgcaaattttgtggtgagaagttacccgagtgaaaaaagaagttaagctagatatttatactccagaagaagaattggccaatgctataactcatggtataggcattctcggagcattggtagcttttatttacgttttacttcagccaattgaaaacactgctgtgttttggagtacttccgttttctgcgctaccgcattcattctctattcttcctctaccctgtaccacagtgtaaaatctaaatcgaagaaatttctttttaagaagttagaccatatatctatctacctgcttattgcaggtacttttacccccttctgttggggtgttttaggaaacacatcgttaggaattaatctactaattgccgtatgggccattgccattgcaggcattattttcaagatattccttacgggaaagcttgagttcatctcactagcttcttacctcggtatgggctggttaggctttcttatgttcgatgaaattgccgaaatcctttctcaagaagtagtgaatatgatgctttacggaggagtctcttatacggtaggagtagctttctacctaatgcgtaaactaaaataccatcatgctatttggcacctgtttgtcttaggtggaaccggcttccatatgtatgccgtgctaaagtatgtggttggctaatcctcttacgttaagaaatcaaaagctgtcaagaatcgttatctttattaagcaagctgtaaaacatggataatctggcattaaagaaagtagagctgattgaatggctaactagaatagaggatgaatctctattagaaaaaattaaggacctgaaagaaaaagccagttctagcacatccacattaaagcccatgacttcggaagaatataggttgatgttgaaccaagcagaagaagacttgaaaaacggaaaagtcacttcgcaagaagatttagaaagagaagctactaaatggtaatagccaactatgacaatcctctggtctaatcaagctaaaaaacaaatcagagaggtctttaaattctacaaaggaaccacaagcatcgagttagcagaaaaagtaaagaataggctaattcaaaaaccaacaatatgactggagcatccagagcttggacaagaagaaacaaatgaggccgtagctggaatgggcttcagatatcttgttgaaagccatcataaaatagtctacaagctctatccaagtgaatcaattattctaattgccgcagtctttgacacaagacaaaatccagataagcttagggtttaaccaaacccaactgtgagaaattactcatactgaacataattctcccacttctccattaccgctgtaaagtcttctggtaattctgagttgaactgtatgaacttcttggtctcgggatgaataaagcccaatgacttggcatgaagcgcctggcgaggcatcaacttaaaggcattttcaacaaatgatttatacttcgaaaactgagttccttttattacctgatttccaccataggtagcatcattgaacaaaggatgccccaaatgcttcatgtgtgcacgaatctgatgagttctgccagtttccagattacactgaataagtgatatgtatcgaaggtctttcaaaagcttatagtgagttatagcgtttctccctcttgagccatcttcaatagccacagttactcttctatctttttcacttctacctaaatggacatctatagtgcccatttcctctttcggtacaccccaaactagggcgtagtaggttctttcaatactgtgatcgaagaattgcttggccagactactcatggccttttcggttttggcaattaccagaaggccagaagtatctttatctattctgtgtactaagcctggtctaccatcatttccaggcatggttggcaactgctgaaaatggtaagtcagcgcattcactaatgtccctgtccagttattgtaggcaggatgcaccaccattccagcctctttattgacaactaaaatgtggtcatcttcaaagacaatgttgagtggaatattctcaggaacaacatctgtatcgcgtggtggttccggaagctcaactataatttcatcgcctgggtgtaccttatagttaggctttacctcactaccatttactttcacaaagccatcttttatgccctgctgaaccttatttctggtaacgttaggcaacctatccatcaagaatttatcgattctatacggttcctgccctgggtcgcacaccaaacggtgatgctcaaataactcgtcctgctcttccattagtttgcaaatttagatcaataattgggatttgtcgaaaggcgtaactcaacctaacttgcaccatggatttttcgcagatcaatgaacaacttcctatagaaaggtttcagcaccctgttgccacggaaaaccaaattgacctgcgtattttaaggcttgacaaaactcacggagaaatttctgggaataaatggttcaagctcaaatacaatttaattgaagctagaaatcaaggtatcaacaagctccttactttcggtggagcctattccaatcacatttatgctctggctgctgcggctaagctattcgggtttcaaagcgttggtattattcggggcgaagagcatattccgcttaaccctactttacagtttgcaacagatgctggaatgcatttacactacgtggatagggagagctatcgcaaaaaaactgaggagcactttataaatcaattaagagccgaattcggtgagttctatctcattcctgaaggtggaaccaacagattggctattcaaggggctgcagaaattcctagcttaattcctgaaccttacgattattattgccttgctgttggcacaggaggaactattgctgggcttatttcaggaatgaaagggcaaggaaacatcattgggttcagctctttgaaagggtcttttttacaagatgaagtagccaacttacttcaaagcttcgggcatgaaagccttcacaactggtcaatccaaaccgaatatcattttggtggatatgccaagaccaaacccaacttaatagaatttatcaaagcaatagaagcgcagtttgagctgaagctagagcccatttatacaggaaaaatgctttatggtatactagatatgattgaaaatggacagttcgaaaagggaagtaaaattctggcgatc

SEQ ID NO: 315 - DNA, 24083 bp, synthetic construct
  source 1..24083: mol_type = other DNA
  misc_feature 1..24083: note = Synthetic
tttttctcagcaatatttaatcatcaaaaatctctattttccttggtattttaaggcatacagaatacaagatattcaagaagttatttttgaacggggcgcgcccaacaatgtaaacaaccaaatcggaatagttttaaaagattttagctacacgcatttttatacttactacaaccgaaaaagtttcgaaaaaattagaactgaactcgcacaacgcaacattacactgcgagatgaaatttatgaaaaaacttaatctttttcacaaaacatattaaataattcctatatttggtatacaaaatttaattaaatatgagaacaaaattatttcgtagttttgcattgctattattgataatcagcggattgtcacaagcacagcaaaaaaatcaaattcgattttcgtataattttaatattgtagatttatctcaatttccacctgtgtctggtggatcatcttactcagttaagccaaaaacaaatgtagaaattcaatatttaagaaaaattgcaaataatttccatatagctacaggcgttaattatattggaaatgaaatggttacagagtacgatgagattccaggtattaccgagccgtccccgaacaagacagaaaattttcatcttttaagcattccagtctttgttcattataattttttaaactatttctttgtgagtggcggacctttatttgatgttcaactcaataaaacaaaaaaagctaataaacaatcaggcatagggcttggcgcttcggcgggattagaatatccatattcgaattttattttcagtttaagtccagcacttaaattccataatttaacgaaagacgaaggcttattggatttttctattcaagcgggcgtaggctataaattttaaaaaaacttaataatatttcttatctttagggcggatttatgtgagatataaatccgctctttttgcaatttataatctttagaaatggaaaatattagtgtttttgatatgctcaaaatcggtgtaggaccatcaagttcgcacactttgggaccatggcgcgcggctcagcaattcttggaagaattaaaaaatcgcaacatttttgatttagtcaatgggattcaaatcgatttgtatggctcgctttcgcttacgggcaaaggtcacgctacagatttggcgattcttttgggcttgagtggcaccgaccccgtgacgattcccgtggaaagcatcgatagcatcattgggcatattcgaacgcatcataacttgcttttagacaatcaaaaaacgatatatttcgattttgaacagattaaattcaacaaggagtttttgccctaccatgccaacgggatgaagattaccgcttttcttgaaaatggcgaaagctacgactctaccttctactctatcggcggtggattcatcaccaaagaagaaaccgaagagatggtggatttatctgacaaccaatcttttccataccccacttataaggctaaagatttactaaactattgtaatgagctcaatatgaacatttctgatgtcgtgttgcaaaacgaattaagtgtacgcaccgaagaggaaatcaatcaccaattaaaagccatttggaaagtgatgcttgagtctatttatgttggctgccacaccgaaggtttcctacctggtgggcttatggtgcgccgcagagcttatgatatgtaccaaaaattaaaagatccgagatttccttatacccaccccaataattggctcaaaagcatccgaaaaacgcgcatgttttatcgagaaatttttaaatgggtttccacttttgccattgctgtgaacgaagtaaatgcttcgcttgggcgcgtggttacggctcctaccaatggttctgcaggagtaatccctgccgtattgatgttttatttaagcgtagaaaatcacaaagctggctttgaagaaattaaacgatttttgctcactgcgggcgtgattggtagcatttttaaacgcaacgcaacaatttcggccgctatgggtggatgccaagcagaaatcggcgtatcgtcggccatggctgcaggggcactctgcgaattgcgtggtggcacacctgcacaatgtatgaatgctgcagaaatcgccatggaacatcatttagggctgacttgcgatccgattgaaggtttggtgcaaattccttgtattgagcgaaattctatgggagccatcaaagccatcaacgcatcggaattggcactcgatgccgagcacccgaaagtatcgctcgaccatgtaattcacaccatgtggcaaacggctaaagacatgaattccaaatacaaagaaacctctgagggcggattagccgtaagcgtaaaattggtagattgctaattttttggataatgaattggaagaaaaatgtgtgtttcatctatttttgggttggatttttgtgttttgcacaaatagatgaaaattgtaaaattcaagctgattcttacgaaaactattacggtgtggcgcttgccaatggttttctaggcatgcaaagtagcgaaaaacttttcaaagtagagcatattgtgctgaataatgtatttgacgaagacccgaatttgcatgtaagccaaatcgttaaaggcatgaattttatagatttagacctttggattgacggagaattaatttcgcttgagaatatttccgattggcgacaaactttagaattaaaacaagccaaactcacaacttcctttaattataaaaataaggctaaaatcagttatgatatttttgcccttcgttcgtataaaaattcggcaatgataaatgtgaaaatttcagcatttaaaccaattgaaattaaagtacaaggaaacatcataagccctgaaaactacacgattaaacaacaaaaattcattcagcatagagatttagaaactaatctttatttattaaattcagttgcagaaagtcctacaaaaaagacaactttggccaccacttgttcgtttttgtggaaaaatattgcttttaccgaagcacataaaattccaaaattgaaacaaaaagtcgatggctcaaaaaatagcttgagctttagccaaaaattaaaaaaaggagaaaattatgaattttcatggctaggagtacaatgtagcaaccaagagagcgaatatccaagcacaaaatctgagcgaatttgtatttataatattttacaaggttacgaccaattgtgggcgcaacatcaaaaattatgggaagatttatggcaatcggacattgtgattgaaggggatgctgtagcacaaaaagatgttcgtttagcattatttcaattgtattcgtcggtgcgagcaggagaagctctaagcattccaccattgggaatttcacaacaatcgccttataatgggcatatattttgggacgccgaactctggatgtatccccctattttacttttaaacaaagatttagctcactcaatgcttgcctatcgcaaaaaacatttaaaccaagccattgccaaagcaaaaacttataattaccatggtgctatgttcccatgggaaagcgataacaaaggcgaagaatctacgcctacttttgcactcacaggaccatttgaacaccatatcacgggcgatgtgggtgtagctttttggcaatattatttattgactcaggataaaaattggcttaaaaacaatttttcggtgttggaaaatgtggcagatttttgggtgagccgagcaacgcaaaatccggatggatcttattctattttaaattgtattggggcgaatgagtttgctcataatgtagacgacaatgcatttaccaatgccgtagcgttaaaatcactacaatacgccatccaagctgcaaaaattctaggcaaaaaagcacccaagacttggcaaaaaattgcaaatggactcgttttccatcagtttgaaaatggaataactaaagaacacaagaactacgagggagagatcatcaaacaagtagatgtgaatttattggcgtatccgcttggcgtaatccaagataaaaatcaaattttgaaggatttaaaatattatgaatctaaaatttcgcctgatggtcctgcgatgagccatgcaattttatctatcctttatgctaaattaggcaacaaaaaagaagctgaacgactttttcacgaaagttacgccccctacaaaagaccaccttttggtgcccttgccgaaacacgaaactccaacaccacttattttaccacagccgctggcggattgctccaagcagtgctttttggatttggcggtttagaatttactcccgaaggaattcaacaaaaaaatccaatgctcccccaaaattggaaatcattggaaattaaaaatgtaggcaaaaaaggcaaaaattacaaaatcatcgctcattaagatatggcttaatcaattttgcccaatgcacataggctttgcccaaaagatgcaaaccatcgttggtgaagtctggatttaattgatgggtgtttgggattacaaaatctttgtacaaatcgatgtaggtgatcccaactttgggagcccacgcctttaattctgcattgatgagtggaatatcatgaatgcgtgcgtaatgacctttaaatttggtaaaagaatcatttacaggcaaaatactttgtaaataaattttagtttttggagatttttgttgaattgtttttacgatagttttaatcccactcaccacagaatcattgctcactttgtgtgccaaatcattggttccgatgagtagaaaaactttgtttggctttccagaaacaatcggctccaatcggtctaaaacaccttgacacacatcgccactgattcctctatttttaatcaaaacgtctggaaaaagctcttgccactcagcgccatcggtaatgctgttgcctaaaaatactacatcattgggcataatgggtaactcttcaaacaaacttgcacgctgatgataatagggcgaatattgattttgtccaaaaacacaaaggcttaaaaaacttaaaataatagcgactttcttcattttaatctattttaaaaaatttcgtagcaataaagatacgagagattttttaaacaatacaaaatttgaaatatgataaaatattcattttaattcaataaatttgtagaaaactaaacaattatgtcagatactacacacaatgttattataataggctctgggcctgcaggatacacagcagccatctatgccgccagagctgaaatgcaacctatcgtgattacaggtatgcaacctggcgggcaacttactacaactactgatgttgagaatttccctggttatcccgatggaatcatgggaccagaattaatgactgatttgcaaaaacaagcagaaagattcggtactaaagtaatttttgattttgtaaaagaagtaaaattaagccaagaaaaagggggaattcatcaagtaattactaacaatggagaggtttacaataccaaaaccgtaatcatctcaacaggtgcatcggcaaaatatctaggcttagacgatgagaaaaaatatgcaggaagcggagtttcagcttgtgccacttgcgatggattcttctacagaggcaaagatgtagctgtaattggtggcggtgataccgctgcggaagaggctacttacttggcaaagctttgcaacaaagtgtatcttttagtgagaaaagacgaaatgcgtgcttctaaagtaatgcaagaccgagttttgaacacaccaaacatcgaagtattattcaatcatgaattggaaggattgagcggagaaatggtagtagaaaaagcgcatgtttttaataatcagacacaagaaaaacgcgatttggttgttgatggagttttcatcgccattgggcacaaaccaaatactgagcttttccaaggtgtagtagaaaccgatgaaacaggctatatcattacacaaggcaaaggaacccaaaccaatattcctggtgtttttgcggcaggagatgtgcaagatcatacttaccgtcaagcgatttcggcagcgggctctgggtgtaaagccgcccttgatgctgaaagatatattgcagaattataattcatttttaattattttattatttacaataatccctaatcttttggggattatttttttatttaaaagttttaaaactaaaaaaagcataaaatccctattttttattacctttatgaattcaaccattaaatccaaactatgatacattttaaaataggcgataaagtaaaagtaatcgacgataacctaagcggcactgtaaccaaagtgaacgaaaacgaaatcaccattgaaaccgattttggttttgagatgctctacgaacctaaagagcttctgcccgatgtaggaatggaagaagaaattgaattttctgctccaaaaactaccccaaaaaaagaggctaaaaaattaacgcctaaaaagaaaaaggtagaaaaagtttttgaccctcgtgcaaaaatgccagaaatcaaaactgaaaaggagaaggtggctaaaaaaacaaagaaaatcagaaaaccacctctggaaattgatttgcattatgctcaattagaaaactacgatcgattattggcaaaaaacttgattttagcccgccaaatgaactctctaaagaaaagagtggaaagagctagagagcatggctacgatcgtgtcgtgatcatccacggaaaaggagaaggtatcctagaaactgaagtaaaaaaatggctaaacgaaatgggctatcatttttacgatgccgatttccaacgatacaaattaggggcaacagaagtggaattgcctaaattctaattttcataagaaaaatcaaagcataaaaaaacggatggttctataaagaatcatccgtttttaaattttttattaaataaaattattctggtacaatgtcgaaagaaatttcagtttgtacacttctgtgaggtttcacaatagcagtgtaagaacctaatctcttaatgtttctacctaagatagatacatgtttacgctcaacattcacacctttttggttcaacaagtcagttaaatctgcgttatttacagaaccgaaaagtttatcaccctctcccactttagcagcgattactaattcaagacctttaacagcctcaataattttatttgcttctgcgataagagcttcttcgtgtgcttttctatcttctaaaaccttatttaattcctcgatgtttttaggagtagctaatttagccaaaccttgagggattaagaagtttcttccgtaacccggttttactgaaactacttcaaactcaaaacctaagttttctacgtcttttgttaaaattacttgcattttagtttcttattttgggttattttaataaatctgtttcaaatggtaataaagctaaatggcgagctcttttgatagcttgagccacttttctttggtatttcaaagaagtaccagtgtatcttcttggtaagattttaccttgctcgttcacaaattgtagtaagaaatctggatctttgtaatctacatatttgatttcgaattttttaaatctacagaacatttcagtagattgagtttcaatatcgattggagttaaataacggatttctgattcaccgccttgctctacttgttttgctaattcatcaattgccatagttgtattttttatttgttagacgatgctttttgttttcttctgtcttctgcccactcaattccgtgtttgtctaatttcacagttaagtaacgcaatacacgctcgtcgcgtttaaacatcaactctagatctgctaccacatttccttctcctttccattcgattaggtggtagaatccgtttcttttcaattgaattgggtaagctaatttgcgtagtccccagttttcttggtgtacaatctctgtacctctttccttaaggaagttttcaacttttttaactgcttcctccacctgagaatcagacagaacgggagttaaaatgaaaacagtttcgtaatgattcattttgtatgatttttaaattgggtggcaaagatagaaattatttttggttttgccttattttgactaaaaattttcgattaaacgcttgaaaatcattttttgccgtgatttttaaagcactaaacgccaaaaatacaaaaaaccgatttcattcagcaaaaatatctacctttgttttttattaaaaaatctgacttaaaaaatgggcattgttgcacggcaaagtattaaatattcccttgtaggctacctaggttttgccctgggaacacttgccgtaatctttatatttcccaatgatttagacttttacggaaaattgcgctatgtgctctctacggcagaaatgtttttgccttgcgtggtgcttggcgtgtcgttttctaatgtaaaattcttttacgacgcacaaaaagtgggcaaacaccagaattttttatgggtgagccttctgagcatgatttttagtttttcgctatttacgattttattttttgtagcaaattggcttttttcgagcatcaaagaatcggcggtatgggaaatgaaatctctgattttgcctttgattttgattttagcattaaatgctattttcaataaatatatatctaattttaagcgaattgcaattcctaatatttttgaaaatttatttccaaaaattgcgaatatcggtgctttttctttgtttttctattttggtttaaaagaaaaaatagcgtattcgttttttatcggaatgtttgctttttcgcttttgtgctatgtttggtatgcgcaccgattagaaaaactccagcctgactttagccttaattatttaaaaaccaatcaactctggaaaaaagttgtaaattatagtttatacggatttctgggcaatattgggcattatgtggcgttgcgcgtggacaattttatgattggggaactcatcgggtttgagtccaacggggtgtatagcattattctggcgattttatcgtttatgatgattccgcaaatggggatcaacagtatttctgcaccaatcatcaatcaacatttagaagaaaaaaattattctgaacttaaccaattttatagagacagttcgtttcaattattctttcaaggtttagtgattttttcctgtattttagttgggtttccctacctcacagaactgatcaaaaatggcgacaagctgcttgcagcctctcctattctgtgggttttgggtggtgctatgctctttgatctagcgacgggctttaatgggcacattatttcgctttccaaatactaccgaatcaatattgtgattatgctgcttttggcagcgctcacgattactttgaatttaatttttattaaagtttttgatttagggcttttaggcgttgcgatggcgacggcgatatcgctcaccatgtttaatttgattaaaatcactttcaactgggtgaagtttggcgtgttccctttgagtcgaaaaatgctaagttcgctcgttttaataggttctgctttttctatcgcctacctcctacccgagagccattatttctggatcaatttaatttataaacccctggttttaattatcttgacaattatcggaaatcagattttcggtatttttcctttggttgaatatctcaacaaactacgaactaagaaactttaggataaaaaaattgccccacggagtacgcagggcttaagaataatttcttcggcttatagccttattgtaataagattccaattattgacgcaaagttagcatttattatttcaaattcaaaataagtttcgtgattttaatcatgattagcgatttattaattaaaaaaatagatatcaaaacgatatttttcatatttttatggcaaattttagacaatgagtaaatatttaggtttagatttaggtagcaactctataggttgggctattagagaaacaaatcttgatggaaatcaatttgaagacaaaggagttcttacctttgaaaaaggagtagcttccgagaaaggcaatgaatttccaaaagttcaaaagagaacaatcagccgtggaaaaagaagaaactaccaagctgaaaaatatagaaaatacaaattaattgagtttttaattgcaaaagggatgtgccctttaagtattgaagagctagatacttggagaaaatacgataaagataaaaaaagaaaatatccacaaaatcctgaattcatcaattggattcgttatgactttgatggagatggaaaacctgactttcaattatttggagccgacaaacatgaaagtttatatatttttagagaaaaagccatcgacagcaattttaaaaaggtttttgatgacaatcctatgattttggggcgtatcttttaccaattagcacaaagaagaggattcaaaggaagggatgaagaagagtctaaaacaatcattgaaggaaaagaacatactgcgggtagaaacagaatctcagcatatatcgataagtataaatctttgggagctgcactctacaattttcaaaaagaaaatggtggtagaataagacaacaatatacattacgaaaagactatgagaatgaactaaagttaatttgtgatgttcaaaatatatctaaggatgattacaaaacgcttcacaaagccattatttggcaacgaccacttagaactcaaaaaggattaatcggaaattgtatttatgaaagaaacaaaaaaagagctccaatcagccatccattatacgaagaatatagaacttggattttaatcaacaatctcaaaattgaagctccaaaaggagaaaacagagaagagtatttgaaaaataatatttatcctattttcttaaaagcaagctcagattttaaaataaaaagcatcatcaaacagcttgataaagatggtgcgaaaatgcacgctagattcaatgaagagacaaaagttgtatcggctactttattgaatttctttaaaaccatctttggagaagattgggaagaaaaattaaattggaataacttaaacgacagacctaaacaacctacaaaacaaacgaataaaaaatacgactatcaagatatatggcatgtcttgtatacttttgatgatactgaacatttaaaagattttgccaaaaacaaactaaacctttcggatgatttagttgagagatttgccaaattcagtttgaaaaaaggttatgctacattaagtatatctgcgcttaagaaaattttaccatatctaagaaaaggcttcatctatagtgaagctgtctttatggccaatattcccaaagttttgggtacaaatgaaatttctgatggcttaatcgaatatatagcagaagaaatccgaaaaatacttagcaataattaccagcaaactcagattgccaatatatcaaataggcttattgaaaaaaattcagcaccagaagatttttatcaaatcgaaaatggtagaaatttagatgacaaagagaagaagctagcaaaagatgaaataattaatttttatggtgacgaatcatggcatgaattatcaattgaagagcaaacagaaattcaaaatgaagttgaatctaatttcttgacctatctgagaaaatccaacgccgaaagaaaaagagatagatttataaaacctaaaagaattcatgattctatctttcatttcttgaaggaaacctacgatctagatgattcgcgtaaaaaatatttatggcacccgtctgaacaagaaaattacccagcagcgaaagaatatatcaagtattctctaaatggcgaaacctactatgtacctgaagaaaacacagatatttttgaaaaaagaaacccgcgtgcagaatatgaaaacgcaagtaaacttttacttggcagtcctgttcctgctaaaaatggtttcaaaaatccaatggcactaaacacgctacatagattaagaaaacttataaatcaccttttagctgaagacaaaatagattcagacacaaagattattgtggaaattgccagagaattgaacacagcaaacatgcgaaaggcttatgaaacttggcagagaaaaagagaaaaagaaaatgaaggtttcaagaaaattattgaagaaatcaacacagaaaccaaatctaattatgatataaacgattccaaattaattcgccgcattagactatgggaagagcaaggaagaatctgtctctacacagggaatgtcattcaaatgactgaaattcttgatggtagtaaatacgattttgagcacacaattcctgctagtataagttttgacagcgaactctccaatctcactttggccgacaaacatttcaataatcacatcaaaggtaaaaaatacccaactcaattgtccaactacgacgagataaaagaaagaatctcatttatgaaggataagattaagaagctaaaattggagcttaaagattatcaaaataaagcatcatttgctagctcaaaggaaataaaagacaattgtatcgtaagatgccacatcataagatttgatttagaatattggcaatcaaaatacaattactttaatgttacagaattcaagcaaagttggagaaactcacaattacgagacactcagataattactaaatatgcattaccttatttgaaaactattttcaaaaaagtaacggttgaaaaagggcaagttgtgagtcatttcaaaaaaatactaggtgtagatgtgtctgatgataaaaaagatagaagtctacacactcaccacgcgcaagatgcagcagtattaactttaatccctttcaatgcgagccatagagatcgtttactgaaaaaatatttcgaagacaaaaaatttagaactaaaccagagaattggaaagattttaaagctcagtatatcatagatttctcaaacgacactctcataaacacccaaactgaaaataaacaaactttacaaagcaaaaaaattgtaagaaaaagagggaaaatacaatatattgatggaactaataagcccaaaattgctcagggagacactataaggggacaactatttgacgaaactttttacggagccattaagcaacctaaaaaagatgaaaatggcaaattcctttttgataaaaacggcaatatattactagaagatgaaatcaaacttgtcgtaagaagagatttgctttataaaaaagatgcccaaagtccaggcttcaaaaatttagacgaaatcaaaaaagtcattgtagacgaagcgttgtttaaaatgattgaaaagcaagtcaaagaaggcgatttcaaaacggcacttacagaaggcgtttactttttagacaaaaagggaaacaaagtcaaccgtataagacgcataagatgctttgcaaatctgaaaacagccgttcaagtaagcgaacaagattttaaatccaacaaagaatataaaaattatctcttagcaaataacgccgaaaactctgcatgtctattttatgaaaaagataaagacagagctatgcagattttgagacttatagatttggcagaattaaaaccaaaaagcgaaagagacttttttgaaacaccagcttttaatgaatttgaaataaaaaaagacaaaaaaatacctttaaaagctgttttgcatgtaggagatagagtcttattctacgaaaaatctcctaaagagatttatgatttacaagatgattatcaagaattttcaaaacgattatttgttatctatcaattcaagaaagatgggagaataaagtttagaaatcatctattggcagacaatgtaacggatttagaaaaaaaatacacgataaaaacttctttttctacaagcgaaatcccaaaactgatgagaaacacaaaggcaaattggactttcctaattgaaaatgttgattttaaaatttcattagatggtaagattatttttttagattaaaccatgctcaaaagaacacttttcttcggtaatccagcttatctttccacacggaatgagcagctcgtcgttcggtttccagaaaaagaaaaacctgaacgcacgttgcctattgaagatctcggcgtcattgttcttgaacatcctcaaatcactatcacatgtggattattgagcaaacttagtttaaacaaagtcctcgtcgttcaatgtgatgcccagcatatgcccgctagcgtatttcaaccgtttagcgggcatacgcttttttctgagcgactgaaaaatcagcttgacatgagcctaccgcttaagaaaaatttatggcaacagacggtgcaagccaaaatcaccaaccaagcaatgcatttagagaaaaataatattgatgctcgaaaattacgaagatggatccaagaagtgaaaagtggtgatggagaaaatcatgaggcttatgcagcagcctattattttcaaaacattttcccgattgaggatttttctcgcaaccaaaaaggcattccgcccaatcattggctaaattatggatacgccatattaagagccgtcacagcacgagccattacggcaagtggactgcttcccgctttgggcatttttcataaaaataaatacaacgcattttgccttgcagatgatcttatggaaccttatcgcccctttgttgatcaattaatcaaccaaatgcttgctaactttgagttaaccgaagaactgacaacaactcacaaagcggagctattaaaaattcctagcttagatgttgtaatagatggcaaaaaaagccctctcatggttgctatgagccacacaacaagtagtttctatgaatgtatagaaggcactagaagaaaaatcgcttatcctgaattttgctaaacctatggaagaacttttcactcgcttaaaccaatatcgctctatgtggattcttgtatcatttgacctgcctacggaaaccaagctcgaccgtaaaagagctagcaaatttagaaaacaattgctagaagatggattctctatgtttcaattttcgatttatatgcgattctgctcaagccgagaaaacacagaagtgcatataaagcgagtaaaagacattttacccaaacatgggcgtgtagccatttttagaatcaccgacaaacaattcggtatgacagaaatattccatagtaccaaagaggtggaaaaaccacccatgtaccagcaattggaacttttctaaaattaaaaaaatcatcaaaaatttatttcaaataaaaaaaggttgcagatttctacaatcctagcaaccttttcaactttttgatttacagaaagaaacaaggagtatcttgtaactaatcctacaaaaataataatttgaaacctaattacaacaacacacacattcaccctttacactatcaccttgtaactaatcctacaaaaataataatttgaaacctaattacaactccgtaggagaactaattgatatcatccacttgtaactaatcctacaaaaataataatttgaaacctaattacaacttgaaagataccattatcaatacaaccaagcttgtaactaatcctacaaaaataataatttgaaacctaattacaactacgaattggtcgctcatcaagtcctttttcttgtaactaatcctacaaaaataataatttgaaacctaattacaactttatattcataattaaatattcgtatttacttgtaactaatcctacaaaaataataatttgaaacctaattacaaccctcaggaccccccctgtaacgcctgccctcttgtaactaatcctacaaaaataataatttgaaacctaattacaacacaatcatcacgacttgaaagcactcgcatcttgtaactaatcctacaaaaataataatttgaaacctaattacaactgtatagggaattttgtaagaaaagagtatcttgtaactaatcctacaaaaataataatttgaaacctaattacaacctatctttttttgccatctttaatacccacttgtaactaatcctacaaaaataataatttgaaacctaattacaacctatattatacaagtagaaatgaagatggcttgtaactaatcctacaaaaataataatttgaaacctaattacaactttgtcagagtttaagctgtaagcccaaagcttgtaactaatcctacaaaaataataatttgaaacctaattacaactcgtcattgtaaagcgttaccgtcgttattcttgtaactaatcctacaaaaataataatttgaaacctaattacaacttctaagtgctttaattttacgggcgtttgcttgtaactaatcctacaaaaataataatttgaaacctaattacaactttgtcggctgatattgccaaaggaaataacttgtaactaatcctacaaaaataataatttgaaacctaattacaactttaaggactgggttgacagcgacactaagcttgtaactaatcctacaaaaataataatttgaaacctaattacaactttattgtaatattaaccctatttaaattacttgtaactaatcctacaaaaataataatttgaaacctaattacaaccaagtgcttgtgcttttacaatggcattttcttgtaactaatcctacaaaaataataatttgaaacctaattacaacataatcgtgtggcggttagattcgtgataacttgtaactaatcctacaaaaataataatttgaaacctaattacaacttgttggttttaattctgttatcattttatcttgtaactaatcctacaaaaataataatttgaaacctaattacaactatgacggagctcaggctgttgtagctgagcttgtaactaatcctacaaaaataataatttgaaacctaattacaactattttggcttggttttgcccatatttccacttgtaactaatcctacaaaaataataatttgaaacctaattacaacctcctacgctacaagtttaaccaaaataaacttgtaactaatcctacaaaaataataatttgaaacctaattacaactatcagcaaaccaaccgacatcaaacctacttgtaactaatcctacaaaaataataatttgaaacctaattacaacaattttatagcgcacattttcaacttcaacttgtaactaatcctacaaaaataataatttgaaacctaattacaactttcatcgcctttatttctttggctctccgcttgtaactaatcctacaaaaataataatttgaaacctaattacaactgttggtgtggggattaactttaatttattcttgtaactaatcctacaaaaataataatttgaaacctaattacaactacgatttttgaatttccaatgtgtgtccacttgtaactaatcctacaaaaataataatttgaaacctaattacaactttgaaatttctcagcccaccctctgaaagcttgtaactaatcctacaaaaataataatttgaaacctaattacaaccattgagatgaaaaagatggctaaagttaacttgtaactaatcctacaaaaataataatttgaaacctaattacaactgggagtgctttcaagtcgtgatgattgtacttgtaactaatcctacaaaaataataatttgaaacctaattacaactgtgggggcttacaagtcgtgatgattgcacttgtaactaatcctacaaaaataataatttgaaacctaattacaacttgagataaccccattgactacatagtaatcttgtaactaatcctacaaaaataataatttgaaacctaattacaaccgttgccactaaacataaagcccgttttcgcttgtaactaatcctacaaaaataataatttgaaacctaattacaacttgtttgccacattatttgccacatttttcttgtaactaatcctacaaaaataataatttgaaacctaattacaacttcaaacaatggaatatccattttgtaaccttgtaactaatcctacaaaaataataatttgaaacctaattacaactattatttacactacaaatgtaagtataaacttgtaactaatcctacaaaaataataatttgaaacctaattacaaccaaagaggggttggaactatttgggttatacttgtaactaatcctacaaaaataataatttgaaacctaattacaactgcgaaacattcaaataaggaaagcgattacttgtaactaatcctacaaaaataataatttgaaacctaattacaactaaacaaaagtgtttatatttgcattattacttgtaactaatcctacaaaaataataatttgaaacctaattacaacttctcctttgttaatgggttgtgtatgtgccttgtaactaatcctacaaaaataagaacttgaaagcaaatcacaacgatagtgtttctgtaaaaaacaaaaaacgagcggcttctgaattacaagaaagttttaagaagttcgaaaaattggaatttgtcattttaattgccaatgataagatttggagaattgacagagttactgctttaatgactccatcaaatgactttaaaataaaatttgcacaatttattgataaaaaataaacttgggcaagtagattgcctacttgcccgcattcatctgcggattggtttgcaccgctccgacttgtcttgcaagtatacaaaaactaaaccaaataataaacaaatgaatagaaatttagagcaggtgatgcgtgccatagaacaaagaacgcatcaatttttagatgatttgccaatcataatagcaaacgaggctttgcttttcgccaaagaaaattttgaccagcaaagttggcaaggaagcagcgtagagccttgggctccgagaaaagacaaagaaaatgaaaggagtttccttgtcaataccagtaatttacgacgaagtattgataaggaaaacgacaatacttgtgattactcaccctctcactttagcaaaacattcctaaaaaaataaaatgaaaaagcccttgccatattctctaccctagcgcccaattatcttgcaagcagagaaagcaaaggcttaatagcatagaaaagcaaaacgcctacctaccgctatttcttaagttttcttaagtctacagtaacatcgcactcatctgccaatttcaacacgccttccaaacggattacatgatctttgattttggtcactctccctttatattttctcatttctttttcttgcaacgcaaaaagcgaatcttgacttataggcttcatatctacttgcccaaacatggagtagctactttccgttcctggtaactctgggatgtcaaattctctaatttcaaaagaatatagtcgtttccattgcttgtttttataagtcattatcacccactcgttgttcgatgttgagtctgcataattcacaacgaaggacacttcatctccaccatcaccatccaaatctccttcatttttcacatacatcaatcctgcttgctgcttattatctgaaacaggaagtgattgcattgcaggattgctcgatgtcataaaacaatacggctttttattcaccaccacggttataaaatcataatactttaagcccttatagaatttgttggtttctttgtttgtttttccagaaaaataatgctccgtcaatttttctttttggccatctccatcaaaatcaccttcaatgctaaatctataccccttaataggctcaacaccaggcgcagatagcagcttcgccacatacgcatctaaatctttgattttccccgcttccggatcgattaaatcttcatccattgactcagtatttgaatcatcatcaggaactcccgagatggaatctgtcgctgtagaatcttttacgacttccgattccgatgggctaagatttgtaatcgtttccgcagtatttttacacgcaacgagcatagaactcgcaagcaaaatattgataattcgtaatttcattgactttgtctatttccacaaatttaaatacaaaaaccacaaaaatcattaattttaactacaattaacttaaataaaatacaatattctaattatcatcgcatccaattgccaaatctcccatctaatgaaaaattacaaaattgtgatgaaaaatattttgagtaaaaactcaatacaaataaaaaatacaaaaaaaggaagtttttattttcttccattattaaatacggtttaaaagtaaacgctataaacccaattaagatttatcacattttctttgattaaagtaatatacagtaaatttaatttttaaatatattttaacattttaattgtaacaataccacattttttccgtatatataaacccgagctttcgctaaaaccttgaaaagtttgaaggcttatttcattgaaaattaaatactaaaactaaaacaccctatgcgccaactaaagattacaaaacaggtaaccaaccgtgaaactgcgtcgctagacaaatatctacaagagattggtaaagtagatttgattaccgccgaagaagaggtggaactcgctcaaaggattaaagctggtgacaaaattgcgctagaaaaattgactaaagccaatttaagattcgtggtatcggttgctaaacaataccaaaatcaaggacttagccttccagatttaatcaacgaaggaaacctaggactcatcaaagccgctcaaagattcgacgaaactcgtggtttcaaattcatttcttatgccgtatggtggattcgccaatctatcttgcaagccttggcagagcaatctcgtatcgtgagattaccactgaacaaaatcggctctatcaacaaaatcaacaaagcctacgcagcccttgagcaagagcatgagcgtgctccatccgccgaagaaatttcggatcagctggatatgaccgaggaagatgtaaaagaatccatcaaaaactctggacgccatgtctctatggacgccccactcgtggaaggagaagattcaaacttatacgatgtactccgctcgggcgaatctccaaacccagatcgcgaactattgaacgaatcgctacgcatcgagattgagcgagccttgcaaacgcttacccctagagaagcagatttaattcgtttgtattttgggctaaacggccaacacccaatgacattggaagaaatcggtgaaacttttgatttaactcgtgagcgtgtaagacaaattaaagaaaaagccatcagaagacttaaacacacttcaagaagcaaaattttaaaaacttatcttgcgagataatctttcataaaaagggcataaaaacaaaatcgctgaattctttcgaactcagcgattttttgttgcaataattaatcaataaaaaattatgaaaaaagaaaaaaaaagccttcaagctacgcttaaagactcgtagagcgggagacgggactcgaacccgcaacattcagcttggaaggctgaagctctaccaattgagctactcccgcaattggactgcaaatataaaacggatttttaaattaccaaacttttcaagcaaattttattgaaaaaatttttacatttttatttatttaattgtaaaccaaacacttacttgaaaacatttcttggttcaaaatctggctcttgatagaaaaagtccacaatcttatccaaaaaacgattcaaaatcggatttttggctttggcaaatacaaaaacctcctctggcgtggcccctaccgagcttttaatctctaaagcggtgcgagaaaatatgattttggcatattttgaagcaattcccgccgaaaccatttcatacaacatgcgcaaatacaaagcatgcgattgcaaataccgagcatcgtaacccaaaaatccagattctagctcatttctgtttttaattaaagtgtaaaaacatactagcttcttatctagaaaacctgcaataagctcaaaatcatctttaagctcgtttttaagcgtgtaaaaataattcggtggcaagacataggatttcacctcagcattttcaaaaacgcactgatattgcttataaatctcatttttatactgctcaatttcgttgagcgtgagcgtgcaaaattgcaaatcattggattttttttaaacgcacgcttggctcgagtgcgatatttggtgcgcatcgcttgcagatagtccgaaaattctctccaattttcgctcaaattcatcaccatattgggctgaactttaatacctgaaaactgaggcaaaaatgcctgaatttgctttttttcttgaagattaaaatctttgattaaagtaatatttcgcttgacacccgtatatttttctattaaatcagcaattcgatccagatgtttgtaaaaataatgctccgccgctgtgttggcaaacaccgctgtgtgatttcccgtgagcatcatattcccaaaactaaatgccgtgaatttaattttttgcataaaacttttggaaatccattttttttcgctcacttgcgaaagatcaaaactcaacacttgacaaacagattttgcctgaatttcccctccttcggataaagtgatataaaatgctttataattttctggcatacttttttctgtagctctcaagtatttagcacttaaaaaaacatcattcgccagcttgccccattcgggaggcacatcctctattttgctaaatatttttatctccactattgaatcaaatctaaaaattgattttctgtaataatttttatgctttctatggcttgagcttttttcagttttgaacctgctttttcgcccactaccaaataatttaagtttttagacaccgaagaaacgattttccctccgtttttctccaccatttctttggcttgatcacgggtaaaagccgttaatttccctgtaaacaagaaacttaaatcttctaatttttgagaaagcatttcctgttgctctgcctgcatttgtagtccaaaagactttaaatcctctattaactgctgatgctctggctttgcaaaatattcttttacactctcggcaatgcgagttccgatggtatctaccgcctccagctcttcgatcgaagcttgcattaattcatctatactcggaaaagctttgactaattttttagccaccgtttcgcccacatagcgaatacctattccgtataaaaccttggcaaaaggcatttttttggactcttccaatgcgtgaatgatattgtctgccgacttctccgccatgcgttccagtggcaaaatgtcttctttcttcaatcggtataaatctgcaatattattcacaagattttgctgatacaaaagtgcaatggtttctgctccaatgctttctatatccatcgcacgacgactcacaaaatgcactaatctccctttgatttgcggtgcgcaaccgtcctcgtttgggcaataatatgctgcttctccctcgtttcttttgagtggcgttccgcactcgggacattctgcaataaacttcgtaggctccgttcctgctggtctttgactcaaatctacgcccacaattttcgggataatttctccgcctttttctacaatcacggtatcaccaattcttacatctaatttctcgatgatatcggcattgtgcagagaagcccttttcaccgtggttcccgccaaaagcacagggtttagattcgccacaggcgttacggctcccgttctccctacttgataatcaattgaatttaattttgtataagcttgttcggctttgaatttgtaagcaatagcccatcttggcgatttggctgtaaacccaagctcatcttgctgaaccatagaatttacctttactacgactccatcggtttcgtaaggcaattcatggcgtttttgatcccaataatgcacaaatt

SEQ ID NO: 316 - DNA, 17486 bp, synthetic construct
  source 1..17486: mol_type = other DNA
  misc_feature 1..17486: note = Synthetic
ggtcacattaaaagtagcggttacacccacaccttccgtaacgataacatcggtttgtaaaatagaaagaccttcggtgcctgtgctgtcatcatcattgatgataccattagcggtagcatcgttaatgggcactaacggattggtagtgctgttcaaggtaacggtataggcttcttgcggttcaatgataccatcgtttatgatattcacaacaatctgttgtacctcaccatcattacccgcaaaggtgatagttccattagtgataggggtgaagtctgttgcggtagccgtaccgaaagcggtagagaaatctacatcgaaaccagaagcataatccccagttaaggtcacattaaaagtagcggttacacccacaccttccgtaacgataacatcggtctgaacaatagaaagaccttccgtacccgtgctatcatcatcattgatgataccattagcggtagcatcgttaatgggcactaacggattggtagtaccgttcaaggtaacggtgtaggcttcttgcggttcaatgataccatcgtttatgatattcacaacaatctgctgtacctcaccattattacccgcaaaggtgatagttccattagtgataggggtgaagtctgtcgcggtagccgtaccgaaagcggtagagaaatctacatcgaaaccagaagcataatccccagttaaggtcacatcaaaagtagcggttacacccacaccttccgtaacgataacatcggtctgaacaatagaaagaccttctgtacctgtgctgtcatcatcattgatgataccattagcggtagcatcgtttataggcactaacggattggtagtgctgttcaagataacggtatacgcttcttgggcctcgataatagcatcatccaagatggacaccacgatttgttgtacttcaccatcggtacccgcaaaagaaatagttccattggtaataggtgtaaagtcggtggcggtagccgtaccaaaagcggtagagaaatctacatcgaaaccagaagcataatccccagttaaggtcacatcaaaagttgcggtcacgcccacaccttcagttacgataacatcgctttgtattatggataaaccttccgtacctgtgctgtcatcatcattgatgataccattagcggtagcatcgttgataggtactaaactaccattagaagtgtttatggttaacgtaagttgctcttgaccttcaattatattatcattaataatagttactggaaggttaatagtatcattagctcttgtgcctgcagggaatgtaattgtgccagaagtattagctaccgtataatctgctggtgtggttgcagtaccattggcaattacataatttacatcaaaagcatcttgtatatcgggaccagtataacgaatggtaaagttggttgtgccttcattttctgaaactgtaaaaccttctgcagataaaccttgattagcgccaaagctttcattttcttctattgtacctacaccattaacatctactagcggtataagaatattagaaggattcaataatctaatgtttacggtttcgtcttgctctagtagtaaatcgtcaattatattgagtgtaaccgtttgggtatctccattctgagtgtttgcagggaaggtaagcgtacctgtatatgcatttgcatctattgtgtaatctcccgggcgaacagctgttccattggttacttcataatctatggtaaaaccgttttgaatggtaagtcctttgtatgaaactacaaattctgcagtacccacattttctgggacattaaaatcagatacactaatccctaggccaggagcaaaattgtcattgtctaaaatacgtaaaacactgcgttctagattaatgcttacccttcttggccccgttccatattttgtgttctcagcggaattataagactttacaatttcaaattcttccgtaggttcaagaatgttatcatctatagtaggaacaggaataaatagttctgtaccagcaactgagccttctggaaaagacaccgtagtagaaaagctattaaaatcggctccatctgtagctgggtctgtggaatttgctttttcttgaaataaggcatctaaaaaatattcgtcttctatacctacataggtgcggccgtcggaattttgacctgtagataagaagaaacggtattgaatatcatcaccttcagttgcactaaagttccccccaactatataagctacatcggtatctattacggtggcaatagccttgtcatccgctaaggtaacgtcactagtagggttgccaatacttactgtaaaagtttgttctgtagcttctgcccaatcatcatcaatagcaacaatacccacagtagcagaactagcattggcaggtatagttacattggcaggtttggtataatcatcatctgtagtggtatcattgctataactaacgtcaaaacttaccggattgctcaatatatggctagatgttacagtaacaggtatggtatttccttcttctgcagcaccgtctgttattctaatatttggtttgatggtaaattgtgtggggtcgtaattgggtaaattacaatcatcaaaggagccagaactaacgctggtcttttctgtggaattgatagcaccggtataggttgcagatgcctgcaaagcaaaattatctaaacaaccagggcaggggtcttttacgtgtacttcaaaatctaaattatagctaggagaagtaatatcagtagctccatcaggtacagctattgttagtactcttgtggctgcattaaagctgtacgtagtaccagcgggactactagcgtccccaataaaatctaactgttctggtaaggtggttgtgatgaccaagtttctaacatcatcattacctgtgttgttcaccgttaaacgtaatatggggttgtctccagcttctaagaacgtattgttatcttccgtagttaactgcatggagccaacgttaggctcaaaaacttctatgcttagtcccgttaaatatacaccataggtttcttgggtagaggtaatccttaatctagccgaagtttggttgttgccaataatgttattagctgtgttttttaattcaaaaatccctgcgtcaaatcctaatgtattggtacttgcgggtgttctatctaagaaatctgtattctttaaggtgattctactattaaagaaattggcggtatcacgaacaacgtttgcacccaagccctctgtcatttcgaaccattggttgctggtgtctaatatttgaaaacggtcaccagtaatatctcggtcaccttctaaggccccaaaaataatatccgcatttactggtccactaggaacggtctgaaaaccagaaaaggtaaactccgtttcgccttctgtttgtgtggtatgtacatatccatcaaaaagagtaacatttctaaggtttaaagtttcgttttcatacacaaaaacaatttgccaaccaccagaggtacctgtcctattatttaaatgggattgcaacctaccttctgtagcttttacattagctacttgataaatgccaaaagggtctgccaaggcatctacctctgcagtaatatctttaacacaaacgtaagggtcgtttacaaagtgggtgtctctacccctaaatattacttcatctgcatcaacagtgctatagttggattctcctggaagccttaattttacttgtctaaaattccagttaggctctgctccacctgtacctgcaatggtatctgtagccgttgtttcatactccttatccgcagcagcccaatacagcagtacttttttaaagttgtaacaacttacatcggataatggatttttaaattctgcattggacgaattaaaagtggaattatccgagtcaatatccacgaacacattatccttaaaattgtgatttccattttctccattataatcgccagtagctgttctagaaagtacagtattggcaatcatggtaacatccccatttatggtttctgaatacctagcagagaaaggtgtttgtagctgcgcaactaaaaattgttgtgtaagcaacgaaaatattgcgaagatagcaagtctcagcctgtaatttttagcgatgtaattttttcccataggggttaagtttatttgttctggtgtaaattgatttgggtttcaattcgggtataaaattaaacagcccgttacctaatcgataaaatacacggtgtttgtgtggtttatttcgttaaaatcacaaaatctgttaacggataaatgttaaaattagtattaatttgttgtgaatcaattgctctttgtggttaacgtttggcataagaattaatgtaagaatttgtaggaaggaaaaattattagcttgattttagttactgtaaagcggattattttaattaattttgaagtctagatagtttatattatgagtgctaaaaaaggaaaagtacaagatcttatacaagagaaattactggaagacagaaaagttttcctttggggaatggttaatgatgattctgccaaacatgtagtggataggcttttgtatttagatatgatcagcaacgaagaaatacaattgattatcaatagtcctggaggttatgttacttctggtttcactatttatgatactataaagcaaattaagagtccggtttctaccgtttgttcgggactagcagcatctatggggtctattttgttatctgtgggtgaaaaggggagacgttttatacaaccccatgccagagttatgattcaccaacctagtggtggcgctcaaggacaggcgtctaatatagaaatacaggcaagagaaattattaagaccaaagaaattggggcacagattttagcagataattgtgggcaatcttttgaaaaagtaatgaaagattttgaccgtgattactggatggatgccaaagaatctttagaatatggaattgtagacggcatcttagagtagtaaagtttaccgtttaaaaatgaaaagaccttcataaacaatttatgaaggtctttctatatatagacgctctcgcggaatagttcaacttatatacgtatggaagtacgttttggatgttttgtctaaaaattatcaggatttttaataatttcttgagcccgctcttttaattgggcaagttccgatgcatttttcttttctaatagatttagcatcatggccattcgctgattgtctttaaaatactcttttttgtcgtctaaaaagttccaatataaggcattaaaagggcaagcatctttttccgtttttttagtgtgtttgtaatggcaacctttgcagtaattacccattttattaatgtaattggcactacttacatagggtttggtagccactatgccgccatctgcaaactgactcatgcctctggtgttggtaatttctacccattctatcgcatctatataaacacctaaataccattggtctacttggtctgggtgcaattgtgctagtaatgaaaaattaccaattaccattaaacgttgtatgtggtgcgcatacgctgtatccaaactctgaccaatagcatgctttagacagttcatttttgtattgcctgtccagaaaaattcaggtagcttgttggtgttgtctaatttgttcagattggcgtagtttggcatttctttccaataaatacccctcatatattctcgccaacccaaaatttgtcttataaaaccttctacttgagaaatagctatctgttggtcctcatcataataactatctaataccttgtttataacctcttttggagaaaccattttactattcatggcaaaagaaaggcgagagtggaatagaaaatactcctgggtgtgtaatgcatcttgataatctccaaaatgtactagtaactctttgcaaaaatgattgagtacggcaagactgtccgctctagaggtaggccagcttaaattattatctggaatgttaccaaatgtaactatgcctgcggcttcaatctctgctaacaggttagttgcgtcttttctaaagcccctttcgtgcggaatttggggtgctccgttccatttttttctattgctatggtcaaaattccatttgccaccctctggttgttggtctgctgccatcaaaatatggtgctttttacgcatcatgcggtaaaagctttccatcagcaagttcttttttcctttaaaaaattcttctaggtctttacgtttggtataaaagtgttcggtgtcctccacgctagtatcgcaactaagttccttgcaaatatttagtaattgctggtctagccggtactcatctggcaattgataggcaaaagaagccgcttggtgtttggatacctcttgcgttattaattcatttaagttttgcggattatcctcatcattaattttgtagtattttacctggtgcccttttgtgcttaattcttctgcaaaattgcgcatcgccataaaaaaggcaaccactttttgtaagtggtgttttacatagtctgtttcttggcgcatttctgccatcaggtaaagtacgctgtcatccgtactactaaaccagttgtgcttactattaagttggtctcctaagaccaatcgtatcgttttaattttcatgtagccaaaggttttgatacgtgttttgtgggtcgtagcgttctgcttgcaatttggtattgaattttcgattgcgggggtcgttacctacaccactaacatattgccaattgccccaattgctatgtacatcataatctattagttgctcttcaaaataagctgccccaatacgccaatcttgttgccaagttttagaccaataacttgcaacgttttgtcttcccctgttgctcatccaaccagttttggcaagttctatcatattggcatttacaaaggcatctggagtgtttccatctatccactgttgcttttttctatcgttcaggtgccaatcatacgtcctgtccataaaaccacttaaatagaataaacggtcgttatattttaggctagcgtatttaaaataatcgcgccaaaccaattcaaaaaataaccagtaggtactttgatttttagtaatgtttttctcaaatttttgaatttcccagtatatttctactgcagaaatacttccatttgccaaccaagcagataatttagaactgtaatctattcctaaaagtccatttcttgtttccttataatgggctaaattttcagttttataaaaataatgagcaatacgctctttggctgcagtactgccaccactaaagggaaaggctgtatttaagttgggttcaaagtcagaatagcctaaatcttttagcgtaggaatttggttgttttctgtggtgaagtaattagaaggggcctttggactgcactcggaaattggtcttctaaccgtggcatatttttcgcacttttttctaaaagccgtaaaaacattagggatggtatcaaagttaggatagggaatatcgtctgggtgaaataaaaattgcgagtacgactcatacaaggtcacgttctctgtaagttgttcctttacttgcttaagactatccacttcttccttagtccactctttctgcaaataaatggttgttatatggtgtttgcttactaaggcagggatatacgtttctggactttcaaggacaacaaataaagtaatgttcaatgctttgagctgcgcttttaaatctacaagcgactctaataaaaacttggcgcggtattttcccatttttgtaaaaccgaaggaagattttttaaatagcaatgggtccaagcaataaacggctattgttttagtgtgctcgcaagcttttaccaacgaaagttggtctgtaactcgcaagtcgttcctaaaccagactagcccagtacctgatttttgtatttgtttttgctgcattttttgctacaatattttacatactcccaattacgttcccattttttacgccagctaaatggccggttacaaacaggacaaattttagtaggtaagtgggattttgaatgcaatggattaaaatgtttaattaaaacaaaaatatattaaacaaaataaatctttgccaataccatgttattatttgttcttacatttaacgattaattaaactccgctcccataaacaggaattaatgaagcagcaagcagcaaaaaatatagccataataggttcaggattagtcggttcgctattggctatttatttaaaacgaaaaggacatcagattactgtttttgacaggcgaccagatattagaacggtagagttttctgggcgttctatcaatcttgcaatgagcaatagaggctggcaggcgcttagagaagttggtttagaagatgaaatcaagaaaattgcaattccgctctatcaaagagccatgcatgtaaatgacacacctgtttattaccaaaaatacgggaaagaaggcgaggctatatggtctatttctagaggtattttaaaccgtaagatgatagatttagcagaggagaacggcgtggaatttagattcaatgaaaaagtttgggatgtaaacctgccagaagcaaaaatctatacgggcgaaacggaaaaaggagaatggaaagaatatgcctatgaccatatttttggttgtgatggggcattttctagagtgcgccataaaatgcagcgtagaagtaggttcgattattctcaagattttatagatgtagggtataaagagctcaccatagcacccaatgaagacggtagccataaactggataaaaattcctttcacatttggcccagaggtaagtttatgctaattgccatgcccaatttagatggtagttttacgtgtacgctgtttttaccttttgaaggggatgtatcttttgaaaccttaaccacagaacaagaggctaaagacttttttaaagagtactttcctaacgtacgtaaagagatagaagatttaactaaagatttttttaaaaatcctacgagtgcaatggtgactatgaaatgttttccttggacgtattgggataaagtagccttggtaggggattctgcccacgccattgtgccgttttacgggcaagggatgaatgccggttttgaggatatctatgagttacaccaactgatagaagcgaatggagacgactgggaacaaatttttaaacagtacgaaaagaaacgcaagccaaatgcggatgctattgcggagttaagttaccgtaattttatagaaatgagtagtaaaaccgccaaccctatgtttttactccagaagaaaatagaaaaaaagtttgccgcggaacatccagataaatggacacccgtttacagcagggttaccttttctaacagaccttatgcagaagctttagaactaggagatgcccaagaacgtattatgcaacacgtaatgcaactccccaatatagaagaagaatgggacagtaaaaaagtcacagatactatactgcggttgatagcagctgcagacttagcataaaaaaagccttccaattttggaaggctttttttttatagcctcataatacactaaggacaattttttaaaagaattactctttggtgtaagaaaaaacactactttgtaactgccaaatttagatttggacttcccccataaatattaaggtcattaagttggagttaaaaactcttttagtagttgaaaaaaaatcccacggagtacgcaggatttaagatttttcttcggcttatagccttattgtgaaaagctttcaggcttctaatatacaaaaataatatatgagcaacttaactttaggaattgaccttggtaccaactctatcggttgggcaataagagatatcacggtaaaggacaaccaaataattaaaaaaggtgttttaatttttgataaaggggttggcgaagaaaaaggcatcgagtttcctaaagtaaagaagcgtacagaaagtagaggaaagcgtagaaactatcaagctgaaaaatatagaaaatgggcgttgctagagtttttaattgaacaacaaatgtgtcccttaactttagacgaattaaatagctggagaaaatacacaaaaaaagaaggacgaaaatatccgcaaaccgaagcatttatcaattggttgcgttttgattttaatggagatggaaaacccgattttcatttgtttggcggtgacaagcacgaaagttattatttgtttcgagcaaaagcggttagtgaagaagaaaatgatggaaaggtctttaagaataatccagaaattctagggcgtgtattttatcagcttgtgcaaagacgtggctttaaaggtagagacgaagaagaagcaaaaactatgctcaaaggctcaaaagatggtacaaccaaagggagagatgctattgcagattatattgagcaatacaaaagtttaggagccgctttatatcattatcaaaaggaaaaatcaagtgatactgaaaaaattagaattcggcaacgttataacctgcgcagagattatgaaaacgagcttaaattaatttgtaaaactcaaaatctaaacaacgacttttattcaaaattacataaagccattatttggcagcgaccactacgcacccaaaaaggtttggtaggactctgtacctatgagaaaaacaaacgaagagcccctgtaagccatccgttgtatgaagaatatcgcacttgggtttttatcaataatttaaaaatacaagcacctgaaggttgggaacagagtacatatttaaaggaaataatctaccctatgttttacaaatcgggtaacgattttagcttaagtaccatcttaaaacaactgaataaagacggggcaattattaattctggttattctaatcgagacaaaacaaaagtgctttccgccaaattgcttaaaaattttgaagacctttttggtgataagtggaaaaatgagcttggttgggatgaggcctttgtgcgagaagaacgacccaaaaagaaaactaccactcgttatagctttgaagatgtttggcatatactaagcacctttgatagtgaagaaaagttaaaagagtttgcattagagaaattgaagctcagtgaagaaaaagccaataaattttctaaaataaaactacagcaaggttacgctacattgagtctttctgccataaaaaagattctcccttatcttaaaaaaggatttatatattctaaagcggtgtatatggctaatattcaaaaggtactgggaacacatgaggtttctaccggatttattgaccatttctctagtgagattgatgtaatatataatgaagttgctactaaaagaaaactcaataatgttttaaatggattatttaaacacgaactagtatcggaaggtgattatcatttaagcgaaaatgaagatttagatgtctcggaccgtagtttgataaaacaaaaattgattgatgaactcggtgaaaagacttggaaagaaacaaatacagaggaacaagaaagctatttagattatatagcaaaagaatataagtcctttttacagaaaccttttcaggctaaaaaaggcgcatttattgagcagccccgtattcatcagaatatttttaattatatacaagaacactatgaggtagctgatgaaaacataaaatttttatggcatccatctgaacaagaaaaatatcccaattcatcaatttacgagaaggtagaactaaaaagcaaaacggtttatatcaatgaaaatgaagtggaaacctttttgaaaaagaatccaagtgcagagcttgaaggaatttcacttaaattgttagaaagcccagaacctataagtaaaggttttaaaaaccctatggctttaaaaacacttcataagttaaagcatatattaaattatttattgcagaccaatcaaatagatgcgcatacaagaatagtagttgaaatagcaagggaactaaacaacgcaaattatcgaattgcactagaaaggtggcaaaaccaacgagaacgtgagaataacatctttaaaaaaaccattgaagaaataaataatgaaactggtactacttataactccgaagataaaaacttaattagaaaaattcgcctatgggaagagcaaggaaaaaagtgcttgtatactggagacactataaacaaaagcgacttgctcaatggtgaacattttgatattgaacacaccattcctgcaagtataagttttgataatgagctaaaaaatttaaccctagcaaacaaaaattataacgccaatgtaaaaggtaaaaaatacccaacacagttagataattacaatacagaaggtgtatttaacggtagaacaatacaacctattataaaaaatattgaagccatttttggcaaacgaacgcttgaaaagaaaaccgtgaaaaagcgcggcaaaacggaagaagttaccgtagttcagtggagtaagattacagatttagaaaagcaaatagatgaatacgttaaaaaaacaagctatgccagtacaaaagaaataaaggacgcatttattcaaaagcgtcatcaattaaagtttgatctagactatttaaaacaaaaattacaaacttttactgtcgaagagtataaagccaattggcgtaatagtcaattacgagatacccaaataatgacaaagtatgctgtttcttacctaaaaacagtatttaataaagttgaagtacaaaagggaaatgttgtcaatattttcaaagaagtatatcgtgtaaaattgtctagtgacaaaaaagaccgctctaagcacagtcaccacgccatagacggtgctatccttactttaatacccaaaccagcatatcgtgacgaaatcattaagaaatatcaattagaaaaagataaccgtacaggtagaacctatcatgagaagccagtagattgggcagattttacaccaagtttcatcaaaaatattgaaaaagaaatcctcatcaataacttaaaagactacagaacgctcacaccaacttttaaaaaggttagaaaacgcggtaaaatagattatgatgataatggaaatgtaaaatgggcaaaaggcgatgcaatacgtgggcaattacacggcgaatctctttatggagccataaaacagccaaagcgtgatgatttgggtaaaatcatttttgatgagaataaaaaaatgcaacttgaagatgaggtaagacttgtaataagaaaaccactcttgtacgccaaagacgctgctagcccagggtttaaaaaactagaggacatagaaaaagttattgtagaccaagcgcttttccagataataaaaaatcaagtttctaaatccgaaagctttaaagacgctttagaaaaaggcatatatatgcttaacaaaaaaggagaaaaagtaaatagaataaggcatattagatgttttgatagattaaaacacgcaacggcggttcagcctcatcaacatacttttgtttcagataaagaatacaaacaaacaacctatgcacaaaatggtgagaatgtttactgcttattttacaaaggaaatgtaaaaggtaaagaagaacgggctattagcattatcggaatttttgacttagcaaaacttgacattcaaaatgaaagagagttttttgaaatcccacattttaattcagtagttaagaagaaaacgcaattacccttatacgctgttttaaaggcaggacagaaagttattttttataaagaaagtttgcaagaacttacagagttgacgaaagaggaattatcacagagaatgtataaaatgtatcagtttgagtctgatggaagaataaaatttaaacatcatattatttcaggaagtaacacagatattaaaaaagattatggagaaaaatcattaatgcattttgatgatttttctcctcttttaagaataacatcaagtggctggaattttgctatagaagacaaggattttgaaatgaggttagatggaattgtaaaatggaagttttaagctatgattaagcgcactttattttttgctaatcccgcctatttgagtaccaaaaacgaacaaatggtcgtcagttttccagaagaggacaaaaaagaaactaaaatccctatagaagatttgggctatgtggtgctagaaaaccagcagattaccattaccaatggtttgctaatgaagctggtgcagaacaaaacggcggttattagctgtgaccaacaacatttgccctgttcattttttcagcccttagtaggccatacggaacaaacggaacgtatgcgccatcaattaaatgccagccttcccttaaaaaaacaattatggcagcaaaccgttactgccaaaatagagaaccaggcacaacaccttttactacaaggtaaaaatgcgttgaaattaaaacgttgggcaaaagacgttaaaagtggggatacggataaccatgaagcttatgcagcagcctactattttcagaatttatttacgattccagcttttagccgtaaccaaaaggggatagcccctaataatttattaaactatggctatgccatacttagggcggtaacagcaagggcattgtgtagtagtgggcttttgccttcggttggtatttttcaccgtaataagtataacgctttttgtttggcagatgatgttatggagccttaccggccctttgtagatgctttggtgtatgatattgtggaaaccggttgtcaaatagaagagctaaaccagaatttaaaagcagcattgttacgtatacccgctatggatgtgatgatagacggtaaacaaagcccattaatgaatgccatgagccgtaccacaaatagtttatatgagtgttatgcgggcagtagtagaaagttgttgtatcctaatttttaaggagtacacgtgccattataaaccatggaggaacatcgttttcaaaggttaaaccaatacagaagtatgtgggttttagttttttttgatttaccaacagagaccttaaccgagaggaagtatgcggctaagttcagaaagcagttgctaaacgatggtttttctatgtttcagtttagtatttacctacgtttttgtcctagtagagaaaatgcagcggtgcatataaaacgaacaaaaaatgccttacctaaaaagggaaaagtaggcattatgcaaattacggataaacaatttgggatgatggaactatttcatgggcaaaaagagcagccaccagaaccaccaagccaacagttagaactattttaaaacccaaaatgtgaggtttggtgcaagcaagaccagatttttaagcctgatttttaaattctaattacgctattaaacacaagaaaaccagctttttgcagctggtatcctgtgaattatccataaaaatatagaactgaaagcaattcacaacgatgaaaatggcgattacgtagggggtaatcctgtgaattatccataaaaatatagaactgaaagcaattcacaactaaacacttacggaactattgagttaaatacctgtgaattatccataaaaatatagaactgaaagcaattcacaacgtggtagatggtaatggaaagtctattaacctgtgaattatccataaaaatatagaactgaaagcaattcacaacttgcattactcttaatttatttctgttctacctgtgaattatccataaaaatatagaactgaaagcaattcacaactaataagcgttttatattatgagagaaaaacctgtgaattatccataaaaatatagaactgaaagcaattcacaactacaggtagtaaaagctttaccaaaagagtcctgtgaattatccataaaaatatagaactgaaagcaattcacaacctttgattgttggggtgcttcttggaccccctgtgaattatccataaaaatatagaactgaaagcaattcacaactgctagttggagctatgaatattgtgggacctgtgaattatccataaaaatatagaactgaaagcaattcacaaccctaaaatgggtgggcattattatgatggccctgtgaattatccataaaaatatagaactgaaagcaattcacaactcgggtatggtcataccggaacggctcgaccctgtgaattatccataaaaatatagaactgaaagcaattcacaaccccagcaagtagacacaatataaatgcagcctgtgaattatccataaaaatatagaactgaaagcaattcacaacctccaaatctaattgttatgtcggcaaaacctgtgaattatccataaaaatatagaactgaaagcaattcacaactccgtcttctgtcggtggttccggccaagacctgtgaattatccataaaaatatagaactgaaagcaattcacaaccaacaacaacggttagtttaatcgtagcatcctgtgaattatccataaaaatatagaactgaaagcaattcacaactttttatgcttataattcagggatgtagttcctgtgaattatccataaaaatatagaactgaccgagcgtagcgaccgatgcattcctgtaaaaaaaaaaataacaagccatgcataaagcaattactcacaagttggtagtttttgcctagggagttcgtgaagctgcaagcagctttcacaacagtttgccgtatatcaatgaacatctgtttagctcatcataaaaatatagaactgaaagcaattcacaactcttcatcagcagtagcagttacagaaaacctgtgaattatccataaaaatatagaactgaaagcaattcacaactaacaccatatcaaacgttaatgaattagacctgtgaattatccataaaaatatagaactgaaagcaattcacaacatgtatcattataactttcttctatctcatcctgtgaattatccataaaaatatagaactgaaagcaattcacaaccaactagagccaaaaaagaactaccgcaacctgtgaattatccataaaaatatagaactgaaagcaattcacaactcatggctgctgacacttcagggttttcatcctgtgaattatccataaaaatatagaactgaaagcaattcacaacttgtaattagtgaattagaatattacagagcctgtgaattatccataaaaatatagaactgaaagcaattcacaactagtaagtttaaccgtgaggtgcaagacacctgtgaattatccataaaaatatagaactgaccgagcgtagcgaccgatgcattcctgtaaaaaaaaaataacaagccatgcataaagcaattactcacaagt

SEQ ID NO: 317 - DNA, 14645 bp, synthetic construct
  misc_feature 1..14645: note = Synthetic
  source 1..14645: mol_type = other DNA
aagaatttgctgattcaatataagatctactttgatccagtttcctaactttataacgtttacggagtgaagacgaaaggccgttgatggctttcacttcgttttcaaacaaatcaccaacttcaatcaccacacttgtggagtctgcattataggtttcgatttttgaactaaaaaggattggaaaataattattagcctgtacagatttgtaaataggtgactcttcatcactcatattttcaaaacttatcacctttacatctatatttccttttcgctttgtccaccgaactacctgttcatttactttagaaccggcattcacataaccgcccccataaccatctggcaccccggcaatacgacttaccaaaagcatatctttatccagcaaatctaccggaatttcaaaataaagtttgtcatctacaaaatgcgtagtaaaaagtccttcatcagattcagcttctgaagtgatgacttcgtcgtaggatttgagtccgtttgttgctttctttgaagtgttttcagccgatttatctttaccgttgaaaacagatttttcgcttccacaaccagctgcaagtattgcgaccagccccagaataggtaatttttttatcatgaatttttattttggcttcaagataagcaaacctgataaaaggttgaaataatcggatgagaagaatatatattgtcaatacattatcctgaatttgtttaagatctcagatgtaagtgtcttaattatgttagaagctgaaacaagttcagcttgacgtataaaagtttccaaaatcagccttccttactctgaagaaatcctggatctgctttcggtattcatcaacctatcccagaaagtaaaataaagtccgaaattggttttgaactcggcgtgatgaaaatgatggtgcgtagcgccaataaacaattttccgaagcgactttttataaaagcttcgggataaatttcaatatctaaatgatttatcacgctgctaagcgtcataaaaattaaataaacaccaattacaattggatgaacaggcagaaagagtagaattaccggaactactatagcttccagtaaagattcccagggatgaaaggagaaagccgtccaggggctgggcactaagctatcgtgatgtaccttatgaattttcttaaagaccaagggattgtgcatccagcgatgcacccaataataataagtttcatgaagtagagaaagtaaaataaaactcaccggtaaataccataatccaaatttttcaagctccaggtaaatttcggtaaagcccttttgccacagaaaataggtaagcgcgccaaaaaagccaaaaatcaccgaagaccacatgctccaataaatctccttttttaactgcccttttctaaaaccgcgtttgcttaatcttttattactaaatttttcacttttaagtctgtaataataccagtagaatattcctgcggaaaccaggtacctaagaaaaactgcgacaaaaaagataagcacacaaactaagaaaagccccggattattaatttcaaagaaaatcatggtctactaaagtaataaggataaaatatacgaaaatttcaatctttcaactttttcaaaacctgcctccagagctactcttcttaagttcatgctatttctctattggtcgtctaaagtaaccgcatctggatttgcacctaatctttctaaagtatttcctatctcttccgtcattttaggaggcccacatacatagaatttctcatcaaaattttctatatgttgctttaaaaaattttcatcaatataagctttggtaaagtctgtgtctttttgatcggtgattacataagtagcgttttcacccagcatagcatctaattctgttttcaggataatatctttatctgttttattagaataaaacaatttaatgccatttaatttattctctttctttagtttgcgcaacatggcaatataaggtgttattcctgcgcccccggcaataatatatcctggacctttgtattctatggcaccccaggtatcgcgaataatcaattcgtctccaggctttaatttccctaaccgttcggttacaccatcgtgatctggataaatcttaatggtaaattctaaataatcatcttcatttaggctggtaaaggtaaacggccttttttcgtctttccacttttccttatttatagaaacctctgtagcatgacccggggtaaactcatagccatcaggcttttctactacaaattgtttaacatcgtgagttatagttttaacttccttaatctttactgtcttctccattttattttttttttaaacgctatagtttaatttactggtttaaaaaggcggtttcaagacatttaaccttctttaaagactttaagctcaagttttaaggaagctttatcaatctaaattctaaaaccacgttttaaagaaaatcaataagccgaagcgataaaaacaattccttatattcgacttaagtttgaaaaccgcaaattcatgaagctaactccccctatttacaaggttattattatagttttacttttgctttccggctcaagtattcaggctcaattccctttatctactacacaaaaccaagaacaggaaaaagataaaattccagaggaccctctgggaagaagaactcctcgaggaaccgtaaatggttttatagacgctatggccggggtaaattataatcttgcagctagatatttgaattttccgccaggaatttcttcgcaagagcagaaagagcaaatcgtccaggttttgcaacgcttatttgatcaaaaaggaaatatacagccttattatataattagtaatgagcaaagtggcaaattagatgatggcttagatgccaacctggaacaaataggaagcgtaaatgccgatggcgagactatagaaattttcctagaacagtatgatgatgaagcggggtatccaatatggcttttctcttctgaaaccaccagtgctattagttcacttagcctggaaaattctgcttttattgatgaaataacaccaggtatttttaaaaaatatctttggggaggcgttccggccgggcagtggataattgcagttgttcttatggctttaagctattttatttctttattaatagtttcaatcataatctatctactgaaaaaattatggaaaaaagcaagacattcgcctgttgcaggaattattaccacgctaaagctgcctgtaaaactttatatggccgtatggatatttgtatccatctccagaaaccttgagctttcaattattctaagacaaaaattcagcgctataaccataacggtaggaattgctgccattctaattcttttatggaggctatctgactttattggaaaaatcactcaggaaaaaatgctattacgcggaaatcccgccggcgtctctatagttctatttctacagcgggccgctaagatcgctatcgtagcttttggtatcatcgctattctaggagcagtaggcattgatgtaactacaggcctggctgccttaggaattggtggtatagcactggcccttggtgcacaaaaaactatagaaaactttgttgggagtgttactttaatagccgatagacctattagggttggtgattattgtaaagtgggagaagtaacgggacatattgaaaaaataggtattcgctctacccgaattcgtactttagatcgcacggtagttactattcccaatggtgctttttcatctgatacaatagaaaattatgcccaccgggataggttcaggtttgcaagtgttttaaattttagatatgaaacctcatcagaccaattacgctttttacttgccgaactacgaaaagtactctatgcacatccaaaagtttacgaagatccggccaggattcgttttattggttttagtgcacactctttagacctggaaattttcgcttatttagaagcccgtaattatgatgaatttctggaaatacgggaagaccttatgcttagaatgatggagattgtagaccagagcggaactgatttcgccttcccttctcaaactatttacttcggaaaagatcagggactttctaaagagaaatcggctgaagctaaagctaaagttgaaagttggaaaaaagaacgagaaatgccaattccccaatttaccagggaacaaattgatgcgcttagaaataaatccagttatccgccagaaggttcaagtacaggaatagaaaaaaaataagacttaaccgaatttaccttaaaaaatccaaagtaattagaaatgagtaacccgaagagaaaaaaaaattaccgtggagaagaagccaaatggcctcatcaaattcccgtatcgggctggatagatattgggaaacgcgtttataaggaaatgaaatttgaccatgtgcaaataatttcagccggcgttgcattttatttctttctagccattttcccgaccattgtcgccgctatttcaatttacagccttgttctagaaccagctaaaattgaagaacagatttcatacttaagtctaattttacccgaccaggcttttggaatgatcaccgattttctggaacctgttctgaaacgttccagaaaggaaattgggtggggactttttataagtattctaataagtatttggagtgcgaataagggtactagtgctctttttcaagggatcaacattgcttacgacgaaattgacggtcgaggaattatcaagaagaacctgttaagcctgcttttcactctgggtggtttagtgataggacttattagtttgttaattgtaattttctttcccctactcgtaaaaaacctgggattaactcctcaactggaaaatatgctaaactggttacgttgggtattcctgggacttattttaattctaaatttaagtatgatttataagattgcaccctacagaactaacccaagatttggttgggtaagctggggcgcagtaataggttctattttttggctagcaggttcaatattattttcatggtacgtagctaattttggaagctacgacgatctctacggaagttttgccgcagtagctattttaatgttatggctatttctcactgcttttattgtgttgatgggagctgaaataaactcagaaatggaacaccaaactcgccacgacaccactattggaatggaaagaccaatgggtgaaagaaatgcctggcacgccgaccattgcgcagttgaagatcctgatgaggattgttgaaccaagaaccaaagcaagcctttagaaaaaagtcattaattctctctataataagagatatttgccattaacagcaattggtctcagaagaacaacaactggaatttccaatttcagaaatattttgtttggttttaatagtctttaatcccggtttatcggcataaaccgtaatactaaaaattcctgtttctcctttattaaaatcattaatttgttctaaagtaagatatttgcttaaaatatcatctggaattgtgattggtttttccttttgaatagctatattttgaaaaccattatcctgtatcatttgcaaataatctgttctttgaattgccccggcaacacaaccagcatacatttctgcatcttcttttaaagcttccggtaaatttcctaataaaacgatatcagaaatgctaaaatggcctccaggttttaaaactctaaaaatttctcctattactttttgtttatttggaactaaatttagaacacaattactcacaataacatcagccatattattatttattggcattgcatcaatgtcaccttccctaaattcaacattgttataaccaagtttttctgcatttgccctggctttttcgatcataattggagtgaaatcgattccgattacttttccttccacaccggcttcgtgccttgcaacaaaacaatcattccccgctccagaacctaaatcgatcacggtatctcctttgctaattttcgcaaactgagttggtaaaccgcaacctaagcctaaatcggcatcttcgatatatcctttggtttcagaataatcatccatcataatattgtatactttatttgacggagtggtggcgccacaacaagaggaagcattctctgcttttccctgttcagcaattttggcatatcgttgcttaactatattctttaattcttgttctttattcataactgctattttttattatcaacaaacttctctaagttttatatcgcggcccaaaaatttagagattaggattttcattgccacccaattttctttatatatccaatagcaaacacttgcttcttcaatactcactttaattaagcttaagtgttttcaactcttttaaatgttgtgaaatcgtagtctgagccagtcctgtttcacttactaaattgccacaacaacaagtatttaacctaaataggttttgcaaaattactaccctggcaggatgtccaaaacctttgtgcataatgcaatttgattttgtagatcggtaaatttctcagttcttactaacccactttaattttcatcacttcattgcaatattacgattaataatataaagaacaaataatttcctctatcttattctttggttatctgttatcgttcagaatgggagccatccgaaaaaacccagattaagttctttagaaccaattttaatgaatttcgaatcataaaaaataaaccaggacttgaaaaaggattgttggtgtatggcttaggaaaatccacgctttttgatgccattcatcacataggaagagtaattctggagcaaacccgaagtacacaactttggttttctcgaatctcaagcgttcatatgcttagcctgtattatgaatcgcaaaaagaccagaacagctattttaaactggaagattattatcgcggaaaactgtacctggatgatgtgggaaaagaagacaaggcctataaccgggaagagatcatcggaaaattacttttttttgaaagacaccggcgaaggttatggtagatatggggcatgaaatggaaacactattataatttaagcttgttataatccacaaaaacctattttttagctatatttgtttattataacatacattatgctcgaactcgtcactataaagcaaactaaagaagaactaggtaaatggtgtaaacttcaaagagatcgttttgaattaagccagcaagaattggctgatcaactgggaatatctaggtatactattcagaaatttgaaagcgggagaaattcaaccatcgatactgttttaaaaattgctcaccatttcgaggatttggagaagttttataatggtgtaaaatcttataatgaacaaaatactaatcgctccttatattaaccattatggctaaaaatactatcctaaatgtaaagctatttgattatgaggttggaaagttagattacgatttggatcaacgtaagagtttctttcagtataatccggaatttttagaaacaattcaattacaaaacattttcccgtatatcattaaacgaataaaaccagttcaggtattctccgaatatgaaggaaatactttcaaaggactccctccagccatagcagactctcttccagatatgttcggtaatattatttttaaagaatggtttgaggtaaataataaagataagacaaaacttacacctcttgaacagttaacctatgtagccaatcgcgggatgggtgctctggaatatgaaccggcccagaatcttcccaaaacttcagcaattgaccttgaagaaattattagtgtattaaagcaagttatagatcaaaaagaacatacttcagaaaagaacttagacaacctggctttactcaatattttcaaaatgggtacctctgccggtggagccagaccgaaactattaatttctgaaaatattgagaccggagaaattatccccggggatattgtttcctctgaggattacaagcattacctggtaaagctttccttaaatgaagatagttataataaagaagtcgtagaatatgcatactataaaatggccactgccaccggaatagcaatgatgccttctaacctaattaacgacaagcattttaccacgctaagatatgacaggcaaaacggcgcaaaacaacatgtactaactgcaagcggcttaacgggatgggattttctaaaaccagaaaactcatcctatgaaaatcttttcaaattagctctggatttaaaaataccttataatgagattcaggaactttttaagcgaatggtttttaatttggtctttgccaatattgatgatcacttaaaaaaccattcttttatatataataagaattctgacaaatggaacctcgctcctgcttatgatctcacctaccctttaaacgtagatttcaattatcataagatcagccgtgcgctgtctattaataataaacgtgataatatccagctaaaggatctacttgggttagcagaagaattttcgattaaaaatccgaaagggattattgagaaagttcaggagcagatttctaactggccgcgaatagcagaagagcttaatattcctgcttacgtggtagaaaaaatttctaaagaattcaaaatctttatttaactacaggttttcccttattttttgtaggaaatcataattattttcagtaattatgttaataagttttaggctaccctactttcctaataatataatcacctctgaaatttaatttgcagttaaaaaaaagaaaaatcccacggagtacgcaggatttaagatttttcttcggcttatagccttattgtgaaaagctttcagtaatccaaatatataaaaatattttttatgaacaacttaactttaggaattgaccttggaacaaatagcatcggatgggcaattagagatataacagccactgacaatcaaatcataaaaaatggtgttttaatatttgataaaggagttggtgaagagaaaggaattgagtttcctaaagttaaaaaacgtacagaaagtagggggaaaagaagaaactaccaggcagaaaaataccgaaaatgggaattactggaatttcttataaaagaaagaatgtgtcctttaaccattgaagaattaaatgaatggcggaaatacaacaaaaacagtcctagaaagtatccacaaaccgagacttttatcaattggctacgttacgattttaatggagatggcaaaccagattttcgcctttttggaggtgacaaacacgaaaaccattacttatttcgtgctaaagcagtaagtgaaaatgaagatgataaaaaagtctttcaggagaatcctcaaatcctaggtagggtattttatcatttagtgcaacgccgtggttttaaagggcgtgatgaagaggaggctaaaactatgttagagggcagcaaaaataatgacacgcctggcagaaatgaaattaaagattatattataaaacaccgaagcttaggagcagcattataccattatcaaaaagaaaaatccactaatggtgaaaaaataagaatccgtcagcgctataatcttagaaaagattatgaaaacgaattaaaggaaatctgtcgagttcaaggcttggaaaaaacatcttatgaaaaactttggaaagcaattatctggcaaaggcctttgcgtacccaaaaaggttcggtaggattgtgtacctatgaaaaaaacaaaagacgcgcccccattagccacccgttatatgaagaatatagaacctgggtttttatcaataatttaaagattgaagctccgcaaggttggaaacaggaagattatttaaaagagacaaatctatcctattttttataaagtgggaaatgatttcagccttaaatctattctcaatcaattagacaaagatgaggcaacaattacttccggttatgcaataagagaaaagacaaaagtactttcaacaaagctactgaaacaatttgaagatatttttggtgaaaactggaaagaaaatttaggttggaatgatgcttttgttcgaaatgctcaaccaacaaagaaaaattcaagctactatacctttgaagacctttggcatgtattattcacctttgatagcgaagaaaaattaaaagaatttgcgttagaaaagttaaaacttgaaaaagcgaaggcagagaaattttctaaaataagacttcaacaaggctatgctactttaagcctatcagctataaaaaagattctaccatatcttcaaaaagggtttacttattccaaggctgtatatatgggcaaccttcaaaaagttctgggaactcatgaagtttcagatgagtttattaatcattttgcttttgagattgataaaatttacgaaagtgtttctaccgagcgtaagttaaataatgttttaaatggtttattcagaacagagctggtggctgaaggagattatcatttaggcgaacacgaagatttggatacatcagatgtgaacttgatcaaacaacatattgttgctgttttaggtgataaaacatggggagagatcgatgaagaccagaaagaggaatacgtgaatttcgtaaaagaaaaatataaagaatttcttcaaaaaccatttcaagccaagaaagggagtttcatagaacagcctagaattcatgacgctattttcaaatatttgcaggaacattatccagaacaagttcccaaaaaaaacattcaatatttatggcatccttcagaacaagaaaagtacccaaattcagatacttatcaggaaataaaccaaaaaggcaaagtattctatattaaggaatccgaactcaattcttttttacaccgcaaccctcatgccgaggcagacgggatttcattaaaacttctaagaaatccggaaccaataagcaaaggttttaaaaatccgatggctttaaaaagtttacataaattaaagcaattgctaaactttttattacaaacacaactaattaatgctcatactaggattgttgttgaaattgcaagggagctaaatgacgccaattaccgtaaagctctagaacaatggcaaagtgaacgagaaaagaaaaaccaaaagttcagggatactattgaagaaatcaaccaagaatgtaacacaagttttgaccctaacagtaaagcgttaattcgaaaaatcaggttatgggaagaacaaggtaaaaaatgcatgtataccggagcaatgatcaataaatgcgacttgttgaatggcgaatactatgattttgagcataccattcccgcaagcattagttttgataacgaattaaaaaacctaacactggcagacaaaaattacaattcgaatatcaaaggcaaaaaattccccacacaacttgataattatgattcagaaggtgattttaatggaaagcctcttcagcctatcctgaaaaatattgaagccttattcggcaaaagaagtgtagagaaaaagactataaagaaaaaaggtatacagaaagaaattactattgaaaagtggagcaagattgcggaacttgaatttcaactaagtaaattaagtagtttaagaggtgttgaacctaaagataaaagggatagccttatccagaaaagacataagttaaagttcgaattagattatttaaagcaaaaactacaaacttttactattgaagagtacaaagctagctggcgtaatagccagttacgcgacacccaaataatgaccaaatatgcagtgccatatcttaaaacagtttttaatcgtgtagaggttcaaaaaggaagtgttgttgatatatttaaagaagtgtacaatgtaaaattaagaagtgataaaaaagatcgttcaaaacacagtcatcacgcagtagatggagctattctcacattaattccgaaagctgcccaacgggacaaaattattaaagaataccaattaagaaaggatgaaggctttggagagatttaccacgaaaccccgaaagagtgggacaactttaaagtttcatatataaaaaacatagaagaaaagacactcattaataatcttaaagagcatagaactttaaattcgacctttaaaaaacttagaaaacgtggaaaaatagatcgaaaagaaaatggtgaccctaaatgggctaaaggcgatagcattcgaggtcagttgcatgatgagtcattttacggagctataaaacaacccaaacgtaacgaggataatacgattatttttaatgaagaaaagagcatggttttggaagacaaaatcaggcttgtaattagaagacctcttgcttatgctaaagacaataatacaccaggtttcaaaaaattagatgagatagaaaaagtcattattgataaagctttgttccagataatagaaaagcaagttgaagatgcaggcagttttaaagatgctttacaaacgggtatatatatgcttaaccgaaaaggagaaaaagtcaataaaattaggcatatacgatgtgaatttaaaggactaagttataatgccgctgtaaaaccccacaaacatgtatttatttctgataaagaatataagcattcaacaatcgctaagggtggaaataatatattttgcctgttttataaaggtgaaatcaaaggcaaagaagaaagggcgatcaataacatcggaatttttgatttggcaaaattagagattgaagatgaaaaagaattctttgaaattccccatttcaatttcattcaaaagaaaaaaagccaactttcactgtatgcaatcttgaagacaggacaaaaggccattttttataaagaaagtttggaggagttaatggagcttgatgaaaaagaactttctaaacgaatgtataaaatgtatcaatttgagcggggaaaaggcggagataaaataaaattcaaacatcatttaatatcaggaccaaatatcgatattattaaaaaattaccaaaagagtacaaagaagcttctccatttggaagtttcgaagaacagcctctaatgcgcctaacagccggaaattggaactttgccatagaagaaaaagattttgagataaacttagatggttctattaattggaatatataatctatgattaaacgcagccttttttttgccaatcccgcctatttaagcacaaaaaatgaacagttagtagtatctttccctgaagaaggaaaagtaaataaaacaattcccattgaagatattggtatgctagtattagagaacccgcagatcacgctaacaaacggactcataaccaaacttattcagaacaaagctgcggtggtaaattgcgataaacagcacctaccctgctctattttgcaaccgcttgttgggcatacggaacaaacagaacgtttttcagcgcaactcagtgctagtttacctttaaagaaaaacctatggcagcaaaccataagtgctaaaattaacaatcaggcacagcaccttttccgaagaaataaaaaccataaaaaactggcgcgctgggcaggtgatgtcaaaagcggcgataccgaaaatcacgaagccgttgcagccgcccattattggcagaacctttttgatatagaaggatttaccagatatagacacggggatcctccaaataatctgctaaactacggctatgcaattctacgagcaattgctgcaagagccctaattagttccggcttactgccaggcgtgggaatctttcatcataataagtacaatgcgtttgccctggccgatgatattatggaaccttatcgcatttatgtagatgacctggtttatgaaatggtggttgcggaaaagaatattgacgaattgactacagacttgaaatcccaacttctaaaaatcccagccttagatgtttttattgatggaaaatggagtccgctaatggtggcccttagtaggacgactaattctttatacgagtgctttgccaatctaagtcgaaggattctttatccggtttatcaataatgatattcggtttggataaagttggaaaatcaacagtaactatatggatgaaaaattttcacgcttaaatcagtatcgaagtatgtgggtattagtattttttgatcttccaacggaaaccagggtagaacgaaaagcagcgacccgttttaggaaagacctccttgatgatggttttggaatgtttcaattttcaatttataccaggttttgcgccagccgagaaaatgcagatgtacacaccaaacgaaccaagagaaatcttccaaaaaaagggaaagtatgtataatgcaaataaccgataagcagtttggcatgattgaactttttcacggaagaaaagaaaccgtcccagaggctcctacccaacaacttgaacttttctaggattttaaatatcctagtcaatgcagtcaagacatctcaaaagcttcttattttttaattctaagagacaccttaaaaaacaggataccagca

SEQ ID NO: 318 - DNA, 13690 bp, synthetic construct
  misc_feature 1..13690: note = Synthetic
  source 1..13690: mol_type = other DNA
gcattgcgtctctacacaggcggcatcattccgcaaaccatgaaatcctgaaaaggatgataaatatatatagaacccctgacatggaatgataccatcacaggtgtttacggttgcgtaacacaggttaaccattcatcattaatcattgttgcgggataattcgttcctttgccccctcgtaattttggcggatacacagtacacttaaatcaacttttgccgcatggtaaagaaaaaaaatacaccggatacaacacgaacggaaggcaagggaggcggtaaaggtctgtttggaagcctgaaagagaccctgaccaacgagcgcaccgcttatgtcaccggtttgcttgtctgcctgtttgtgatttatgcggggcttgcctttctctcctttttcttcacgggaagtgccgaccagagcgagatagagaatgttcccctgtccgatttggtaatcaatcaaggctcggtggagaactggacgggagtgcggggggctgtccttgccgacctttttatgaaccgctggtttggcatatcttcctttatgatacttgttttcttcgggacgctgggggcgaggctgatgaggctcacccgcgtttcgctgctgaaacggtttttgttttgtgccgccgcgcttgtctgggggtcggtcttcttcgccttcgctttcagggcgggatatgaagacagctttatctatctgggggggaggcacggatatgtcatttccaacctgctgaccggcaacatcggcataccgggggttgttctcctgctgaccggctcattccttgtcatcgccgtctgtacaagccgccgcaccgttcctttcctgcaacggctgttatccttcgcatggctgggcggtctgttccgccggacagcgaaagcctccgacagcatttcccgcccgaagaaaaaaggagaggaaaaggacaaagaagatgagggggaaggggaaactccggcagagccgtccgatgccgccgctgatgatgatgcggaaaaagggtatatatataaggataacgagggctttgaaataaccgtcccccgcgatgaagaggaatacacaccgcccgccgaaccggctgactttgccgaaccggaagagcagcagccctttccccctaatccttccgccgacgatgaagaacctttcgacgagaccgaactcggcgagtacgaccccaagctcgacctctccaacttccgcaacccgaacattgacctgctgaagaaatacgacgtcggcgagcatcaaatcgacatagaggagcaaaacgccaaccagcggaaaatcaagcagactcttgaaaacttcaacatcagcatttcctccattaaagccactgtcgggcctactatcacactgtacgaagtagtccccgatgtcggcgtgcgtatctccaaaatccgcaacctcgaagatgacattgctctgaacctctccgccttgggcatccgtatcatcgcgcccatgcctggcaaggggacaatcggtatcgaagtgcccaacaaagacccgcagattgtgtccatgcagtccattcttgcctcccgcaggtttcaggagacaaagttcgaccttcccgtggcactcggcaagacgattacaaacgagatattcatttttgacctttgcaaaatgcctcacctgctcgtagccggagccacaggacagggcaagtccgtcgggctgaatgccatcatcacctcgctgctctacaagaagcatccgtcggaattgaagtttgttctggttgaccccaaaatggtggaattcagtatctactccgaaatagaacgccactacctcgccaaactgcccgactcggacaaagccatcatcaccgacttcaccaaggtaatccacacgctcaactcgctctgcatagagatggacgaccgctacgaccttctgatgaaagcccacacgcgaaacataaaggaatacaacgacaaattccgcagccgccgcctgaaccctgaaaagggacaccgctacatgcagtatatcgttgtcatcattgacgagttcggcgacctcatcatgacggcgggcaaggaaatcgaactgcccatcgcccgcatcgcccagaaagcccgcgccgtaggcattcacatggtcattgccacgcaacgcccgtccaccaacattattaccggtacgatcaaagccaacttccccgcccgcatcgccttccgcgtctcctccatgattgactcgcgcaccatcctcgactcgcccggagccaaccagctcattggtcgcggcgacctgctcttttcgcagggcagcgaaatgacccgcgtacaatgtgctttcattgatacgccggaagtggaacaggtatctgcctacatcggcgaacaagccggcttcgccactgcccaccttctgcccgaatacactgccgaaggcgacggcgacaaatcaaacaccgtcgatatgtccgaccttgacccgctgtttgccgattccgcccgtctgctcgtcattcagcagcaaggctccacctcgctcatccaacgcaaattctccatcggctacaaccgtgccggtcggctgatggatcaactggaaaaagccggcattgtcgggccctttgagggcagcaaggcacgccaagtcctcattcaggacgaacatacgctggaacagaagctggcggcgattaacgggtgagcattacggttaatttcttatgtggcgggatttgagcaagcgtctgcaaatttgtcggggaatgattgtgcatgatatattaatgtatatttttggggcatttttgtagggggattctgtttctttcatacacaatcatttaatcctgaatatcgcaatgacgtaccttaaattcgacaagaatctaatgaccaacctggaagagtcgctcacgcgggaagtgcttcgcacgaaccggaagggggcgtatcacaataccacagtggtcggctgtaatacacggaaatatcacgggttgcttgtcatgcctgttccttcgctgggggaggacaactatgtgatgctgtcttcgtttgacgagacggtgattcagcacaaggcggagtttaaccttgggctgcacaagtacgaggggaaacatttcagtcccaacgggcacaagtatgtgcgggaatatacgtcggagaccataccgcgcacggtgttccgcgtcggcggggtgattctgtcgaaagagaagacattctgctcctttgagaacaggattatgattaaatatacgctggacgaggcacattcggcgactacgctgcgcttccgcccgttccttgcctttcgcaatgcacggcagctgacgtatgaaaacaacggtgtcgatcattcctataccgagattgagaacgggatcaagacgcgcatgtatccgggctatcccgaactgttcatgcagttcagccaaaaagcgacgtttgtgtatgatccgcactggtatcacggcatagattatccgaaggagcaggagagggggtatgttcaccatgaagacctctacgtgccgggctactttgaggtggctattgagaagggggagtctgtttatttcagtgcgggagacgagccggtggatacggcacggctgggagagatttaccggacggaggtggaatcgcgcacgccgcgcgacagcttctttaacagtttgaaaaactcggtgcagcagttttatttccgcccgaatgagacggatgcctatctgctggcgggttatccttggtttaaggtgcgtgcgcgggatttgttcgtttctctgcccggcagtacgctttccattcaagaccctgtgcggtttgagaaaatcatgcacactgccatgccggcagtgcggacttttatggagacggggacgcaggatgcggtgattacggagattgaccgtccggacattatgctttgggcaatttgggcaattcagcaatatgcgcaatatacgggcttggaacaggctcgcacgctttatgcggactttgtcggcgaaatgattgagtatctgctggcacagaagcatccggacatgcaggtgcaggagaacggactgctgtatgccgacgggagggacagggctattacgtggatgaactcgacgattaacggcaagccggtcgttcagcgttccggttatattgtggagtttaatgctctttggtacaatgctctttgtttctatcgcgaattgagggagggtttgccgcatgaagaggctgaccgtgtgataaaggcggttgagcagtcgtttcctgaaatctttgtgaacgggtataactatctgtttgattccgtatcaagcgcgggggtggattggagtgtacgcccgaatatgattattgccgtagctctgccttattctccgcttacgaggatgcaaaagcgttccgtgctggattatgtgacgaaggagctgctgataccgaaagggctgcgctcgttaagccccaaaagcgagggctatcatccttattatataggatcgccatacgaccgcgacatggcttatcatcagggggcggcatggccctggctgctgggcttctatctggaagcctatctccgtgtgttcggaaaagggggcgtttctttcgtggaacgcatgatgataagcatggaagaggaaatgtcgcttcactgcatcggcactatctcggaactgttcgacggcaatccgccgtttaccggacggggagccatctcctttgccatgagcgtttcggctatcctgcgcgtggtggaactgctgaaaaagtataatgccgactgagaatctatacatataattaacaattaactatcgacttgtgaaagcattgatgttcgggtgggaatttccgccgcatattttgggaggcttgggcacggcgagttacggactgacacggggcatgtccatgcaaccggatatggagattgtattttgcataccgaagccttggggcgatgaagaccagagctttctccgcatagtgggcatgtgcaatgtcccgatcgcatggcgcgatgtggatatggggtatgtgagccaccgcttggcaccgtttaataccaacccgcagcagtattacgattatagaaaccatctgtatgccgatttcaattacaggtatgtgaacgacttgggctgctttgagttttcagggcgttaccccgataatcttttggaggaaataaacaactattccattgtagccggagtggtagcccgtgccgaacagttcgatgttatccatgcccacgattggctgacgtatcccgcaggactccatgccaaggcggtaagcggcaagccgctcgtcatacacgtacatgccaccgactacgaccgaagtcgcggcaacgtaaaccccgatgtgtacggcattgaaaagaacggcatggacaatgccgaccatatcattacggtaagcaacctgacccgacagacggttattgaaaagtatcatcaaaaccctgccaaagtaaccaccgtccacaatgccgtagaacctctcagtccggaaatacttgccatacaggacaagaaaggagtcaaagacaaggtcattactttcttggggcgtataaccatgcaaaagggacccgaatacttcgtagaagctgctgccaaagtattggctaaagctcctcatgcacgtttcgtcatggcaggcagcggcgatatgatggacaagatgatacgcttggcagcttcccgcaacatagcggacagatttcacttcaccggatttatgaagggcaaacaggtgtacgaaatattgaaggcgagcgatgtatatgttatgccttccgtatcggaacctttcggcatatcccctttggaagccatgcaatgcggcgtaccgactattatatccaaacagtccggctgcgccgaaatattggactatgccgtcaaagtggactattgggacatcgaagctatggcggatgccatgtattccatcatttcctatccctccatgcaccaattcctgaaagaagaaggaaaggatgaggtggacaacattaaatgggaatatgccggacagaaagtgagaaacatttatgaacaggtaatgaggtctaactactaattcctaaaaaaagagatatgaaaactatttgcttttactttcaaatacatcagccgtttcgcttgaagagataccgtttctttgacatcggaaacgaccattattattatgatgacttccaaaacgaggaaatcatgcaccgcatagctgaacgctgctacctgcctgccaatagaacaatattggaaatgatcaaggcaaacgggggcaagttcaaggttgctttctccatctccggcgttgcgctcgaacaattggaaatctattcgcccgaagtcatagacagcttcaaggaattggcggcaacaggcaatgtagaatttcttaccgaaacctacgctcactccctttcttccctcggcgatgcggaagagttcaaggaacaggtggaaaagcataaagagaaactgcattccgtcttcggtatcgaacccaaagtgttccgcaataccgaactcatttattccgacgatatagccgaccttgtcgccgacatgggcttcaaaggcatggtcaccgaaggtgccaagcatatcatgggatggaaaagcccgaactacatttacacctctgccgtacagcccaaattgaaacttctgctgagaaacggtcgtttcagcgaagacatcgctttgcgcttcaacaactacagctggaacgaatacccgctgacagccgacaaatacatctcatggatagccgacacccccgcttcggagcaagttattaacctctttatgaactatgaagttctgggtctccacaatcccgccgaatccggcatcttcgacttcctcaaagcccttccccgttttgctgccgaacggggcatctctttctctaccccctcggaagcattcaagttgctcaaacccgtggataccatttccgtcacgcaccctatctcatgggcggacgaagaacgcgactgcggctcttggttgggcaacgtcctccaacaggaatcattccgtaaaatcaacgacataagtgaacgggtacgccttgctgaagaccgccgcatccgtcaggactggaactatctgcaaagcagcgaccacttccactacatgaatacccgccaccgccatggcagtttcttcagtccctacgacaacccctacgatgctttcaacaactacatgaacgtcctgtctgacttcatcgtccgtgtcaatgcgcagttccccgaaaccatagaaaacgaagagcttaacgctctcctcaccactatccacaaccaagaggaagagatagagacgctgcaaaaggagctgggcaaacagaagaagaaagcgaagtaatcttacttcgtattgtattgaaagtttaagataataagaattgcggcttaatctggtaaggattgagccgcaatttgtattttgtgctttcagcacaaaaaaagagggcgagtttccccgccctaaatgttttcacaacggatatggctaaaaaaagccccacgaagtacgcagggctaaagatagttcttcggcttatagccttattgtgaattgcaacgcaaagatatctaaaaatcaattcacaacacacatattacttagattaatattgcctttttagttaaaaaaatataatcgcgacaaaggtaatgaaaaataaatatgtaatatgtgtatatcctaaaacagttatatttgcagaaaatatagtcacaaaaatcgtatatgaacaaaacacttggaattgatatgggtacccactcagtaggctgggcgatcagagatacttcatcggaacataatcaaatcatagattatggggtcttaacttttgataagggtgttgcttccgaaaaaggaaatgaattccccaaagttcaaaaaagaacagaaagtcgtggtaagagaagaaattatcagtctgaaaaatatcgaaaatgggaattgttggaatttctcatagaaaagcaaatgtgtccattgacaataaatgaactcaataagtggaggaaatacattaaaggtcaaaaaagagaatatccacaatcacatgaatttatcaattggttgcgctttgattttgatggagacggcaaacctgattttcatttgttcaggaaggataaaaatgaaagctattatattttcagagcttttgctattgatgaagagtttaaaccaatatatctgaatgatctgtacatacttggtcgtgttttgtatcaattagttcagctaagaggatttcgtggcagggatgaagaagaagcaaaaacaatgcttcaaggaagcgaaaaaacagggacagccggcagaaacgaaattgcagaatatattgatcaatataaaacgttaggagcggcgttatactattatcaaaaagatagaggtggcagaatccgtcagcgatacaatttgagaaaggattatgaagatgaattaaaagaaatttgcagagtttatgatataagtgaaaatgattatcaaaggttatggaaagctatcatttggcaaaggccattgcggactcagaaagggttggttggactttgtatttatgaacgaaataaaaagagatctccaattagtcatccgctttacgaggaatacagaacttggatatttatcaataatttaaaaatcgaaccaccacagggagttgataagggtacatacttgaaagaaaaaatatatccgcttttccataaatcttccaatgattttgaactgatctcaattttaaatcagttgcgaaaagatggggcaaaaatgacggctaattttcatgagaaaacaaaagttatttcagcaaaattattaaagtcattcaaagatattttgggtgaaaaatggaaggaagaatacaaatggaattcaatttataatagagatgatcaacctaaaaagaaaacagacaagaatttttcatttgaagatatttggcatgttttgaatacattcgatgggcaagagaacttgaaaaaattcgctttggaaaagctgaaattagatgaagaaaagtctgaaaaattctccaaaataaaacttaatcgaggttatgccacgttgagtctttctgccattaaaaagatattgcctttcctacaaaaaggctttctatacagtcacgcggtttatttagccaatttgtataaaattttaggttcggagaaaattacagatgatttaattaacttttttgcagaagaaatagataagattatttgtaaaaacaagaaagaaaaaacacttaataatataattaatgatttaattcaagtcgaattaaatgaagagaacagatactctattgaagttgatagagaacttgacagcgatgaattaaacagaattaatgcaaaggttgttgaagtttttggtgaaaaaacttggggtgaatttgaagaagataaaaaagaaaactatttgaattatatttcaattcattttaaagaatttctgaaaaaatcaattttgtccccaaaaaacatattcgtagagcaacctcgtttacatgagcagatatttgtttttttacagaaaatatataatgtttccgatgagaaaaaaaaatacttatggcatccatcagagcaagatgagtacgcggcagcctccacttatcatcaatatactattagaaataaagatatatatgtaactgaatataaagttcaatcttttttgaaaaggcatccaagtgcagaaagtcaaggacgttctattcaacttttaggtaatccggaaccgatcagtcgaggatttaaaaatccgatggcgttgaaatcgcttcataaattaaaacaattgttgaattatttattgcaagccgggaagatagacaaagatactcgaattgttattgaaattgctagagaacttaatgatactaataaaagaaaagctattgaacgttggaataatgaaagggaaaaagagaatgaatcatataaaaaaattattcgtgaaataaaaaatgaatgcaaaatcgattgtgatgaaaatgataaaactttaattagaaaaatcaggttgtggatagaacaaggacggcgatgtttatacacaggggaggttatcaatagttgtgatatatttagtggaacttcttacgatatagaacatactattcctgcaaaaataagctttactagtgaattgaaaaatcttacattagcaagtaccaattataatcggaatataaagaaaaaactttttcctactcaattgccagattatgatacagaaataaaaccacgattgaaattcatggaagaaaaggttgaacatttggaacatctttatgacgaatggaaaaaaaagtccttatatgcaacatcaaaagatgtaaaggacgcatgtatccaacgctatcacatgataaaatttgatttggactattggaaatccaaattacatacttttacacttgaagaatataaatcaggttggaaaaacagtcagttgcgagatactcaaattattacaaaatacgctttaccctatcttaaaacagtatttaaaaaggtttcggttgagaaggcagaagtcgttcactgtttcaaagagatttataatataaaactaccttacgaaaagaaagatagaaatgtacacagtcaccatgctattgatgctgctattttaccattaattcctcctttctatgatcgtgataaaatattggaaaaatactatgacgaaaaagacagaaaaacaggtaatgtttatcatgagcaaccaaaggattggaatgatttttccgcctctaaaattttatttatcgaaaataaaattttaataaataatctttctgaaaataaaactacattgcctacttataaacaagtcagaaaaaaaggtaaaattgaatacctcaaatacaaggacgaaaatggagaacaacatttcagactggataaaaatggcaataaaattatcaaaatagctcagggtgataccattagaggacaattgcatggagcgtctttttacggtgcaattaaacaacctgtaagagataaaaaaaataaatttgtttttgacgaaaatggaaaaatgattttgaaagaagagattactttggtaatgcgaaaagatttggtttataaaaaggatgccgattcacctggatttaaaactttagaagaaatagagaaaatcattgttgatacagatttatttcaaatgataaaagaacaagttgattcctctgatattaagacagctttaacaaatggcatctatatgttggataagaaaggcaacaaggtcaatagaatccggcgtataaaatgtaaagaaagtttgaaatatgaaacggcaatgaaagtccatactcatagttttaaatcaaataaaaaatataaacagcagactttggcaaaaaatggaaaaaatgccctttgtcttttctatcaaaacgaaaaagggaaggtaatgaatatcttatcaattagtcaagttgcagaattgaagtttcggaatgataggcaattttttggagaaaaaaattataatcaatttgaaattggaaaaagtaaaaataaatcgaatattccactatatgcagttttaagaacaggacataaagttttgttttataaagaccatattaccgaattaaaagaattattaaaagaagaccaccctgaaaaacatttctcaaaacgtctgttcaaaatttatcaatttgaaagtgatggtaggatgaagttccggcatcacttagctgccggaattgatacagaattaaagaaagatagcgaagaattttctgaatttaaattagaaaataatcctgtttttttaaggttgagtaaaaaacaatggaattttgcaatagagaatgttgattttgaaatgaagttagatggctctatagaatttaaattttagaccatgataaagaaggctttgtattttgggagtggggtttatttgagtgtgaggaatggacagctggttatcagattgccggaggtggagaggaatgatactctgccgaaggattttaagcaacaatcgattattacgaaacctatagaggatattggtataattgttcttgataacagacagattacaataactcacggagtgttggagaaattgctggaaaataatgttgctttgattacttgtgatagtcggagtttgcctgtcggtttgatgttgcctctttacgggaatacgacacaaagtgagcggttcagggaccaaattgacgcttcgcttcctctgaaaaagcaattgtggcagcagaccattcaatataaaatcaggaatcaggtagcggctttaaaccaattgcgcggagagacggtgaaaaatatgttggtgtgggcaaataatgtcaggagcggagaccctgataatttggaagcgcgggcggctgcatattattggaagaatctttttccatctgtttcagattttacgagggacagggaaggtgtaccgcctaataatctgttgaattacgggtatgccattttgagagcggttgttgcgcggggattggttgtaagcggaatgttaccaaccttaggtattcatcatcataatcgttataatgcttattgtttggcagatgatattatggaaccttatcggccgtttgtggacgaactcgtagtcagtatggttgatagcggacaagactatacagagattacaaaagagctgaaagcaaaactgttgactattccgacattggatgttgtaatcggcggacagcgcagtcctttgatggtagcggtaagccaaacgacagcatccctttataaatgcttcaaaggagaagtccgtagaatcagctatccggaaaaataagtgtggaacggtttagtgaatatcgcattatgtgggtacttgtttttttcgaccttccgacggaaacaaagaaagagaaaaaagtatatacggattttcggaaaagactgcaaggtgacggttttacaatgttccaattctccatttatttgaggcattgcccaagccgtgaaaatgcagatgtgcatataaagcgggtgaaatcctttttgccggacaaaggtcatatcggaattttatgcataactgacaaacaattcgggaacatggaactgttcttcggtaaaaaagagacaaatccctctacacccggacaacaattggaacttttttgaagcaacagaaaaagaaaagcctactgtagcagtaggcttttcttctctaaacaaccacatttctccaccctaaatcttcgcttaccaatctgatactcaaacaaaaacagataatgagttgtttatggtagcaaaggtaataataattgaaagcaattcacaaccgtagatttgccagttacgtcgagcttgccgttgtttatggtagcaaaggtaataataattgaaagcaattcacaaccgtagatttgccagttacgtcgagcttgccgttgtttatggtagcaaaggtaataataattgaaagcaattcacaacattgatggaattggtgtggcgtttgagaaagttgtttatggtagcaaaggtaataataattgaaagcaattcacaacttctgatggacttgttcgaaaattgacggagttgtttatggtagcaaaggtaataataatt

SEQ ID NO: 319 - DNA, 5873 bp, synthetic construct
  misc_feature 1..5873: note = Synthetic
  source 1..5873: mol_type = other DNA
taataaaaactcaatgattgtaagaaaaattatagcatgtttagtaagaggggtaaattattatagaataatctttattatgaatttattttaaatataaaaatcccacggagtacgcaggattatagattttcttcggcttttaagccttattgtgaattgcttttcaattttattaatacaaatataaataacttttttaatttaagtttacaaaagccgaattaattttattttttctgaaaatttatataacatgaaaactagttaattatgagtaaggtattaggaattgatcttggtacaaatagtataggttgggctattaggaatacagatctagcagaaaatcagatagaagattttggagttattactttcgaaaagggtgttgcttcagaaaaaggaaatgaatttccgaaagttcaaaaaaggacacaaagtcgaggaaaacgtagaaattatcaagctgaaaaatatagaaagtttgcgttgttggatttcctcattgaaaaagacatgtgtccattgacaagggaagagttcaataattggaaattgtataaaaaaggtaagagaaaagaatatccacaatccgaagtgtttttaaattggataagatttgattttgatggagatggtttacctgattttcatttatttgggaaaaataaagatgaaagttattatattttcagagctttttcggttgatgaaaagtataaaaatatttttgcagataattctcatattttaggacgagttttttatcagttagtacaaagaagaggttttaaagggaaggacgaagaagaatctaaaactattctggaaggaagtaaagatggtaatactaaaggccgtgatagcatagaggaatatcttgaaaaatataaaactttaggtgctgctctttataattaccaaaaagattttggagggagaataagacaacgatataatcttcgtaaagattttgaatttgagcttcaggaaatatgtaaagttcatcagatttctccatctgattataaaaagctttggaaggctattatttggcaaaggcctttgagaactcaaaaagaattgataggaaattgtatttatgagaaaaataaaaaaagaattgcagttagccatcctctatatgaagaatatagaacttggactttcatcaataatttgaatatagttgtgcctttcggggaagatcaacaagattatctatcagaaaaaatatatccattattttataaatctaaacctgactttgaattaattgatattgataaacaattaaaaaaagatggtggaaaaagacaatctaaacacaatgaaaaaacgaaagttttgtctgtaaaacttttgaagcagtttcaagatatatttggtgaggattggaaaaaattgctaaaatgggatgttattggtaatagagattcccaacctataaaaagagataatgctacttatacttttgaagatttatggcatgtcttatttacatttgacggtcaggaaaatttgaaaaaatttgctttagaaaaattaaatcttgatgaagaaaaagctactaaattttcaagaataaaattacaacaaggttatgctacattaagtctatctgctattaaaaagattcttccatatcttcaaaaaggatttttgtataatcattcagtttatatggcaaacttgcataagatgcttaatgaaaatacaatttcagaaagcttaattaattattttgcagatgagatctctcgtattttaaaagatgattcttttaataggaagaatgcagccgtaataaatggattaatttctgaaatgctaaatgatgaaaatagatactatatttcagatgggagaaatttggatgaaagagagaaagaaactgtttttaaaggtgttataaatcattatggtttagagacatgggacagattttcagaaccaatgaaaacagaaataattgattttatatctgcaaaatatttagaatttctcaaaaaaacgtatactcaaaaagggaatctatttgttcagcaagaaagaattcatgatcagatatttacatttttacaagagacttataatgttccggaggataagaaaaaatatctttggcatccatcggaacaagaaaattatatagtagcagaggaatatcaagaattttctattgggaataaaaagtattatgtaaaagaacaaaattacgagaattttttagataagaattctaatgcagaaagtgaggctaaaagaataaaacttctaggagatccacaaccattgagtaaaggttttaaaaacccaatggctctaaagtctttgtataaactcaaaagtttgataaattatttattgcaaatcggaaaaatagatgaatatactaaagttgttgtagaaattgcacgagagttaaatgataaaaataaaaggaaagctatccaaatttggcaaaaagatagagagaatcaaaatgaagcctataaaaaagaattagaagcttatagacaggcatttcctaacatcaacttaatcgacgagaacacactcatccgaaaaataagactgtggcacgaacaaaataagatttgcctttatacaggtaaaccaatttcttttacggatttgattattggaaataaatatgattttgaacataccattcctgcaagtataagttttgataatgacctgaagaatctcacgatttcagattctacatacaaccgtgtttataaaggaaggaaattcccaacccaattacctaattatgagtctgaacaaaaaatagatggaaaaatctataattctatcattagaaatatagaattcatctttggggaaagaacagttgaaaataaagaaataaaggggaaaaatgaagaaattgttaagtggaaaaaaatagatgagcttgaaaaacaatatgatgaatggaagaaaaaagcttcttatgcaagtactaaagaaataaaagataattgcatcataaaatatcacaccataaaaatggatttggattatctgaaatccaaattggcatcattcactatcacagagtataaagcaggttggagaaataatcaaattcgcgatacacagatgataacaaaatatgctttgccatatttaaaaacattatttaggaaagtatccgtggaaaagggagcagttaccgatatttttaaaaaagtctataaagtccaatctaaagaagaaaaaaaggatagaagcatacatagccatcacgctcaggatgccgctattcttactttaattcctaatgcttttcacagagaaagaattatcaaggcttacgaaaatgaaattgataatagaacagggaaaacttatcacgaaatccctatggactggaaaaacttttctgagaaatatattatggaattaaaagataagatcattataaataaccttacagataacagaactattactcaaacctataaaacagtaaggaagagagggaaaattatatatgatattgataaagaaggtaattcttctaaaagaataagtagaggagataccataaggggacagttgcatggagaaacattttatggagcaattaaacagccactaagggatgaggaaaataaaattctttttgatgaagataaaaaaatgatacttaaagaggaagtttatcttgtaataaggaaacctttagtctataagaaagacgccaattctccaggctttaaaactcttgaagaagtagagaagttaattgtggatagagctttgtttgagatgattaaaattcaggttaaggaatctgattttaaaactgcattgacagatggggtctatatgcttgatgaaaatggaaataaagtcaataaaataagacgaataagatgctttgaaaagggattaaaatataccactgctataaaaattcataaacatagttttacttctaataaaaagtataaagaagcaactttagtaaccaatggagagaatacatattgtctattctataaaaatgatcaaggaaaagcaatgagaattctttctatcgtagatgtagcgaacttgaaacttaaaaatattcaaactctatattcagagccagaatttttaagcttcgaatcaggaaaaggaaaaaagaaaattcaaatacctttgtattcaattttaaaaagtggagataaagtattgttttacaaagacaataaatatgaattaaaagatttagaacaaactgatttagtaaaaagaatgtttaaaatatatcaatttgaaaaagatggcagaataaaatttaggcatcatttagtggcaggtattgatacagaattaaaaaaaagtcatcaggagtattcaacaattaactttgaggataatccggtatttttaagattaagccaagcgcaatggaattttgcaatccaagataaagatttcgaagtttcattagatggtaaaattcattggaaattttaacaaaaatgattactcgttccatctatataggtaatcctgcttatcttaagcttaaagatgagcagatgaaaattctttgtccggaaactaaagtggagaaaggcagtattcctgtagaagatctgggattattgatgttggatcattttcagattactatttcacatcatctgattcaaaaaatgatgggcaataatgttgtagtaataagttgtgatttacatcatttgccacatggaattatgctacctttatacgggcatacagaatattctgatagggtaaaagatcagttggaagccagtgaacctcttaagaaacaattgtggaaacagaccattgaatgtaagatagaaaatcagaaagaagttttgatgaggttaggcaattattatgaacctatgttagaatatcaaagaaacgtaaagtctggtgatatcactaatatggaaggcatagcagcccagcattattggaaatatttgattagtttagattttcttcgtgaacgttttggaaattccccaaatcagttttttaattttggatatgcagttttaagaagcattgtggcgagagcgatagtagaaacaggattactccctgttttagggattttccataaaaataagtacaatccatattgtttggctgatgatttaatggaaccttatcgtccatttgtggatatattggttatgcaatggctagaacttaatcctgacctagaagagctgacaaaggaatttaaagctcatattttacatatagcaacgaaagatgtaaaaatagatggaaaaacaagacccttgttggtagcggtaaaaacaaccgctgcttcgctttataaatgttatacaggagaaaaacgattgatatcttatcctgaactgatatgaataccgaaaggtttaatgcctaccgaattatgtgggttttagtattgtatgatttgccaactgaaaccaaaacgaatatgaaagatgccaaccgctttcgtaaaggtttaattgatgatggttttacattgtttcaattttcaatgtatatccgccattgcccaagcagggaaaatgcagaagttcatattaaaagagtcaaatttatgctacccaaagcaggtaaagtggcaatcatgtgtattacggataagcaatttggaaatattgaaatcttttttgctagaaatagagaagagccacctccgacatttcaacaacttgaattattttaaattttaaatcctgataaataaaatgaagccgtctcattttccctggggcggtttttatttataaactacacatattattttttaggattatttttttgattagaagtgtatttttatgccactttctttcttaagttgtgtgctaaagcat

SEQ ID NO: 320 - DNA, 6286 bp, synthetic construct
  misc_feature 1..6286: note = Synthetic
  source 1..6286: mol_type = other DNA
gtctgggcgggaggcataaagatcgaatccttgacggaacaggatcgggtcaggcgggaggatcgtaaacagggtatccgcctccaaatcccgcagcaaggcggtgacgatggaacgtccgggtggacgcgacaaggcgtcggcgacttccgtcaggacccacgcggtggtgagtactggcatttcctgctttttcggaaaaaccaaccgcgcgagcatgagccatgtctcgcgggttgatcagggcaaggaagtagaaggtatcggcaaagacgggtgtcatggttttggtgtcccgtgagcgtaatggtcatgcttttccgccagatcctccgggagatccggcacgctgccaatgacgttccgcaagcggtcagccagggtttttcgcccggcgcgttccacgcagacctcagcgccctccggcaaatccgccggctcatccaacaccacgaccccatttcgcatatgtcctcggaaagacattttcagttccctcctttgcgggagattcccttacccatattttcctcaaacccctcttcttttaccagcgaaaacggggctcgacgctcagaaggacgttctgaccggcccgccgccgccccctgctcccgcctccgccaaccagtaatgcagcggatacataaccgaattcgggcttatgtctcctgattatggattgccaagacccgccgcatttcccataaccggcccccaacaaaaaacgaaaagacaaaagaaaatgcccccgctaggagtacactcactaggagagggcattaggacgctcttgcgagcaggagccttgctgggccgaagcccagttgctgtaattaactggacaacgacctcttcgttacactaaaaaggatggtacagtagatactccatccgagtcaaggagaaaacgcaatgacaccctctattaatccgaatctcattcttggcctggacctcggcgccaattcgcttggctgggtgctcctggatgcgcccgacggaaaacccgcaggcatccgggatgctggagttcgcgtctttgaggcgggagtcaatcttctggaaaaaggagaaaaggcctcgcgcagcctggatcgccgacaagcccgcggtcgccgccgacttctggaccggggcgcccggcgccgccggaaactccttcatgcgctccaaagggcggggcttctccccgccggtgaactccacggccatctccgccccaacgatcccgccaaccctgtttccctcgtgtttctcgacaccgccgccgatccctaccacctccgcgcccaagccctcgaccgaaaactcgaactcttcgaactcgggcgcgccctctatcaccttgcccgccggcgcggtttcctcagcaatcgcaaagcccctcgaaaggacgaagagaaaaagggtgttgtagataaggaaaccaaagtcttggaggcggaaatgaagaatgcgcagttccgcaccatcggcgcttaccttgcttccctcgatccccttgaggcccgccggcgcggaagatataccctccgcaagtggttcgaagacgaattcgatgccatctgggccgcccaacaaccccaccatcccgagaccctcaccgaagtcctcaagaaaagcctcttgaagaccattttccatcagcggcccctcaagtcccaaacccgcctgatcggagtctgcgaattggaaaagcggcccgtcaatgtccttaagaaacttaagaatggccaggaccggcgcatgaccgtgtatgccggccccaagcgcgccgcaatggcctccctccccgcccagcgcgcgcggatgctccagaccctcaacgacctccgtgtcgtcgagtatggcgccgaaagacccctcgaacccgaggaacgctcccgcatcctggacgccctcgaccgcgccgacgaactcaaactgaccaccatccgcgggaagacccttctcaatctgcccaggttcgccaagttcaattttgaggccggggaacgcgaaacaattccaggaaacgataccgccgcccaactccggaaggcctttggcgaaaaatgggatgccatgacgccggaccagcaagatctcatcgtgaccgacctgctcagcatccagaaggacgagacattcgtcaagcgggccgccaaatacagcgagaagtacagcctgactgacgaacaacgaaaggctctggataagttcacaccagaggacggctaccatcgcctgtcgctccgggccctccgaaagattcttccccatctggaacaggggctttcctaccccaaggcgcttgaaaaggcctaccccggccgcgtctccacggacgcgttggattttctccccgccgccgatcccttgcgcaacccgattgtccagcgcgccgtggcggaactccgccgcgtggtgaacgccatcatccgaaaatacggcaaacccggaaccatccgcatcgaactcgcccgcgaactgaagaaaacccagaaacaacgcgatgagatcggcaaacaaaacgcgacaaacaggagaggccgtgacaaggcccgcgaggccgtcatccgcgagaccggacagcccaaccccacctcctacctgatagagaaataccttctctgggaggagtgtggcgggatatgcccctacaccgggaagtccatccctctttccggcgagcagggccttttcggcggccaccccgccttcgatatcgagcatattatccccttctcacggtctctcgacaactccttcttcaacaagaccctgtgctgcgtggacttcaatcgaaacgccaagcgaaaccgcactccctgggaggcggtcggcgaggccatggaagcgggcgatcccgccatgaagcagcagtggtccaacatgattgacagcgtcaagcgcttcaaaagcgacaaagatatgcgcgacgccaagctggagcgcttcaaattcaagaccgttcccggcgaagaaagcttcctcgaggagttctccacccgacaactcaacgacacgcgctatgcctcccgccaggcccgcgaatacctcggcctcctctacggcgccgaggccgtcaagcgcgttcagcccctcaccggccaggtcaccgcttatctccgctccgcctggaaactcaaccggatactggacggagacggcgtgaagaaccgcgaggaccatcgccaccatgccgtggatgcgctttgcgccgccctcacttccacggcgaccgttcaccaactccacaccgccgccggacgcggcgtcaatgtattccgccccggtacctttcccgccatggaagaaccctggcccgggttccttgaaagcgcccgcgccgccgtgtccaaaatcctcgtttcccaccgcgtttcccgaaaggtgagcggtcccatccatcaagagactctctacggggaaatcatccggccggataccgccgcaacagcagagccgcaaaaatgcgccgtgttgcgaacgcccctgatcaagctggacgaaaagaacctgagcgatatcgtggatgagacagtccgcaaaacggtgaaagatcacctggccaaactcgccgccgaccatggaattgacattaccaaggctgtcaaacttcttggaaacgaagagaacctgcccttcctcacggcgaaagacgggcgccgcatccccatccgaaaggttcgcgtctttgtccgcgccaagcccttctccattgccgggggtgaccaccagcgccttgtgattctaggcaacaaccaccatctcgcggtctatgaggcccgcgacaaaaaaggcgagacaatctggcgggaagaggtggtctcgctgaagaccgctatggaacgcgcgcgcgatcgaaaaccgggtgcccgccacggagaacccgtcgtggcgcccctggatgcgcaaggaaacaaactcctcttctccctcgtcataggcgatgccgtggaaatggaaatcgaaggagagaaatccatctggatcgtgcgcagcatatcccaaaacgacttccacttcaaagatccgcatgatgcgcgtctggcgaaggatatcaataaggagggcggtttacgcatccgaagcataaaccggcttcgggatgcgaaatgccggaaaatccatctttcccctctcggagaagtgagttccgcgagatgaccgaccgcatcctcgacttttccgaatctggggcgcacctcagcctccaatacaaccagctcgtcatccggcgagaaggcgccgggaaacccattaccacgcccgtcgaggaactggccgccctcatcctctccaacccggccatcaccatcacacagcccctgatggccgccctggccgaagcgggcgccgtcctcgtcgtctgcgccgccaaccatatccccatatccatccttactcccctccaaggccacagcacccaggccgaaagaatggcccggcaggccgccgccccccttccccttcgcaagcgcatctggaaaaccatcgttcaatccaaaatccgctcccaggcccgcctcttggaggaactcaccggcggcgacgcggggctccgcgccatcgccaaccgcgtccgctccggcgaccccgacaactgcgaagcccatgccgcccgcgtctattggcccctgctctttgccaatcccgatttccgcaggaaccccgagggggaaggcgctaacccgttcctcaattacggttacgccatcctgcgcgctatcacggcccgcgccctctgcgcaaccggactccatccctccctcggcgtccatcaccacaaccgctacgatgcctgctgcctcgcggatgacctcatggagccgttccgccccatcgtggatcgcgccgtggccaaggggttgccggaatggggccccgacaccgggatgaaccgggatatcaagcgcgcccttctgggggcgctgaccgccgaggtggaaatcgagggccaaagcagaagcctcttcgaccttttgcgccacgccagcgcgtccctggccgccgttctgtgcgaagaagccgccaacatgcgcctgcccgcctgggaaaagacaggagtagctctgcgaaaccgcaacgacgaagaccaaccgcacgaagcccgctcccccaaagaggaagagccatagccgcgcggcagacttgtcgaatcggcgcatcgtatcatgggcgtctcgccttaccaagccatgtggctcattgccatgttcgatctccccgtcgaaaccccggcccttcgcaagcaatatacccgcttccgaaaggccctcctcaaggacggtttcgccatgctccagtactccgtctatgcccgcttttgcgccagcgaggaagccgccaagtcccaccgcgccctcgtccgacgcaatgtccctccccacggccaggtccgcctcctcgccttcaccgaccatcagttcggaaaaatggaggtgtacttcggccaaatccccacagaacccgagcaacccatgcggcaactcgaacttttttgaagccaataccccacgcaaagcccccggaatcaacggatcccgggggctagagtgtaacgaaaaggtcgttctccgtcaactacagtggaaacctgcgccggcccgcgctcccccgcagtgtaacgaaaaggtcgttctccgtcaagcctgctgtgatccagaccagcaccccgggcgcatcccacatttccggcggtccaccaagacctctcttgcggctctttggacctggcccaacgccgcctctccaaatctaccctcatccttaaacccctcatcattcatcattcatcattcgtcattcatccttcatccttcctccttcatccctcagtcctcagtcctcagcactcagtcctctcttctcagccgccagtctcgagcctcaagactgcgcaattccgcttgcccaccggacccataatgaattgcaggatagacaggattgcctgaataacgcgctggcgatgggccaaggcccgtcctacggcgttgaagccccgctgcataccgcgggagtcagagcgcgaggtcaatgccgcctttggattcgagcacggcccgggccattacttcgtccacaccaaggcgttcccgcagggcggcggcgctggggaacttccgttcctcccgcaggcgctcgatgaagtacacccgcagctcccgtccgtagagttcctcgccctcgtagtcgaacaggaaaacctcggggcggtactcggtgcccgcgaaggtcgggctgctgccgatgttcatcatgccgccgtggacccgccccgccaaaagaacctgaa

SEQ ID NO: 321 - DNA, 4829 bp, synthetic construct
  source 1..4829: mol_type = other DNA
  misc_feature 1..4829: note = Synthetic
atctatgagaacacggttgttcttcgcaacccctccttccggacaaccttcaccgtcaatatggaagcgcgtgtggtggcggagtacctcaagtggaagcagaaggagtccctgaagctcaagcagaaggagcccctgaagctggggcagaaggagcccctgaagctgaggcagaaggagcccctgaatctgaagcagagcggtgttctaaccggcccgccgccgccccccgctcccgccgccgccaaccactaatgcggcggatacataaccgacttcgggcttatgtctcctgattatggattgccgagacccgccgcatttcccataaccgcccccaacaaaagagaaaaagacaaaagaaaatgcccccactgggagggcattaggacgctcttgcgagcaggagccttgctgggccgaagcccagttgctgtaattaactggacaacgacctcttcgttacactaaaaaggatggtacagtacatagtccatccgagtcaaggagaaaatgcaatgacaccttctattaatccgaatctcattcttggcctggacctcggcgccaattcgcttggctgggtactcctggatgcgcccgacggaaaacccgaaagcgtccgcgatgctggagttcgcgtctttgaggcgggagtgaatctcctggagaaaggagaaaaggcctcgcggagcctggatcgccgacaagcccgcggacgccgccgacttctggaccggggcgcccggcgccgccggaaactccttcatgcccttcagcgggcagggcttctccccgccggtgaactccacggccatctccgccccaacgatcccgccaaccctgtttccctggtgtttctcgataccgccgccgatccctaccacctccgcgcccaagccctccagcgaaaactcgaacttttcgaactgggccgcgccctctatcaccttgcccgccggcgcggtttcctcagcaatcgcaaagtgcctcgaaaggaggaagagaaagagggtgttgtagataaggaaaccagagccttggaggcggaaatgaaggccgcggggttccgcaccatcggcgctttacttgcttccctcgatccccatgaggcccgccggcgcggaagatataccctccgcaagtggttcgaagacgaattcgaagcgatatgggccgcccaacagcctcaccatcccgagacactaacgcaagcgctcaagaaaagcttctttaagatcattttccatcagcgccccctcaagtcccaaacccgcctcatcggagtctgcgaattggagaagcgccccgtcagcgtggtgaagaaacttaagaacggccaggaccggcgcatgaccgtctatgccggccccaagcgtgctcccatggccgcgctgcccgcccagcgcgcccggatgctccagaccctcaacgacctccgtgtcgtcgagtatggcgccgaaagacccctcaaacccgaggaacgctcccgaatcctcgacgccctcgaccgcgccgacgaactcaaactgaccacccttcggagcaagacgcttctcaatctgcccaggttcgccaagttcaattttgaggccggggaacgcgaaacaattccaggaaacgatactgccgcccaactccggaaggcctttggcgaaaaatgggatgccatgacaccggaccagcggaatctcatcgtttccgacctgctgagcatccagaaggacgagacattcgtcaagcgcgcggccatatacagcgggaagtacagcctgaccgacgaacagcggaaggccctggataagttcacaccagaggacggctaccatcgcctttctctccgggcgctgaagaaaatcctgccgcatctcgaatccgggctttcttactccgaagcgcggcagcacgcctatcccggctgcgccgccccggatgcgcttgattcattgcctgccgccgctcccctgcgcaaccccattgtccagcgtgccttggcggagctccgccgcgtggtgaacgccatcatccgcaaatacggaaagcccggaaccatccgcatcgaactggcgcgcgaactgaagaaaactcagaagcaacgggacgaaatcggcaagcaaaacgccaagaacagaaaggcccgcgacaaagcccgcgaggctgtcgtccgcgaaaccggacagcccaaccccacctcctacccgatagagaaataccttctctgggaggagtgtggcgggatatgcccctacaccgggaagtccatccctctttccggcgagcagggccttttcggcggccaccccgccttcgatatcgagcacatcatccccctcacccggtccctcgataactccttcttcaacaaaaccctctgttgcgtgaacttcaatcgaaacatcaagcgtaaccgcaccccctgggaggcggtcggcgaggccgcccaggccggcgatcccgccatgaaacagcagtgggccaacatgatagacagcgtcaagcgcttcaaaagcgacaaggatatgcgcgacgccaagctggagcgcttcaaattcaagaccgttcccggcgaagaaagcttcctcgaggaattctccacccgccaactcaacgatacccgctacgcctcccgccaggcccgcgaatacctcggcctgctctacggcgccgaggccgtcaagcgcgtccagcccctcaccggccaggtcaccgcttatctccgctccgcctggaaactcaacgggatactgagcggagacggcgggaagagccgcgaggaccaccgccaccatgccgtggatgcgctttgcgccgcgctcaccacgcgggcagtggttcaccaactccacaccgccgccggacgcggcgtcaacgtgttccgtcccggtacctttcccgccatggaagaaccctggagcggattcatcgagcatgcccgccgcgcagtaaccgatattatggtttcccaccgtgtttcccggaaggtcagcggtcccatccatcaagagactctctacggggaaatcacccggccggataccgccgcaacacaaaaacccgagcgcgccgccgtattgcgaacgcccctgattaagctggacgaaaaggacctggacgacatcgtggatgaaacggtccgcaaaacggtgaaagaccacttggccaaactcgccgccgaccatggaattgacataaccaaggccgtcaaactcctcgaaaacgaagacaacctgcccttcctcacggccaaagacgggcggcgcatccccatccgaaaggttcgcgtctttgtccgcgccaagcccttctccattgccgggggcgatcaccagcgccttgtgatttcaggcaacaaccaccatctcgcggtctatgagggccggaacaaaaaaggcgagacaatctggcaggaagaagtggtctcgctgaagaccgctatggaacgcgcacgcaagcacgaacccgtcgtcgcgcccaaggacaaggatggaaacaaactcctcttctccctcgttatcggggatgccgtcgaaatggaaatcgagggagagaaatccatttggatcgtgcgcagcatttccgaaagggatttccgattcaagccgccgcatgatgcgcgtctggcaaaggatctgaacaaggaaaaaagttggcgcatctgcagcataggcagtcttcaatccggaaaatgccggaaaatccatctctcccctctgggagaagtgagttccgcgaaatgaccgaccgcatcctcgacttttccgaatcgggggcgcacctgagcctccaatacaaccaactcgtcatccgccgcgaaggcgccgggaaacccattaccacgcccgtcgaggaactggccgccctcatcctctccaacccggccatcaccatcacactgcccctgatggccgccctggccgaagcgggcgccgtcctcgttgtctgcggcgccaaccatatccccatatccctccttactcccctccaaggccacagcacccaggccgaaagaatggcccggcaggccgccgccccgctcccacttcgcaagcgcatctggaaaaccatcgttcaatccaaaatccgctcccaggcccgcctcttggaggaactcaccggcggcgacgcggggctccgcgccatcgccaaccgcgtccgctccggcgaccccgacaactgcgaagcccatgccgcccgcgtctattggcccttactctttggcaatcccgagttccgcaggaacccggagggcgaaggcgctaacccgttcctgaattacggttacgccatcctgcgcgctatcacggcccgcgccctctgcgcaaccggactccatccctccctcggcgtgcaccaccacaaccgctacgatgcctgctgcctcgcggatgacctcatggagcccttccgccctatcgtagatcgtgccgtggccaaggggttgccggaatggggccccgatgctgagatgaaccgggatatcaagcgcgcccttcttggggcgctgaccgccgaggtggaaatcgagggccaaagcagaagcctcttcgaccttttgcgccacgccagcgcctccctggccgccgttctgtgcggagaagccgccaacatgcgcctgccggcctgggaaaagactggagtagctctgcgaaaccgcaacgacgaagaccaaccgctcgaaacccgctcccccaaagaggaagagccatagccgcggcagacttgtcaaatcggcgcatcgtatcatgggcgtctcgccttaccaagccatgtggctcattgccatgttcgatctccccgtcgaaaccccggcccttcgcaagcaatatacc

SEQ ID NO: 322 - DNA, 23384 bp, synthetic construct
  misc_feature 1..23384: note = Synthetic
  source 1..23384: mol_type = other DNA
ggcgctgaactcggcaacccgcaggccgaccgatcgactttcgcgggcagccgccgagatggaccggcaatcgcgttcattcctttgcatccagccacgccctcagttccgtaatctcttcaggcgaaagtcgttcgtcagggggcatgtacccgaagtcgaccagcacgcggatcgggtgggagtggacctgatagagcggcgcgcgcactccgtcttccgcatggcacgcggtgcaggcctctaacgcgagggcttttccctgcggcggcatcggcgagttcgatggaaagtgaaactccgatctgacttgctcgctaacatgctggttgaacgcggctgcgagcttcgcatcaagcactaggtcttcgcgtgcggggtggatcgcaaggggtcccgacgaatgacacttgtagcaactggttccctcgaaacggatgtctgattccgtgtggatctgcgcatagtagtcgcgcggcggatcaagcgtcatgtcctggacgatcgcaaagtacccccagcctgcgtccgacgccgtcttctgcaccaacaaatagacgcggaccgcgtcattttcgaaagcggagatgtgattcagcattggctgccgaatgacgtcctcttgggtactaatcagcccgacgtccgaaacggggatcgcgccgccgcggtcgaagcgtcgtttggcctcgcgcatgtagtgcttcacctcctcctcggttaggccgcgcgcctccgggcgggttggagcgtctagaggaacgaccggcgacgtccacgccttgcggatcttttcgacgccaaccgtcgaactttgctccacgaacttttcacgcgtgtaccaggcgagatcgagcggcggctccagaagcaaccccgtctcagtcgacttcgcgggcgctatggccggcggagcgctcacttcatcgccgatcacttgcgggccctcgcgtgccgtggtcggagtgctcgcaagcccaatctgcaatagtaacgcagcaaacaatcggcaatcgcggttcatagtaactgcgcgatgatgacaagggtcgggtctgtctgagtccgaacaattcgtcgaacggcagttgccttcaattgaattgggcattcagcgatgatcgcccagaaaatctcgcccaaccagtgacgccgaccgtgataagtcacgttaactcgaacaaaatgcgcttgatgacgccgcgcgctatgcaactgcaagagccagcagcggagcgtgggcgagcggtcgccgcggaatttcggacgaccgctcctcctcactaactgctcaagagctgaaatgagcctgtcgggactcgaatcgaacgacctaaacaccatacatgaaagcaacttaggagattcgtcgttcaaatgcgctgcgttttccggtgcagtttcagccgatttgcaccaagtccaagccgagaccgaattgttggtttgccgatggccgacgcttccaagtgccgtccgtcagcgaatcttggaattagccggagtcagccaccatgactgacttgctgtcaacgccgatcaatcgacgcatcttccatcgcccgacgagtcatccgacgcactccacgccgctttgctgcttcatcggcagtccgccaccttacagtcagcagggaaacgctgatcgaggacgcctggcagcttcgctcgcttggaaagcatcagtggctggtcagaatggcggtcgaccgattgaacgcctccggcggctcgctgacgacgggcgcggcgtgctcgccatgagattcttaatcgcctcccgccccttcataaatcggaaacctggagagtagtctccacgtcgtgaagtcacggccacgccgctacgcgcgctagcagccctcctctcgcgctcggacggtcgccggtgtgattccgcttgccaatcttcgagcgcgcgaactggggcatctggtgcggtcgttttcttgatagactgccgcgaatgaagctgctgcgtcacttgcgaccgcggttctcagtcagaaccatgctcgtggcgataacggtgctctgcctttggtgttgctacagccttctctggatacggcaacgacatgctgcgtttagagacggggtttcccctagaggcgcattcgcggaagacacgttgactcccgcgccggggctcctgtggctctttggcgaaggcggacacacgaggattgtggtggacacgagcctgattagtgaacctgaacgtgcgcgattgagacgactctttccggaggccgagattcgggaagtcgatttcagcgatccagacggcggctattaacgaatatcggcttcccatgccccgccaccgcttcaccctacgagtgggacgttagttccaatcgctaccgcctttcccgtcgagaccgtaccgctcttcgatatcctcgacttcctcacacatctcaaatttttcggcgatccaccatcgatcgaaatcaacggatgtcgctggactcgaaaactgcatctgctgaagccccggaaagttccgcagcatgtctacggcctgcgtggcgaatgctctctttactcgtttggcttgagcgtcccgtgagatcctgtctccctcgtggttttcccagagctgccgctcaagaatgtacaagacgtcgggatcactattcgtgccgatgagcgcgacgagctctggcttaggcgtgatcaagtagtgtgctgggtgaatcatctaaactactactctctcatccctgcgggcggcgaaggcggcgtgaggagaggaggccgaccatccccaccgcggcgatcaccaagccactcggttcgggaaacgttggatctgtgagcggaatggtattgatgcccgtatcatagaggacatttcccgctgatatgagttgaatctggtaggaaaaaccgcctccgctactcatcatcacgttcccgaggaacaagtctccggcgttctcagcggcggtcgtgatcgtaccgccaagcttaccaacggtgaacgacaactcttggccgttgttaatcaagccaacttgcgtgagggccaggccgcccggaaaatccagcggatcggctgtcaacatccggttcgggtaggtgaagagatcccccggtggacgggggacgcccgcggaggcaccgctgtttgcattgatgaaagatccccgatagctcttcgcttggaaaaaaatagtatcgaaagacccgttgaaattgccgccatcaacgtagaagttataaacgttgttgagggaaatgttaggctttaccacgaactcggcggcgacgaccgggcggaaaaacgctgttgcgatgaacgccgcgagtaagacggtttgtttcataaagtgaccgtggatgaagttgctttacttgggggtgttctcactacaaccgctcccagactcccggccggggccattgccttacacgttgcgcttcagcttgacgagaatggcggcggcaatcgctcccagaacgagtacgactgccgtttcgatggggccgaattctagatagtaggcgagcattctccgcattctaaccgccgccaaatcatttctcatccccaccgccacccccaacagtccagccacgacggtcgtggcgatgatcgcagagcggagcgtgaagcggttgagcctcagaactccgacgcccgagagaccgaagacgagcacgggataccagaggggaccgtaaccgcccacgagtccccagtcgaagcccgcgcgccgcgccatacccatgtcacaaaatctatcgatcgagtcattgtgttttgtcgtgaacaaccatcgttgtttaaatggaaagtgcgagccgggttcttcagcgatcacatcaaagttgccgtaagatgccgtcaaacacaccctttccaccttaaagggaatgcctaagatcgcttggtaaaaataagtgtaactccatccccacaatgccaaacacccaacgctagccgcgaggcaaacggtcgccagggcgtagcggaggtaggtgagcatgtgggaacgattagcaacggcaggcgttatcggacggtccatcaatagggtccccttttgccttgctcggagattttgaatcgccccccgccccttcgcgtgtcgggaacgcgtgagtagtcttcgcgtagctcaaagcccattcgagcggagaggccctcagcgccacgctcacgcgattctcgcttggctggtgtgattcccttcgcccaccgtcgagcgcgcgaactggggcatctggtgcggtcggatttctgatagactgccacgaatcatgtcattgcgtcggctactaccgcggttctcgctccgcgccatgctggtggtgatgacgctgctagctcttttctttggctaccatctgaactggattcgacaacgccgagcggcaatcgcaaccggcgaagtagtgccgacctttaatttgaagcaatcgagttttccgccggttgctcctggtttgctcggcatcttcggcgagcgaggctacaacgagttcacggttcattatcgcgatccaattcaccgggagggggaactcaaacgagtgaagaaactctttcctgaagcagaagcggtatttgccactccaatgccgactagaagtcttccttgaactagcaagctccccatgctccgcccccgcttcacccttcgcgtcatgctggccgtcacggcgatcgtggcggtcgtgatgtggcggcatgtcgactggcacaatcagcggggagaggcgataaggtctggccgcgtcgcaggagggcacccagtccccgctcctggcttgctgcggctgttcggcgagagcggctacaacgcgctgctagtcgatccggcaatggacgctcaagagatcaatcaactccggagcctgttcccagaggctgcgtatccctacggacgaatcggtgagttctgacgcccttccccctcatccctgcggacggcgaaggcggcgtgaggagaggaggccgaccatccccaccgcggcgatcaccaagccactcggttcgggaaacgttggatctgtgagcggaatggtattaatgcccgaatcatagaggatgtttccggccgatataagttgaacctggaaggaaaaaccgcctccgctactcgtcatcacatttccaaggaacaagtcgccgccgggctcagcggcagtcgtgatcgtaccgccaagcttcccggccgtgaacgacaactcttggctggtgttagtcaagccaacttgagtgagggccaggccgcccggccagtccagcggatcggccgtcaacatccggttcgggtaggtgaaggggtcgcccggtggacgaacaacgtcccaagtggcaccgctaaatgtattgatgaaagatcctcgatagctcttcgcttggaaaaaaatagtatcgaaagacccgttgaaattgccgccatcaacgtagaagctataaacgttgttgggggaaatgttaggctttaccacgaactcggcggcgacgaccgggcggaagaacgctgttgcgatgaacgccgcgagtaaggcggtttgtttcataaagtgaccgtgaataaagttgccttactttggggtgttctcactaccaccgcccccagcctcccggccggagtcagcgttgacttcgatgatcccagagccccgactgtggcggatttcgacggatcactcgaacgagcgcccacgcggctaagcccatcaacccgacgaccgccagggcgaatgcgatcattacgattagggcgagcatcggaatgtaggctgacatctgaccttccctgagctcgggatgggaaatgaatatcccgcattctaaccgccggcgcgggagcttcctacagaatcaccgccatccccagcagcccagctacgacggtcgtggcgatgatcgccgagcggatagtgaagcgtcggccaagacgtagagaggctacgccggcgagggcgaagactaaggtggaataccagagagggaaagaaacgcgaagcgatgtgcgtggttggtatctcactgacgcggcgaagtgcggacgggaagagtttaaagatgcaaactcaggatcgaattcgactgacttgtatttccagtcgtatttccagttggtcggcccgaagtcaccgagcccaaccttacaaccgccacaataggcgtacagctgaaaaagctgcgaattattaagacttccgagggtcatctcataatgggtcgcacttctccaccacaacgccaaacacccaacgctcgccgcgatgcaaacggtcgccagggcgtagcggaggtaggtgagcatggggggccgagtgcggtgcaagctcgtttttagtgcttactcaaaagacacgtgcgcttctgcaccgtctagaagccaccgccgcaaatccggccatggccagtacacttgctgctggttcgggaatgggcgaccacatcacagcgtaagtgaatccagcggcagagcgcgcggagccgactacgacgccttgtgcattaacggcatgggcagtcgaacgggtgaattgccccaagttagcgagtgttgaatgcaagttaatcacgctatcgggcgttccttcccaaagcagagcacgcgtggcgccgtcagaaagcgccccggtgccgacttggtaagctcctgccgcgtcggaaaccgcgctcgatctgaactcagcgggatgaaaatcgacgacgctagccgccgttcccttccatacgagcgcatggcttacgtccgttcctgataccaacccagagcccacctgtattccattggaaataccgacggccatacttgctatgaaaccaccaggatgcagatcgaccatgctagcgctagtaccgctccaaagtagcgcatgctcttcgcctcccgtcagcgaaccatatccggagccaacttgctgggtggcggtcagagctctaccaaatgtccgctcaaaccctactgggtggagatcgactacactcgatactgatccgcgccacagcaacgcatgaacgcctcccccggtagttgcaccagttccaaggccaacttgactgtccccgaacacatcgtcaatttccgaagatgtgaagccaggcggatgaagatcaatgactgaagcggcggtatttcgccacaatagtgcatgcgatcgaccgttagtgagtcttccaagtccaccttgttgattctctccaatcgcaaaaatctgggactcgacaaatccgttaggatgaagatcaagtgccgttggaactgagccgtgccagcggatcgcatgacggtttccagacgcctcggtgcgataacctccgatcgtgctgtcggcaacttcgactgcgacaacttgcgggccaccactcggattgagaagttttgccttgtaagttgccgcattgacactggcgaaggcaccagcgccaagtgccatgagaacgactatacgaacgaacaagagcattaatcgcctcgggatgtaggcttttttttatgatgagagtgagtgctcctagtgtatctcgcaacgatcttgccgtcgaacagaataacgccctcgcgacttgctcagtccagcgcccgaaccgggaagttactcacgcgacgctgactaagaaaagaacccggcgcgaaggttagcttccgcatcgcgccggcgtacgatgttccccctttggctgcggctactatccgcggccgtacattgcacctcggttcagttacggactcgtcgttggcttgacctgctatcgatttcctgatccatgcgttatgaaggtcgaatcagcccttggggcgaggagacctgtagatgagtacgaaacgtcgtcgtcggcattcgccggagcagatcgttcgtaagttgcgtgacgcggatgtgatgttgaccgccgggaaggatttggcggcggtgcttcagtcgctggaagtgagtgagtcgacgcttgagcgttggcgcttgcagtacggcgggatgaaggccgaggaagcggtgcggctgaagaagttggaggacgagaatgctcgcctcaagcgtctggtggccgaccaggctctcgacattcagatgctgaagcatatcgcggagggaaactggtgagcccttcccggaagcgcgaggctgtcgttgagctgcgctcacagttcaagacgtccgagcgaagggcctgccgagtattgagtcagcctcgatcaagtcagcgttttcgatcgcagccacggagcgacgagccgcggctggtcaagcgcatgctggcgctcgtgcgtcgccgtccgcgtttcggctaccgccgcatcgcggcgctcctgcgggaagaaggcttccgcgcgagcgactcgcgtctgctgcgtctctggcgtcgagaagggttgaaagtgccgagaaagaagcgaaagaagcgtcgtctggggaccacctccaacgcgtgtcatcgtcggcaagcggagcaccggaaccatgtttgggcctgggacttcgtgttcgacaagacggctggcgggagccaactcaagtggctgtcgatcgtcgacgagtacacgcgcgagtgcttggcattgaaggtcgcccgtagcatcaccagcgaagacgtgatcgacacgctggcagagttgttcgcgatgcggggcgtgccgcgatgtatccgcagcgacaacgggccggagtttgtcgcccaggcgattggagagtggctcagtcaacttcagatcgtggcgctctacatcgctcctgggagtccgtgggaaaacggctatgccgagagtttccacagtcgcctgcgggacgagttcttggccttggaacagttcgaaagtctggcggaggcgaggaagctcaccgccatgtggaaggatgattacaaccactatcggcctcacggttctctggggtacgtcgccccagccgtgttcgccgcccgctgcaccgcttccgctacggagagagcttcggcgacgcctcagctcactcctccgctccagcagtgcagcggagtcaacctaaccgaaaccttcatagcgggtggtactgaaatttgaggctggtcaggctaacgggtgcgtttaaattgtgcgcagctcatggaatctagactccaccacatgcgcacaactcaaagtgagctttctagctcgcatggtcagcgctatggctcgtcgggggcaacgtccggcacaactccagttcccgctggtttcataacactaagcgtggccgcccgtccggttggagatgtcgatcggatgcaacctagtgtccccaccgccgattgaattcggcactgcgtcgttgtgcggtggaatcttctatcgcccagcgaagttgacgcaactcactgcgcatgcggaagtcgtcgtaccaatcgggcgacaatgcaaccggaccgcgatatgccggtgcggagggattgaagtagtagtacccgccatacgggctcggctgatacggcccggcgacccacatgccgctgggatactgcccgaacgcgacggatggaattgccaatccaacgatcaacatcaaggttcgcatatacgctccttctcgatctgccgacaaatgcggctgtgatcatgactggcggaggggccccatggcgtctgacgatgttaccacggtcccagggcgtttactcatagagcctctgattagcccgcctagcacgcgctgaaattttttttgagggtaaacccctcgagttgggtactccctttgttggaagccgcgcccattagtggaaagtctggcgattgcattcgcatcgatagaacctggagagcagttccagcaacgccttaagcccgctggtagtcgcctgcctgcaggggacccacgtccggccggaatcttgcccccagttcccgtcgattagaagtgaagcgtgtaaatcgtcactaggggcaatttcgtgcggtcgaggatctccagagcttggttgcaaaatggatctcattcgacatgatattctcgccaaagcacgtgactaaatttttcttgcttagcaccgaatctgctgaccgctatggctgcgcaaaaaaaaggccgccctgaccgaagtcacggcgaccggttgtgcagagcgctgggcccgagggtcagcgttgcacagtgcctgcgaattttcttcttgttgcgaaaagacgcagacggcgattggttacactgcaagcattatttgctattctcgatttccttgtcaagtcattccaaggattctgaaatggcgaatctcgtacttggtctcgatcttggcccgaacagtatcggttgggccctccttggcgatggagccgagggagattcccagttggtcgacatgggagttcgtgtttttccggaaggagtcgatgccttcgacacggccaaggagcgatcgcgaaatgaggatcggcggatcaatcgtgggatgcggcgccaaattcggcggcgggcgcggcggaagcggttgctgcaggctgcattggttgagtcgggactgtggccggtcgacgccgcagcacaggaagaggcgttggcggttgatccttattggcttcgtgccaaaggggtcagcgagcggttagaaccgtacgagattggtcgggtcttcctccacctcaatcagcgtcgcgggtttctctcgaataaaaagaaagaccggggcgacaaagaagttcaggggatgcttgcggagatcaagcataacgaagagctcgtcgcgctcggcggatttgagaccgtcggtcaactgctcgcggagaagtgcgccgcgctcgatcacactgcccgccaggaggacgacgaggttcgcaatcgccatctctcgcgtcggcaactggttgatgaattccacacgatttggtcgaagcaagcgacatttcatccccaactactgactgacaagctacgcgacggcaccgtcggcggaactatggaacctcgcaaagccgttcccaagcacgacccgcgccgcaacaaactttcggacttaaaggcgttcggcctcttcggcctgatcttctttcaacgccggatgtattggcccaagtcggtcgtcggtctgtgcgaactggagtcaaaggaaaagcggtgtcccaagggtgatcgccgggcggaacgatttcgcgttttgcaggaggttaacaacctccgttacatcgataccgcagaaggtgacgagcaacccctcagcgaggagcagcgtcggctgctgattgactatctctcggatcgcgagaaggcgacgttcgaccaaattcggaagaagctcggatttctcgagtcggtcaagttcaacttcgagcgagggaagcgaaccgccctaaagggatttttgatcgactggatgattgcgaaggagaccgacaagtcgtggtacgaccgtcccgaggcgcaacgagacgagatcgtacgcattctgctcgataacgaacgcgacgacgaacggattctgacgacgctcatcgataagtatgggttttcaactgtcgccgctgaaacgctgctggagatcgactttcctccggggtacggtagcctgtcactcaaggcgatcgacaagttgctgccgtctttagaacgagggctcgtttaccaatcgatcagcgatcccgaggagagcgccctgcacgcggcaggctatttgcgtcgcgacgagctgcagcggcggctgttcgataagctccccaatctggcaaggacacggccggccgattgcaagctgggagatattcccaatccggtggtgaagcgagcgctcgttgaactgcggaaggtggttaactcgatcgtcgtgaagtacggcaagcccagtgcggtgcatgtcgagatggcccgcgaggtgcagatgggcgccgagcggcggaaagagattacagctcggatgcgcgcccgcgaggcggagcgagagaaggctgctgaggcgatccgcaaaatgggttacgctgcccgccgcgacagcgtcacaaaatacatgctctggcaggagcaggggcacgagtgcgtctactgcggcaaaccgatcagtcagacgcagctatttggcggtgagatcgacgtcgatcatgtacttccctattcgcgaacgctcgataattcgcaagggaacaaggtggttggccatgtaaagtgcaatcatttgaaggggaatcggacgccctatgaatggttggctgccggcgatgctgtccggtacgctgaagtttgccagcgggcggcggcgctgttgcagaaggggatgatgccgtacggcaagtatcgcaagtttctgcagaagcagcttgatctcgacaagttcatcgcccgacagttgaccgataccggctatatcacgcgagcaacagtcgaatatttgagactgttgttcgagaaggatcatgaggtgctgggattgaagggccaattgacggcggaactacgctggcagtgggggctcgacaagattctggaggaattgcccgacagcccagcttggatcgagaagaacgatttacggccaggcgagaaaaaccgggccgatcatcggcatcatgcgatcgatgcgattgtggtggcgctaactaatcggaagcggctccataagctatctgaactcgtacggcgtggcggcgccaagaagcatggcgagattctcgaagagccgtggcctgacttccgcgacactgttgtcgagcgggtgaagggactgaaggtgtcgcatcgggtagagcgaaaggtgcgcggggcgttgcatgaagagacgctgtacggaccgacgccgaccgagggggagtgggtcgtgcgaaagccggtagagaatctttcaccggccgaggtggagaggatacgcgatgcggggattaggacgatcgtgctggaatcgctaaggaagagaggaatcgattttggtcgggggaagaagcctgatgcaaaaaagatgaaggaagcgctctccaatctacgcatgccgtcaggggttccgatcaagaaagtgcggattctcaagcaagagcagaccattcagccgctgcgcgacgccccagaacatcaagcgtacgtcaaaccgggatcgacgcatcatttatgcatcttcgagttcgaggaaaagggaaagaagaagcgcaaagcgatcttcgtaacaatgctcgacgcagccaagcgacagaaacgtggcgagccaatcattagtcgaacgcatcccgagcggcccgatgccaagttcatcatgtcgctgtcgagccgggaaatggtgctggcaaactggaacggcgagcagaaactattggtttacaaaacggcagcttcgacgcagggtcagatctatttcgcggagcacaccgatgcccgacgaagcagcgatcaggcgaagttcgtcgctagcgccaattcgctcgacgcccgtaaggtgacggtcgacccgctggggcgaattcgttgggcaaatgattgatcacaagcgatgactcggcgggagtatttaccccagcatactgaacagttgttcgttatttatccgaaaaactacaattagagtgaaagttgcgcggcttggatcgcgctggcacatgtccgtcacggaggagctcattttccttcatggcgaggctggctgcggtgatcaagcgaacgctcgaaatctcgcgcgagcccgcgcatctctctctccgcaacgagcagctcttgctcaagcgggatggggtgattgtcggccaggcgccgtgcgaagacctcggcgtggtcgtcgtcgaccatccgcagacgacctacactcacgccgccctggcaaagctcgccgagtgcggggccgccgtcgtgttgtgcgggcccgatcatttgccggcggcaatgctcttgccgctggccgatcattcgcaggtcgtctggcggctgcgcgatcaacttgccgtcggccggccgctcgccaaacaactctggaagcaattggtcgtcgccaagattcaggggcaggctcgcaatcttcacaggtcgcttcccgcctaccgtaaactgctggcgctggccggcgaagttcgctcgggcgacccgacgaatatcgaggcccaggcggctcgcgtttaatggcaaaactggctctggtccgatgattcgccgcaactggacgttgaggggtttcgccgcgacgctgactctccggggctcaatgccttcctcaactacggctacgccattttgcgggctgccctggggcgtgccatcgtcgccgccgggttattgccgagcttggggctgcatcaccgcaatcgctcgaacgccttctgcctggcggatgatctcattgagccatttcggccgcttgtggacgatcgggtgcgagcgatgcaccgtcaaggattcgacgagttaacgcagccggcgaaggcggagttgctggggttgctcactttgcaaatgcggctttgcgatcagtcgggaccgctattggtgatgctgcaacggaccgtagcgtcgctggcccgctgctatgccggcgaggcgaagcggctggagattcccgtgcccgcagactcgccgttgctggccggtgccgcggatgatgagtggaaaatagcgaaagtcgagcagaccttggaagtcgaccaggagaatgagctgacgtgcaaatcaccggataccgactgatgtgggtcttggcgatgttcgatctgccgacagacacgaagcgggcgcggcgggagtacgcgctgttccgcaaaatgctgctgggcaatggctttacccagatgcaattctcggtgtacgctcgcccctgtcccagccaagagaacgccgacgtccatgtggggcgaattgagcgcagcctcccacctgatggcgaggttcgcgtcatcacgattaccgacaagcagttcgagcgaatgcgaattttttggggaaaactgcggcaacgcccggagcaggcgccatgccaactcgaccttttctagcgcaatacggacgtacgcggtttgcctgttggagtttacgacgcaagctagtgtaaccaatcaccgcctgcgaccaatccgcaaccgggggagagttggctatcccttaccttcaagtgtaaccaatcaccgcctgcgaccaatccgcaacatgctgtccgccgtcaacgagcaggccgaaagtgtaaccaatcaccgcctgcgaccaatccgcaacgtcaaggcggcgccgctccacgaggagacgagtgtaaccaatcaccgcctgcgaccaatccgcaaccaggctaacataccgggccgccgtcgagaaagtgtaaccaatcaccgactgcgaacaatccgcaactatactctatacttacttacttactcttacagtgtaaccaatcaccgcctgcgaccaatccgcaacgatgcccgcctcctgtactggttcagtaaaagtgtaaccaatcaccgactgcgaacaatccgcaacgtggccgggcgcattggaaacgtttgagcatgaggggcagtatagttaatcaatggcagggcgatcttttgccccgcctggagagttaggcagaaaagaccgagatagtgggtccaccttgggctcggcgggatcttatcgactcccccgccgatagcaactcagatggggtatcgggcggccagaagcggtcggtgcgattggcgtttgggctatattcacgccctagctacctctagcgtcggcactttcgctgagaacgcgacatctagtggcggcttccttctgcggatttcatcgataggctaatcgctgtcgtcgatcgaccctggctgagtgttatctgtttacttggagttctgtaccccgccctaatcgggggattctgagtactctttcgcctttccgccgacttcgcgaggttacttctcagaatgcaattcagccgtttttcgcagcacgttggccaaatttagaacgtagggagacgagtatgtggaaggtagagctcgatttcagcggatggaatgtgccgccgcagtcgcatccctcgctgccggggcaaaagcaactgttttcgcatttggaaatttcagcgacgcatgatgctgttgcccacaacgcatcggggcgcgaacttttcgttactggcagggacctacccggcgctcaggagaccgcccaagcaattctttgggacatcgaaaagtaaaagcaaaacgtgccgacgcttctacccagtctaatgcaagcggggctttgaagcacaaagacttcgagtaaggacaagcaccctttctaccgctgccgtaaagcgatgcacttttctagaatgaggacatcgtcgggcgtcagccgcgggttgcaaatcggggtgtaagcgaccggtggcgggaatgggcgttccaccgttcggccttttccgtcgccgctgggcccatcacggaaaggaatgatcatgccacgtccggcctattcacttgccagtgataacgtccagcgtccctcaacaatcaccgagacgaagcggtcgtcactcccataccggctccgcagattgctgggcttggtaaacctttaccactggtcgctggagtggacgatccatgccgattctaactggaccctgggcgtggcgccttatccctacacgttcaatcgccgcgatctctggttacttggaatcgagaggatcgcggacattctgaacggctgcgagacggcgatcagcgctggcgcggaaaaaagcgatggctcaaattcacgaggcagattcaatccgcgtgagctggcctcgaataaacagtcgctggaggatgtcgaaacgctcgcagctgacgatgccgagcgtgaatacaaggtaaagtcgcacagctggccgagtttgccattggatgggcgcgacttacttacctcggtgagtttttacattccggatctcaaccaacaggacccagtcgattcgtggacgctgattccattcgatgtgatatcaccggcaatgcgccaagcatcgaaccatgtcgaaaaagacctagctggcttggggataacttgggacggaccgccttactacaggcattttgagaatggcgacgaattgttgcagtacttgagggcaaagcggatcgaagaagagttcgcgattgccgacctcgaacagcataggcgcgacttcgtggcgcgtattgaaatggcgctgcgagtggcatatgaacgagactgtctgccgggcacgggcagcctaccggtgaaggggcaacgcggtcgcaagaaaatcttcgacgccgcgaaagatacgaagctggccttggactgggaagctgcgcgttcccaacacatgccgaagaaggaatttgtgaaattgagagggctatcactgagggaacttcagttggctctaggccgagttcgtcgcgaaaagcgtatctcggagtaattgcggtcaagcctttttaattcgtccgcgccaaattcttttatccgcgatccccggcgacttcttgcagcgccgtggaattctcgcgcactaattgcgcgcactaatcctggcgtgcgcgcgcccggaaatacttgcgttgtgcaggtcgagcgacctgagaattaccacgcaggaggctcccaaaatggttgccatcgccacgaagtccggaatcgcccttctcactccaaagcaagccgccgagcagcttgccatctccccccgcaagctctggtcgctgaccgccagcggcgacgtgccatgcgtccgcatcggtcgatcggtccgctatgacgccgcagacctcgccgagttcgtcgagacgctgaagtccgccaagtaacggccggcacacgacggcggcccgggcgttccgggtcgcccttctttatacaccgtccggcaagtgccgcgcagaaaaatgcccggcagcgattcgtggtcgcacgccgggctcgaaaggaacgttatgagctattctattcgatttaatggggagcgaacacccgatgtcggggccactgccgatggctctaacagggcaactgaagattctggctttggcgcctacgtccccttcccgacgcatacgctgcccggcccggtcggggcgtttaccgccgccgccgccaaggctatcggctgcgatccgtcgtttatcgcgcttccgctgatcgcgtgcctcgggcgcgcaatcggcaatagacgggtgatccgattgaagtcgagctggaaggagccggcgatcatctgggcggcaatcatcggcaaaagcggcacgcataagacgccggcgctgcaagcggccatgcagtttcttcagcggaaggaatcggtgtcattcgccgcttacgctgaagccgcggagaagtacgagcaagaggtggcctgctatgatcgggacttgacagcgtggaagaaactacggaaccgcagcgagccgccgccatggaaaccggagctgccgccatgcaatcgtttcatgactagcgacacgaccatcgaagcgctagcgtcactattggcagcgcaattcgacggccttctcgtagagcgtgacgagttagccggctggcttggcgggatagcagagtacaagggcgggaaagggtccgatctagggcactggctcgcggcctggagtggggcgccgcttaccgtagaccgcaagacgggggccgtgaagatgctgcacgtcccccgcgccgcggtctccctggttggtggaatccagccgggggtcttgcggtccgctgtcgggcgggagcacatgcaagacggcttgtgcgcacggctactgctggcgatgcccgaaccgcggccagtccgctggaccgacgctgtcatcgaccccgtcgtcgagtcggagatgagcgtagtgttcgacaggctgctcgaaatggagccagccgacgacgacaacggggaccctgtgccgcttgcgatcgatctgactccggaagcgaaggagttgtgggtcggctacgtcaatcggcacgggatggaaatggctggcctcgacgacgacctggcagccgcctggagcaagttgaaggcttacgcggcgcggtttgctctcatctttcaactcgcgtcatgggcggctggagaggcgagcgatgacgccatcgacgaagcttcgatgcaagccgggatcgagctatcggactggttcggcggcgaagctcggcgggtgtacggactcttcgtggaagacgatggagaccgcaagcagcgggaactggtcgaacttatccggcggaagggtggcacgattacttcctgcgaactgatgcacacaagccggaagtatcgaccgaccgaagttgctgacgccgctctcggttcgctggccgaggcgatgttaggagagtggcatgtcgagaccgctacgggcggtcggccccggcgggaatttcgattgtcgccactgtcaccgtttccaaaagttaacgaaacgggggatttatcgactttcggttacggtgacggtggcaatgaggcagaggagtccgccgacaggcgatgatccgttcgccggtgagtcggcatggctcgacgattccttctaacaacgcagttcaatcaattgcgatcttgcgcgctacgttgcgacgtgagacaatgaacaacagtccggttgcgctttcgctcgcagccggtaacataagggcaactaaaatggcttccgtctctcgtgataagaagggcaattggactatccagtttgtgggcggcgatcgtaagcggcgatcgattcggctcggcgggatgaaacttaccgctaaggcagccgagacaattaaatcaaaggtcgaagcactcaatgctgccgcggtggcagggcacagctgggaccgggaaacggccgactgggtagccggacgggattctgcactctacgaaaaattatccggcgtcgggctcgtgccaaagcgtcctaatgcgcaacagcaccggctagcggcgttcttggacgactatatcgcccgccgaacagacgttacagcgggaacggctactgtctttggtcacactcgtcgctgtctcgtaaggtattttggcggcaccaagtcgctgggcgatatcaccccggccgataccgacgactggagacgctggctctctttggaacagaagctggcagaaaacaccgttcgccgccggtgcggcattgcccgccaatttttccgcgacgcggttcgccggcgccttattccggataacccattcgccgaaatgaaggacgtggccgttaagtcgaatcgctcgcgcgattattttgtgagccgcgaagaagcgacgaaggtacttgaagcctgccctggtgctgagtggcggctcattttcgccctgagtcgctacggcggcctgagatgcccgtcagagcacctacagctgagactcagcgacatcgactgggaacgcggcagaatccgcgtgcggtccccaaaaacggcgcatcatgacggaagggaatcaagagtcgtccccatattccccgaacttcgaccccacctggaagcagtttgggaagccgccgagcctggaacagagtttgtgatcaaccgctacaggaactctgccgttaacctcaggactcggatgctagacattatctgggccgcgggcctgaaggagtggccgaaactgttccaaaaccttcgggcgacgcgagagacggaactagccgagatctttccgctgcacgtcgtgtgtgaatggattggccacagccaggcagttgccgcaaagcattaccttcagacgaccgacgaacactttgctgcggcatgcaaaccagcggcaggcgcgctgcaaaatccggtgcagccaggagcggaaagaacacgcaaggactcgtccgcggatcgcgagcccctcgcaattgccgctgattgcgaggggccgcatcactgtacgcaagtacagatgagcctgtcgggactcgaacccgagacctacggattaaaagtccgttgctctaccgactgagctacaggctcgaccggagcgatggaacgtgccgcgaacgctgcgaaagagttctccttcgaccgcttgcgacattccggctccaatatcgagtagggacgacaggaatcgaacctgcacgggttgccccactggaacctaaatccagcgcgtctgccaattccgccacgtccccgcagatggccgcgccggctgggccgggcggcacggctcaagtatagtcgtcgctagcggtggagggctaggcgttaactatccgccccccctgccgccgcgtttcgcccgacacgctgccaacttgcagccccgccgtcctcctagtttcgccccattgccgatgccagtttcaccaacaccgcgagatttaaacgccctccgcgacgagcggatgttgcgggtggcgtgggccgaccgggaggaccggctcgcgttccgcttcctccgcggcgaatgtcaatgcgcccagtgcgtgaatgaatggaccggcgcccggatcctggacccggcaaccgtctccgaacaaatctcgattgagcggatggagctcgtgggggcgtacgcagtgcggattcattggtcggaaggccatcagtcgggactgtacacatgggaacggctgcgaacgcttggcgaaggtccgccaagtcatgaatgaacctagccgtcgcgcgcgcgacgcggcacaacgccgatggacgtcacagcgacggatcatcgcgatcggcgcccggcaagcggaggtcgacctccacggggcgcagccgtccagcggtttcaacctcgaacgtgatcgtctcggcgccgctatcgattaactcgcgcaccccttccagcagcgcctcctgatccgcaaatggttcgccctcgatgccgtagatgcggtcgtggacgccgatcttcgcgcgggccgcgggcgaataaggaatgacgcgtgtcacgaacaccgcgcccggcgcagcggaatcggggcgccaggagaatccgatcgaacttggctccccgtcgagcgccacgtcgaccgtcctcacaggttcgtcgccgcgcgcgacgtcgagtcgaatcgaatctttcgctgccagcacggctgcgggcagataagcttcgactgcgagggggcgaccatcggcggcgacaattacgtcgccgatcttgagccctgccttgtcggccgcggaacccggcgttacctctgtgacgcgcatttggccgactgcggctccctgagcgacctcgtcggcgcgtgcggcgtcggctgtcttcgcaggaatccacaaccagcgtagcccaagtcgcggcggcaacggcgacagtggcgcttcgcgctgcgcccgcatggacgccgtttccgatctcgaagcgggtcgaaattccggtagggcgtcaacgtcggccgcccggccaatcacttcgagtagataggccgctgcctgacgaatgccggcaacgttcagcttctcgatatcgtcgctggggcgatggtagtcggagtgaagccccgtatggatgagcagcgatggaatatcatcgacgtaaaagggccagtgatcgctgttctccttgtactcccaagtgaagtcgaggcgcatctcctccggaaggcgcggcgagctgaacagttgtcgcaacccatccgcggtgcgcgtgccggcgacttccagccgcccattcgtcagtcgaccgaccatgtcggcgttgatggccagcttcacgccctcgcgcgggactgtcggctgacgaacccaatgcctcgacccaagcagattgatttcttcgccgtcccagaaggcgaaaacgattgaccgccgcggctgccagcccgcccggtgcaacgcatcgatgatttccagcagcgcggcaacgccgctcgcattatcatcggcgccattatggatgtagccgatcggaccattgctgttggactggttgccgtagccgacatggtcgaaatgggcgccaacgacgatgtactggtcgcgcagctgcggatcggttccgcgaatcatgcctatgacgttttgatagccgggcgtaaaccgttggatgtaagaaccgcggtcgccggccggttcaaggcccgcctctttcagtttcttctcgatgtatttcgccgcagcgatgccgccgcgcgacccagccgcgcgcccctcaagcgtgtcgtcggcgagcaggcccgcgtgttcgcgcacttcgccttcggtaatggtggcgatggcggcctcgatggcagcgtcttggtcgccagcacgggcgacgtcgaggcacaatccgagatgcagtgaggcaacgacggcgagcaagagagcgggatggcggcagcgccagtgcacgagggccatacgactgttcgtaacgagcgacatcagggcaacgaccagtgcggtttgcgatgttcgatcttcggcaactttgggcacgcctgctcagcgcagcgatcacagagaggattatgccgcgcgccggcgacaacccgcaatcactttccaatgcagaattggccgaagacgcggtcgagcacgtcgtcggcgcagatcgcgccgacaatttcgcc

SEQ ID NO: 323 - DNA, 23264 bp, synthetic construct
  source 1..23264: mol_type = other DNA
  misc_feature 1..23264: note = Synthetic
gcggattgacaaggggtcattccagttctgtggtgaattcggccaggagatcctgggtaggctcgaagatggcttgggagcgggttcccacgatgtccccaactttcacgagttgggggaggagttggtagtagaagaaaaagtcgtcgatgtggagtttccaaatcgggcgaggatggttgttgtggtgtaacgctttggcctcgtcgtggcgggtaagaattgctgcaacgatgcgtccccagagcgtatctccctcgatgcctgcttcaccctgggaaaagtgatcgaaggcagcattgagttcgtagatactctggatgagcttgttcttgatggcgggctggatgggtttcatcgttctctccttgggtaaaaaagttttcaagagacgacaaacttttacccaaggagggtggaaccgggcctgacgaagagaacaagctgcgttgcaggggaggggggaaggatggtcactgcttggggtgagacgctcgtagcgagcctcccggatactttggaaaagaggccaatggcgtgcaaaataggacctcatagaaaaactattctcaggaagccctcgtctcgcaagaaactcagtctctcaggaaactaaggcggggcgaatttcgacctcgtagcaactcggacaaacgccgatatgggtaaaccagtcttgctggctgatatccttcggagagagatcggctgcctgcatagcatcgcgatactcttcgatctcatccacagaaaaccaatctgtgggcaatgcctcgacatgatcgtaatcgtcgcggtcacaaaacatacaaactaagcgtattttttccatcggaaactcccttcgtaaaaaggccgctaacccataacgggagggcacagaaaaaaaccttgtggaatgcacgccaccggctcgcactgtggcccagagggcgacactacgagcagatggtttccatgaagggaagtcccagccaacggtatcaggaaaacaaggactaagctagttttggcaaacagtatttgattttcgcgtgcggggcatgctatacgaaacgttagaggagcccaaggattggctcttcgactgtttgttggtcgtaaaacgctttgaagcagtgttccgtctgggaaacacacccggtaaactggtcaccaaccagctcagggaataatggggttaaccttccatttttgtgtttcgccggtagcgctgagtacgccgagaggtgttcgctcagttcgaaggaggcttcgtgaagtaatctcaaaaccgctcgctccctttgtaggggagagaagacgcttgaagtaatctcacgattctatccgatagtgattttcttgcccccggtgcggggcgatacagaaaaacttgtagtggtgttctgctacaagccgtcagttttcaaattggtgtgacgactgtttcatcaaatccatacgcggggtgcgcaggcctagtgcggcgtacaacgttgtccagtgtcgggagccacaagcctggtgacaggctgtgccggaacgtgacggtttcgggtaccggggtaagtcctcggacgtgaatagctcaacgattcaaaaggcccgcgagggcctactggtaagtgtttggagagtcgattgccaaagatgttccaaggctgccatagcagacttggaatggggacaagcggatgattcatcggtaaggggagcctctagttccgtaccctgaaagctcatagcccattgccatcatgctggagcagtctcgtggagcactcatttacgcacttatgttccgcgagaacgtgctgctctatccgatcaaccccaagcaattggctagctatcgagaaagctatcccgggggtggcaagagcaatcccacggacgccatgtatctggcgcggatgctatgtgagcgaatcacaacgttgaaagcctggaggcctgacgacgaagatacgcggctgatcgccaacttgtcccagcagcgacgaaagatcgtggacggtcaaacgaaactacgacagcagctaatggccgtcttaaaatcctatttcccggtcgttttggagctttttggcaagcagcaccagctgcccttgttgctcagtgtgctgtcccgctggcccgatcctcgcgagctccgtcgcgccgatcggcgactcattcgccgcgtcctttgtgatcatggcgtacgcaacgaacaacagcagaaggaaatcatcgaacgtattcgtgctgcccacttactgacccgagatcatgcattgatcactccctcggcgatggcggccaagctcttggccagccagattaaagaagcaaagaaggcgatcgaggagttcgacgccgcgattgacaaagcgatgaaccaacatcccgacgcgcacttgttcacaaatctgcgtggtgctggttacgtcctagcgccacgcctgctctgcgcgtttggctctcagcgcgaccgctgggaggatgccgaccaactggcgtcgttcagcgggatcgcacctgtgacgaagcagagcggcaagcagcgacacgtccaccggcgattcgcttgtcccaagtacctacggcagaccttccacgagtttgccgagtgtgcgcgtcggtattgcccgtggagcaaggcgcgatacgacatgcttcgcgaccgcggcatgaagtgatcttcgagggctacccaccaatcgatccgaaagcgaagtacccgatttgcctggaaggcgagcgtgcctgcccgcctgaggatgtcggcggtccctgggcctatgctgagtacctgatggtaatctctgatcggaaacacgaactccacgaagattacatggagtggcgaggccctttcgatgccgaagccttcgatgccaagaaggccacgcggcagatgcgaaagcgataaaattgtccgacggagaactgaggctgaccagagcattggcaaaatgatgacgcaggcgggcttgagtcaatgtcgccgaagtcagtgcaagcgaatgagtgcttcattacgtcgaagcgggccgggggtccaaggaggatcatatccggccaggacggtctcgccgtccccgactaagcctttctctttcatccaattccgcagtttgtcttcagccgcggcaatcgttttgctatccattcgtccggcgaaccggatgaccgcaaattttcctcctgcccgttttcggatctccactttgtcgtccgatggatcgggaatggtttgctccgcgacttgcttcggcagcacaaaccccatctggccctcggtgtctgccgtatcctgttccatgaacacgggcgttgtcatcgcgactttctgcttcagctcgttttctccgctgatgtagtcaaataatcgcatgaaactgccgtcgttgccttgagatccctgcttgatgtcagtcgtcgccatcatcagatctggatactcacgtatctcaaaggaatcatccgattcgagcaccgtgtattcggcactttcgtaggcgcttcgtgaagtcagcttccagccgaaatagacaaccacgacaacgacagcggcaatggtcagatgaatcattttcttgacggacattttttgctcataaagggggagaatgctgacggtagtgttattcttaccgttggcaacattttggccagattcttacgctaagctccacctcccccgccgaaccgcagtcagtgggaatcacctcgctcagatcaggctccaccgaactcgcagaggctggaccaacttcggcagattcggtccgcctagactcgcagagttgtctcctaggcgaaagcacttcagtggcttggcagaatccctcccagatgtcgaagatgccaactcagcgcgtttggttgcagaggactccgatcatccatacaggcagagcgcagcaacctgcaggtcagtaagcgcagcgtggatagggaatgacttgcaccaggcaagagcgaccgtagaatagcaaacacggaaattaggttacctagactaagcagtggaattcggttgcaatccaagccttagtgtgcctgcggacgcgagatcgcaaataggaactcttagggtgaaatcacgaaagcaacttctgacggtatgggtattgatttgtggtgcacacgccagctttgcccaggacgctgccgatctcaaagcaacctatcatacgaaggctgatattccctatcgcactggtgaagacctttccaattacagcagagaacgttgcctgctggacgtatactatccggacaaagcgggcttctcgacgatcgtttggtttcacggtggtggactaacgggcggcgaacgttttgtgcctccggagctaaaatcgcagggtgttgccgtcgtagcagtgaactatcgattgcatcctaaggtgaagtcacccgcgtacgtcgaagacgccgcagcaagcgtggcatgggtctttgagaatattgaggagtttggcggagatccaaccaagattttcgtgagcgggcattcggctggaggctatctgaccagcatgatcggtttagataaaagctggctggcgaaacacaacatcgatgcgaataagatttctgggctgattccctatagcggtcatacgattacgcatctcacagtccgagcggagcgagggatcgacgaaaagcaacctgttgttgaccagatggcgccgctgttccacgtgcggagcgacgcgccgccgattctgttcttgacgggggaccgcgatttggaaatgcttgggcgttacgaagaaaacgcctacatgtggcggatgatgaaagtggtcgggcatcccgatgtcgagcttcacgaactgcagggctacgaccacggggaaatggccttgccagcgcatccgttgttgttgagattcgtgcggaaacactctaattgaggtgggactggcaatcgagattcaaggtgcatcgtgggatagtttgcagaaccagttcgccccacttttgtaggatcgcgttttcatttgggcgcagcgggtggaccacctggtcgatccagggccctaaagattcatcagcgcggtggggttggtcctatttgctggcgatgtcggtttccaagcagcccacctcactacttgatgccgcttgcttttccggctggctcgctcggcctccgaccacgtgccgcatggccggatctacgcacaaccacccggcgtcgttgacatcttcgtagcccgccagccggctggagatcgactgacgcaacaggggcacaagcaagagctgcttgttgctacccagacgcgaatcggtcaggacatctgcccccatttcggtgatcttttgggcctcgtccaattcgcggtgagccaacagaccagcgtcgctggtgaccttgctgccatagaatcacagcctcacccgactgtcaaaacctacccgcaattcgtccttttcggcgtcacccagtgggtgtcaccttggcaagttgatcgtccggagccctgtttttccagcgttggtacaaatcgcgtgccaaagtgtgggaactcaaatgagaaatgcgggctgaaaagcgactcgacgggaaccgattcgcagttcccagcatcggataggcaaaaaattggagaaaattcaccgtgtgcgagacacggggggaagcgcgatgttaagctagcaaacatttgagggtcaacccatatgggtaatcccggtcaagtatgtagaccaagagattgtcttcggctctgcttatcttatttggtgattgtttttggcaagattttgctcggttggacttcacgagaaaggactcaacttgagcatgatagttcctactcgtaggaagtccgcagcttaccgaaaccaagtcagtgagagcgctatgacctgcgtttattatgtttctgacatttctcttgctaattggtaaaactttgcgatgagatgtttgttgtttctctgagttagccttatttgagggagagggtgttcctaatgaaactaatcttagtcagaggttcttcttttttggccatcgctgtgatggcaacgctcacgcacgcagcccatctctgtgggcaacttggccaggagtgtcttgtcgatggcagcttcactacggcaactgcaggaggccagaccagcaatagcccttgggtgcttaccatcaacaagcctgacggagttggaacttccgctcaatttcagggtgggtttgccaatgctgaaaatggttctggaggtgctggagatggtggcaacggagtttggtttaagtcttttgaaggtcagcagagtggaaatactgctgagccgaaagcctttgccattgtcgtacaaacagcggttgtaccaaccgcaggcgattacgtacttcgctttgtagccgggcgcgagggcaattttatggcaagcaattttttcacgtccctgggctccagtggaaccggcggttcgacctccgttgatttgttgactgccccgatgttattgggaaacattggaggtgcagcttctccggcgctgggagggaatcccttctccctcaagctgacaggcgtttctgcaggcgacactatctccgttgtaggcggaatggtcaacggcatggactcaaccattcccggtggacaatccgctttcctggacaagttcagcctgacacgcgttcccgaacccaccagcctggcactcgtcggcatgagtctcgttggtctcttgaacatgcgtcgtcgctactaattggtgtcccgtcagtaatcctagtttaacctcacccgcctgattgctccctgcagtcaggcgggtgttttcttgatcgaaggccggaacgaggaacacgaacgaaagagaaggacagtcgtttcttgctggcaactcacttgacgattagcgattgtgccgcggaggtggtacgtgctttgaaagggctcttgaagaggccgaaccaattcacgggccttcgtcaccacctgaccctgtggcgaaatctcctgaacatcgcgaaagaaaaaggcccgttgcaggtttccaagtacacgcctcctatggcagcctactggacttctgaaaagattccccacaatcgtgctctgctcacccacggcaccaaaacgatgtttggctttgacgaactcgccacgtcggtcgatgaagaggcgtaagagtaggcggcctacgaaagctgcgctacatgatgtgaccgccaatgcgattcactgtccgctccgctcccctggagtcgaaggagcgattgcgttaatgatgctgcgagttggcaggatgccttccagatcacccggcacacattgaaggattgttgagtgcatgcgattcgccgcagctgactatctttactctttcttcgcggccacacgactgcggcagtagtatgtggcctgagtcacgaagcacggaggattatacgctgaggtcgctccacgaatggcactgccgacagcttggtcagtggcaagctgatcccacccaggatgggaatcagatcgttcattcctaatctcgccgtgggtcttgccttttttcttctgtgagtgcatccacttgtcgcgttcctcgtcaatggatgtggtgaaggctgcttggtgcaggagacgggtgcgatagagacccgcagcagtaaaccctcgagagcctttacgtcgccacccttgtcctgtcatgtccgttgtaggaacttgtctatgggcgagctttccttgcacgtacgcgcacctagtcgagggcagccttaaaccattgtcgctggatttcgactttaacgtagctcgaacagttttccctctttcctgagccaactagcttcacctgcggcccggtcaatctgggcctccagcatctctagggtgtaacttaagtctgcatcattgggtcagaatgcttcctggatatcccggtcctctagtagcagaaattcctttgcatcctccctttgggcgagccgactggtcaacaaccgggggagatgaagtttccccaggtgctagccagtcacgccggaggctaccccattgactcagtgtcttgagtctaccgttgcttgaccatggcgagaatcgccgccttctcatttttcagagcggtcagcagcgaagaggattttccgaaacagttattggagaatagtttttgtaggtccgcttcgacccgctcccatcgctccaaaataagtgaaggttccagtcccgtgccatagatcaacttgcggtgtaactcgtcccccaaatctgatattggttttaaggcaagctcatcgaaactttcaagatctaccagaatccacagctgatgaaggaacttgccagcctccccgaatacggcatggtgagccgatgagtacatggagccattgcacaaaaccgctttgctcttgacggcctcaaatgcttgcccatgctcctgtaagtgcgggcctgccgtttcaacaaattgattcagacgtctgattgcctgctcggcagatacggctttcagtgtcccctttctcaccgagctagcgagttgagtcagctctcggtcaattttttggatggcttcgaaaagtgaatcgtaccgtttcatctcttcattctttcaaaacctgaaccgaccgaccagaagcaaatcctgctcgaccatcaccattggttcccaaaaaagtgatttgtcgaaccaacttgcttcaccacccacatcgacaacacgtagtccttctcagcgcggatctaagtgacatgggccgcggagtgagctagcaccacttgggcagcttcccagccaaaccgcctacggatctcagtcgcagccgaatgccgaagttggtttgttgcccagcgacgttccgaacaccaccgttacaactcttggcattcttgagcagtccattctaccaagcctttcttggggagtgtaggatgcaggaatacttgatcgcacgctcgctggatggcccgtcggtagcttgaagttttgtcgtgtgcgcctgcgaaccgcttgctctgagttgcaacagaacttccagggcgattgtcgtattcaatcggtgtctggcggttagcgtgtctcttggcccgccaatttcgctcggagtcgcagggacccaagcaatagttttccttgtcgcaagctagagagcggagcaagatttcttggcacttaggacctaggggaatcagtcactgcatgtcaacgtgctcggtcttgtgccattgagattgttaggtccagattgcatccgtgcggtcaatatcgcaagggcggagcatacagacttctgcgggccgcataccggcgagtcgctggagtcacaccatctccgcatcgatttctgagaaaaagggcagggtggtgcccaccacgtcctcggagaggggtaagatcttctttgtctctttggctccactccgtccctggcggagaccggagacggcctctaatgcctgtaatactgctggcgggatagtttcctctgccactgctcatttgaacatcctccggatgcgtcccacggagtccttgatagacttccgcgatggtcctgcctggaacatggtttcacgagaagccttgaacgccttggggccgaacttggttctcaccgtcgccgctggtaacggctgtcgagttctccccaaggtcttggcgaagaagaatcacgtatcacggattcgccaggagcgagtggtaggaagcacgtacgagtttgctccttgcgggtggtagggatctatgcgatggctgattaccggagcccgcttgcgatggcacatggcttggcgggtgcctaggtaggttctatttcttgagcggaccggcataccccacgtattactctccccttggctcgcgcattaaaaaagctcgccctgcctaagcattgcgagcggtcgctccgtagagcgttgcctgcgaatttttcttcttgttacgaaaagaaccgcagactgagattggttacacttctggccattattgctattatgagctgattgtcaaacatttttttagcgacttatctgttcgaggatgccacagcatgagtaaggtcgttcttggcctggatgtaggccctcgttctattggctgggccttgatcaacgacgatcctaaaacccccaacgattcgaagattatcgatctaggcgtgcgagtatttcccgaaggggttgatgccttcgatactttcaaggaggtttcccgtagcgagcaacgcagaatcgcccgcaggaggcggcggcaacaacggcgtcgcgcaaatcggaggcgaatgctcaagggaacacttctagaattagactgttggccaacggacgagtcagaacaagaatcactctaccaactggatccctatgtgctccgctccaaagcattggacgaacaattgactttgcatgaaatcggccgcgtactgctgcatcttaatcagcgacgtgggtttaagtcgaacaagaaagagcaagcgaaagcggaagccaaggcaaagcgaaaacagcctgagaatacaaatgttcccgacgccgacaagaagccggaggacctgctgctggaaatgcaagaattggagcaggcgatcaaagactccacggcacgcactcttggcgagtacttgtgtaagaaacaacttgcattcgatcatgccgttcgcattgaggacgaccatatccgaggacgtcatacgcttcgtaaaatgctcatggatgagtttgatcagatttggaacaaacaagctcagtactatccactgtttacagaacaattgcgcgacgggaaggttggcagacaaagggatattcacaaaccacttcctaaagatagagtttttctcgacaagcaagggacggtcaagaatccgcgttttgagatgtccgatttagaagcctttgggttgttcggcctcatcttttttcaccgcaccctcaaaccagtgcccaaagaaatcgtaggactctgcgaattggagccgaaacagaggcgatgcgctcgtgcggatcgacgtgcgcaatattttcgccttctgcaagaagtcaataaccttcgctatatcgacccagacctcaatcaggaaggcaaactcagcgatagccaacgcaagctcttgctcaagtatctcgaaacacgagaaaaggcgacctttgacgagatccgcaagacacttggattgatggaatcaattacattcaacttagagcgtggcaacaaatctcatctcaaggggatgactaccgactggctaatcgccaaatcatacgggaaagattggcatgaactaccaggcgaaatcaagagtggagttgtggagattctgatcaacagcgttgatgaagaagcaacccaccaaatactcaccaatcgattcagcttcactgcccatcaggcggatgctattcaagcagttgatctcccggaaggctatagcaagctctcggtgatggcaattgaaaagctccggccctttctcgagcaagggatggtttacatggcggaggacgtaaagaattctgctctacaggctgcaggatatttccgacgggatcagttgcagcgacgattgtttgacaaacttcctgatcctcgtcgcactgccagcagccctattggcgatattccgaatcccgtcgtgaagcggacgctcactgaaatacgcaaggttgtcaatgcgattattcgggtatatggcaagccagatgtggttcacttggaaatggctcgctcgctcaaaatgagcgcagaaaagcgcaaggagtacaacaagcgaattcgagatcgtgagaacgcacgcaacaccgttgccgaaacactcagggagaatggtgcgcgaccttcgcacgagagtattctgcgctatctcttgtgggaagctcaaaatcaagaatgtgtctattctgggaagcctatatcgctgaatcaattacttggcgacggaggaggtgtagagatcgaccatctcttgccttatcaacgtactctcgacgattctcaggctaacaaagttgtatgtttccgcacgtcccatgccgacaagggaaaccggtccccgtatgaatggctcgcggggagcgacaaggacaaatacagagcgatttgccagcgagcaaagcagcttgtctatccgaaatatcggcgctttcttcaaaaggaattacaactcgaccatttcattgctcgccagcttaccgacacgtcctacataaccaaggcgacggcggaatatctccagtgtttgtttgagaaagaacatgccgttttaggtctgaaggggcaactcaccagcgaattgcgatggcagtggggacttgaaacagtaatcgaagagctacctgatagtcctgcctggcatgagtcggccaatctgcgacctggcgagaagaatcgtgctgatcatcggcatcacgccattgatgctgttgttctcgcactgaccactcgttctcgtcttcaaaagctctcacagcttgtgaagtccggtggtgccaagaaacatggggaaaccttggccgatccctgggagaattttcgcgacgatgttttacagcacatcaaacaagtaaacgtctctcatcgggtagatcgcaaagttcgaggagccctccacgaagaaactctctatggtcgtacccaaaccaggggtgaatgggttgtccgcaagccattggagaacttgagcgcaaacgagatcgagaaaattcgggacgagaccattcgcaatctcgttatggtgcaactcaaagagcatggcgtggaatttggtcgcggtaagaagcctgatagaaagaaactaaaagctgctctggcaaacatgacgatgccttcgggagtacctattaagaaagtgcgaattcttaggagtgagcaaacgattcgtcccctacgaggcggtgagtcagttgcctacgtcaaaccgggctccatgcaccacctctgcctctttgaatgggaggaaaaagggaagaagaaacgagaagcggtgttcgtttcaatgttggaagcgattgaccggctgaagagcaagcagcaaattatccagcgtactccctcggtaaatcacgaaactataccggcagaggcaaggtttattatgtcccttgctagtcgggaaatggtagtcgtgaacgaaaacgatgagcaacgattgctgacgttccagactgccgcatcaactattggccagatgcgatttatcgcacataacgatgcacgcaaatcaaagaatctgtctcttattaatttttctgcatcgactctttccggccgtaaggtcaccgttgatcctcttggccgcatccgctgggccaatgactgaaaaatcattactcagggaatgggggattttcttggcaattccattctgtgcctgttggaatagaagcaccgcttccaatttgcggctcatgccacggagggtcctgggtcctcgatccgtggtcagggccttgtcgtgatcaaacgacctctcgaaatctcacgcgaaccggcagatctcgccgttcacatccagcagctactgctcaaacgcgcaggtcagatcgtcggcagcatcccctgcgaagagatcggtctggtggtggtcgatcatcctcagaccacctacacccacgccgctctttgagagttagctcagagcaaagcggctgtcgtcctctgcggttccaatcatttgcccgtcgcgatggtctggccgctggccgatcattcccaagtagtccggcgtttacgggaccaactccatgtttcccagcccctgcagaaacaactttggagccagttggtcgtcgctcaggtcaatgcccaagcaagtactctggctgccgactccagccctgacaagaaactcttagcacatgccaaagaaattcgctccggcgatcccaccaatatcgaagcccgggccccccaaatctcctgagcccatcggctcggtagagccacgcctaccggactcgataccgagtcctttcgccgtgatcccaatccgacgggtttcaacgggttgctgaactacggctacgccgtcatccgtgccagcttagcccacgcaaatgtcgccacagctttgctccctagtctcggcatccaccatcgcagtcggtcaaactcgttctgcctggccgacgatcatcttgagccattgagacccttggtcgacgacaaggtccgcgatattcatcgtcaagtctctgtagaactcgatcaactagccaaagccgaactgctagagatactctctcaagccatgcagttaggcgaccagaatgggccctggatgttaatgctcgcccgctgcatggcatcgctcgtccgttgctacgccggcgattccaagaaactagaaatcccaacccctgcccggccctaagaaagctttcctcgggaggattggcctcttaggatcgggtaggggtgataacactaaccaacagccaccacatacttcttcggccgtgttcatcaacgggtatcgctgtgtgtaggtcttgacgatgttcgatctgccgaccgacacgaagaatccacgaaacagcgaaaacccagtttcgcaagtcgctattgaccgacggctttatgcagatggagtattcaggatatacgcagcattgtccgagcaaagaaaatgacgaggttcagatgatgcgaatcgagcaccacctaccttgagagggcgaggtgggggtcattccaatcacagacaaacagttccagcggatgcaaatcttttgggagaaaaatgcgcaaacctccagaaccggccctatggcaattagcacttttctagtcttgttttctcgtcaagcgaatcagcggcaaggaactagcagggaaagaagtgtaaccaatcccagtctgcgaccaattcgcaaccccagcctcagaagcgtcgtagccgtagaagtgtaaccaatcccaatctgcgaccaattcgcaacattacgtccttgtggcgaccagaatagtgaagtgtaaccaatccgagtctgcgagtcatcccctcttagctgtcaccatgacatccgccagtggactggtcccaatgagttttagcagtccatagcccacgacacaatgcatacgggagttgtttgcagaagaggcagaatcccatttcccaagcgcccttgctaggaggaccaggagagtcgcgccgagataaaaccatagacggtcttgtgttcaggaactctggattttccgggatcgtataataggagtgcgattcgtgaaggaagtacgcaaggggtcatcccccaggctgggcctctgacttgtcactttccataagtttctgatggtccgccagccgtcgggccaacttggtccgatgctctgaaacattgtcattggtcaccaccgaacaaggcaaaaagacggatcccgctccagccagagggaccgaacgctcgttgctgttataaagagatgtcaagaggcgcacggtctcgtatccgtattcgtagttgccctgcaccacggtcgcatagatttctccgttctcaacaccctctagggtagcttcattatcgtcgaaggcaatgatcttcatgtcgctcactttgttcttttctttaagcacttcgaggcagactggtccgttgtagctgtagagcccaaccatgcaattgacgtcaggatgttcgtccagggctttcttgacgttctcagcagccttggctggatcgagaccgtcgacataagtttgcaatacggtccaagtctcgtcgctgtaaggtttttccagcgggtagtctgactcatccgatggtgagtcatcaccgacaatatgagcgtggaagccacgcagacgctcctgtgcattggcgcgatccgcagcaccgatgaagaccacgatttttccgccttcaggtagcgcctcatgcacaaccttggcgcacatcttgccggccataaagttgttcgtgccaacataacaatgccgcaacgatggaggggcatcgttgtcaaccgtgaccaagagcgttttggtcgccaatcgactcaacagcagcgactgttcgttcggagcgactgggctgattgctactccgttagagccctgtgattcgacctgcactaattggttagtttggtcacccggtttacccgaaggagtatgaaccacgagatcaacatcctattcatcggcagcggcgcgagccccagcgacaacagtatcccaaaaagggttagatgctgcggcaatcaaatcaaattgcggctttcccacggagtgatttccggccactatgcccgcctcccaagttctacctcctacaaaccccaagccgagacagacaaccgccaaaagtaatagccccaagatcttttgaccggacatcggaggaatactcctaatcagaataataacgggatcgacgatgattacgcctattattcggggaccaggatggcttccccctacattgccggcgcgagcgtcttgattcgcgaggccatggaattcgtcggttacacggaaatatcacaagacacgatctacacacacatgcgagacacggcgacggagtttctcgacgcggcgacgaatcttactttcaaacgcatcaacctcgaagcagccatcagtgccttgatgcccaccgatgactacggctccaccctggccactgcgttcaatctaggaaatctcacgagcaccgtaagccaaagcggtctcataggcacgctcaacgacgttgattacttcaaattcactgccagcagcgacgggacggttacttttgaagcgaacaacctgacccacgacttgggagctgattggtcggtgaccaacgccacaggaaccgtgagcggtagccaaggagagagcttttccttcgacgtgatcgccgggcaagcttacgccgtgggattctcctccagcggtggattgggctactacacactcgacgtgactcaccagagcagtttcacttacaccgactggggaaccgtttcttataatcagttgactggtctctcggtagatggtgagagttggtatcgcgtgcaggccagtcaggctggttacctcacggtcgaaggagcatttgatgcacaaggtggacaagtcaacctgatgctctacgacgcaaacatgcagatggtaacttctggcaatgccgccggcggcacctcgcgggtggatgtctatgcatctgcgggtgaggaattttatgtgtgcgtccagggcatgaacgacgacgtcgactaccgattgagcaacctggttgcggtcagcggcacgacggtagacgtcacgggaacggccggtgacgacacctttgccttcacggcaggagacaatcaccaagtaaccgtgaatggggtgacccatgagtttgcttcccttgcggtgacgaacatcaatttcgttggcggattgggaaatgacgccatcgagatgaccggaaccaatggcgatgagacggcggtgatgcgcatagggcagacaactctaacaggagtcggctactccgcgattgcaacaagtgttgagcaagtggtcgcgtacagtgggggaggcaatgaccacaccgttctgtacgacacagtagcagatgatgtgtacgtcctgcgggccgcctcggccacgatgtatggcgacgggtactaccatgaggcacggggtttcgtccgtagcgtcgcctatgccaacgcgggagggtacgatcgggctgtgttctacgacacggcgggagacgatgtgtatgtggcacggaccgacttggccacgatgaccggcaacggatactatgatgaagcacgtgggttcgaccgcagcgtcgcctatgccaccaaaggtggctatgacacggcaacgctttacgattcagcaggtgacgatgacgtattggccgcggattggggagcgagaatcactggcgctgcgttctggagcgaagcccgcggattcgacgcaatcgttgctcagctaaccactggcgataaccaggtcgatattggaaccattgactacatctttgaacttcttggacaagtcagctagtagcctcgacctgcgagaggtggcgtctctcaccaaggccgagcgaaacgcgctgacgctgcgatccaactcgctctgagtctgattggccccaccaggcaaccatagaccacggcggaagatagcttcggcgaccgttccgccatcggtacgccagacggcgtccaccggttgcaggggcagcggcttccccatagggcctcgatgttcaccaacgccagaccggcacacagttcgctgggggagatcctcgtcacttccggatcgaacagcgcacaagttaaccggagcgtggcacgaccgagtctccttgtaggactcgcctgggaaagacgtgttcacagcgaagctcacttgtgcctggtttacaagtgcaggccaggtaagttgtgcctctcatttaaagcgaatctgtgccattgccgatgcgcgaggatcgaatcgcacatttttgtgtgactcgcttggcgaggaggtcatctgagctggcacaaatcgtgtcgtcttgcgaggcaatggctatgatgaagccgctgagcaatctgtcacacaactggtaatggcttttgccagaatggcagaaatacaaaaagaaaaaccgcgcggcaatttctaccgcgtggttaagcgtgatttgctgtccagcgaaccgattcgatcaaggagtcgcaggtggatcatcgtcgtcattcaaagccagcgggatggcaatcgccgccgcaactccagctatggtgatgaccggatgttcggcaatccactgccccatggagcacataggacttgagttggattgacctcgaacaacttgattgccagagacaagattcaatccgggctgcgcgctaggaggtgccgtttggggagaccagaatcggtaaacgccatcactgccagtcgtaccgacccgatacacgccaccttctaggcgcgcgactcggaagttgccttgctcgtccgtctgtacacgagctatttccctatggttggtatggagggagaccggcatgttggcctgtggttgacctgcagtatcgacgacctgaccagtcacgatgccaccatcagccagggctacgtcatgggaaatcacaaccgatttatggctgttggcggctgccgactctgcagcaaggatcagttggggttgcgctaccagcatgataccggccgcccatgttacttttctctgaaaagattttatacctgaaggcagcatcatactgtttcctttctagtgttttaattcttcttcgacaaattgaagggcctcctccaagcaaacttctcatttcttcgcagaatacaagagcgaggcgaatcgaagcgctttcggggaagtgcgagaaggtctaacgaacaagagttgcccacactttacgaagtcgctggagaatcgttgtcatgcagtgctagcggtatggcgatagccgacccgatagcccctgctgtcatcagtgggtagtcgagcgtggtccctaattcgtgatgtcgagtacctctctcttatcaccttcaggctgcctgaattcaggttcccctgaggaacttaggaaataaaccacggcacgtcttggttccgtaagctgaagtagcaccagcttgaacaatttcaaaacatccgatctctcctgggttgggcaggagtcacggtgctctcgatccaggcatatctccaatgccaccggttcgcgaactaggccgtcgcttgctgcgagatctccaactccattgcggctaaaagcagaacctgacggatcttctggctctcgggccaatcttgcccatcacggggcaggggggggatggggggccgttcaaggtaccagcaggtcagctaacgctgggccaaccccacggtcttggcagcaacccgccttgggttcccttgctccagaacccaataactccagcaaattccgctgaaactcctgtgaattgaggtttcttcccaaaaacctggaaaaatgcttgctttcctggagagttgaggatatcgtgactgctagcttggttgccttggggcaactgggagacctttttctcatgctcgttgaggagtgttctaatgattgagatctgtgccattttcgccatcgttcctgaaattgatcctgcctccgctagttctgcactcgcacttttaattggtaccacgctggtccttcgggatcgttacctctccagccacaaaagctgaagcagcgcagcagtcataagcgagttaagcaatcgttcccaaggaataattgccttgtgtactcgtcgaccgcagcaggtattcattgatgaccgataggcgcaagattgcctgctggttgttttttgctgcgctcattctcatcgttgagcttgtggggctcacgtttttctacgaggcgatgtcgctccagcatggtggctcgctggcggcgatcttactgagtcgctcagagcgtatcgtatccctcttcttgaccgctgcggccattctctgcgtggcgatgtttcctaagctccaggcagtggaagagtttgcgtttgagcatgttcgttcccctggcagtcggtggggctttctcgcgcttcatttcttactattcacgctgtttgtggcaaccagcaattccatctaccagagtggcacggatcctgatggggcgcggctccacatgggttcggcactctctttctttgggattggtttagcgacttacgtagcgctcgccttagctgccttgccatggtccgtctggcaaaagctttttcggcttgggcgcctggaaattatcctgtcgctgctggcgggagtggcttgcttgaaagttggcaaggtaacgatgtcggcttgggatcggctgtcggagtggacgttccatgtggtcgagtggctgttgttgctggtctatccagaggtggtctctgtccacgctgaaaagttgattggtacccccgccttctcggaggtgattgccccggaatgctcaggttatcagggcattgggatgatcctggttttcttcactttttttctgtggcattttcgttcgcgtctgcgatttcctgcggctttactgctgctgccaatgggctgcgtggctatctggctggccaactgtttgcggatagccctgttgattatcgtgggtgataaaatatctccggcggtggctgtggagggatttcactcccagaccggctggtttttcttttgtgtggtcgcccttggtttagcagtcctggccctgaactcgcggtggtgcgcgaaggcccaggagccgacgtcggacgatgaactacgcagtccgacactcctgtacctgctcccttttttggcactgatggcaggcatgatactcaccgggatggccagcacagattttgactggctctatccggtgcgcattgccgtggctggcgcagccctgctgttcttcttccaagagtaccgcaagttggattggtcctggtcctgggccgcacccctgacaggcgttgcggtttatatcatctggatcctcatggaacagagcgagctgagttcgggggcccatttgaagtctgaagtcgactcactcagttcgacctggaaaggggtgtggctcgtctctcgagtcatcgggtcggtgatcatcatcccggtcgccgaggagctcgcgtttcgagggtatcttttgaggaggttggtttcgcccgacttcgcgcacgtttcccgtaaacaaatgcactggcctgccttggccatctcgtcactcctgtttgggctgatgcaccagcgctggctggccggtaccgttgccggtgtgatctacggattgctctacaggcaccgcggcaatctcaccgaccccatcgtggcccactccgtaaccaacggactgatcgctgtccatgtcctgctgggcggatcttggtatctgtggacttaagcagtggcgccccattgcgaggttgccccagcgatcgtaagtcacggttccagctggaatctgagccgatttcttcagtcagggtgatacaacccgcataacctttaattccgccccccccactttggtgtttttctcctgaaattcgagggggcattgtatggaagatttatgtcggtcgatgatcaaagtatgcggaaaagatcagacacatctccctgttgtccccagtgcttcgaccgaaatatttaccgaagtaaacgatcggatcatgtgctttaccgtctgatactctgctctcgcgtgcgatgtcacacctgccaccatttattcctaattatgccattctggactgtacgtacgatggccagccgaccctcagcgaatcggcagaatgccctgaattgacctggagaaaacatcgaagtagcgaacagagacagggtgcagcggaagaagctcgcctcacgctggccgctagattttgactgaaaacatcgttcaaacggacgcagcgagtgtctgtcacccatgaagagccatcttggcacgtgacaaacagtcatcagggacagtctggtggataatcgatctatttatcctggtttaacctatttccggggagaacaacccgagattgggagacccacaccatctcgctggcttgaatcacttttctcaagggcaaaaaaaaagctataattaagattgagagcagagctaccgactccccaacacttcacactcggcaccccgatgaactggagctggtctcgcagttgctcaccaatgccaagggatctggcggcgaatccttgtccgatccgtagctcaggaatgctatgtcgctaaaacctagctatccgccacggctattctggaggaatagcctcggtggagcaggcgtaaatgtgatgatacgcccacgatttgtctggctaatcctgttcgtgtgctctggcgttgcgctctggcagctcaccacacccgagccaagcattccagccttggctgtggggctaggcctcttgctcgcggggggcattctcgggttgcgctggggatctgattcggcagatcaactaatcaaagaaatggcccagctcaacaagtacctcgccgaacagaatcaggaattggccgaactgaaccacatgcatgtcaagcggctgctggaggaggaagagagtcctcgggaaaaagccgagttcgacgcttagacttcactcaagctaggcgcctattcggcacagccgttgggctacggggcaggtttgcgaaacggcaccgatctccaggagcgttgacctctggctgagcgcaacccgcgtcaccccggtgacgtaacccagctaggcacatgagcatcgtgcccaacagcaaaccaagataat

SEQ ID NO: 324 - DNA, 23234 bp, synthetic construct
  misc_feature 1..23234: note = Synthetic
  source 1..23234: mol_type = other DNA
tcaatggcgggtaccagttcttccgccgcggttttctcgactacctcaacgaggacccggcttgcgtcctggagaagacgccgctggtccgtctggcggccgcgggcgagctctcgctctaccgccaccgcggcttctggcactgcatggacacgcagcgcgactacgacagcctgaacgccatgtggagtcgcggcgaagcgccctggaaagcgtgagcccgcctgctttccgaaggggctgcatcgacctccaaaggcgagcgtcagcctcacttcgttgccacgcgtccatcgtgcacgtggcgcgttgatgcggcttgaaatctctctgtgctggattgcagaagcggcaggggcgcgaggcggatcgacaggtgagttctggccgagtggctgccggaatgatcgggtcgtcggcaaaccgcggccgctgaaagtgctccctgcccgctcctggcaggcgggcaggcagaccgtaccgattcggaatattcggcgttccgcaatccacttccgagttcagaagggattttcgtttgcagattaatgatccagtgggtagaattggcctgaagcgacagattttgcaacctggaaccgtacccgtaacgcccgcctgttcggaccgtttggaacccacgggtttctgtctgcaccttgaaatgactgtccggatgaacctccccgccctgcgagtcgattgatgcgatctcaccgaagcctcacctgcctgatttgtgtagcggtcgttggagctagttcggcggccctcgcgtcgatctcgatatcctctgcgtccgtgggtggatcggcattgaccggtccaaacatccgctacgcgaacttcaacgacctcacggtcaactcgacggggggcctaacgtccaccgcgccagcgggctcgctgcaggtcaacctgacgcccggcgccaaggtcgtcaccggcaagcagtctggccagtacgctcctccggtgttgtccaacggaaacggttcgaacttcggcggccagttcatgggggcagacggcacgccctacatcacgacgggctccacgggagcaacccccaacgctgccgcagagcttgtcttcggctcggcgaccagctacttcggcctgctttggggctcggtagatagctacaacaagctcaccttccacctggtgggaggaggcatcgagaccgtgacggggacggatatcatcaacttctggaacgcggcgaatgccccttccttcccgtctggttcgcaagcgaccggcggcacgctctacgtcaatttcgactcgacgatcgggatcgaaaaagtcgtggcgacgagctcgagctatgcgttcgagtttgacaacgtcgcgtacgagtctccactgggacagatccaagccgtccctgaagctacgtccgtcgttgcgtgggcttcgatgctgatcgtcggggccgccttggtccgccgacgcgtgtgaccaggctgctccgggcgagaccgcgaatcacgcggggcgttcggacgagacaggccgggcgggccgataaggagtgatcctttctacccccgtttttcgacgttggtgtaggcgaacgctcgcgtctggacgatcagccacctgcaggccaataagtccaagcctgctccctcgagcacccatcgtcttacactcatcacgttgtgagtgaccgcgtgcaggcgggtttagcgattctgggtacttgtctctggtgagcggagggcggcgcccaagagccgcccggtcatgccgttttctgtctcaatccgccgccgctgtcggtgactcttcttgtcgacgcgggtcgccgtctatttgggccattgcgatgtaggctgcttgttggttggtcggacgttcccgcacaagctcacagattgtcttcatgccgtattcctgccgcgtgtgaacatgggatggcgccctgtcgggaccgtcgttggcgaagcgcgggtcgatcgttgttcgacccgaggctcgttggagcgcggggtttcagtgtgtcttgtcggggcggggttggcccgtcgcgcgacgccggcctcgcgtctgctgaggtcagccgtcccgaaacccactgcgacacccctcggaagaaagccgcgtactctgccgacggcttctcttgagctctgctcccttcgaccggcacaaaccaaccggcaggccgctgggtccctgcctccgggacgggatactaagctaggtttgccgtatgattaacgcaccggcgccgacggcgaccagcaccgcaaccgccttgccctgcgagacgatgtcgccccgcatcgagctttttgagatcgccatcgaccgcgttacgctcgacggggctgtcgcccggctggctgattggatcgacgcgccccgcggagtcggctgccgctacgtcgtcacccccaacctcgaccacgtcgttcagctccgccacaacttcgagctgcgggccgcctacgccgaggccggccttgtgctcgccgacggctggccgctggtcgccgcttcgcggatgttcggcaaacggctccccgagcgggtcgccggctcggaccttgtcccggcgttgctggacgccgccccccagcggggcgggctcaaggtgttcttgctcggcgggatgcccggggtgggcgagcgggccgcccaacgtatcgccaagcggtacccggcggtcgaggtctccgggatccattctcccccgtggggcttcgagcacgacccgtgcgagaccgaccggatcgtcgagctcgtcgccaaggccgagcccgacctgctagtcgtcggcctcggggcgcccaagcaagagctctggctccaccggcactatcggcggctgccggtcccggtcgccatcgccgcgggcgccacgatcgattttctggcgggcgtccagacccgcgcgccgcgctggatgcagcgcagccacctcgagtggctccaccgggcagccagcgacccccgccggctcacggcgcggtacgtccgcgatgggctcgcgctccccggcttgctgtggggggaatggcgccgaagctgagcggccgccgaggggtagcggttcgttgaggaccgcactgtcgggccgcaccgctgcccaccttgctcggcgggaaagccccgcggcggcgtccctccgcgggatacgcgctttctcttccaccgtccgcccagcggcgcaccgggccgtcccgcccgccagcggcttgcccacgcccccccgaggagctgcgctggccggtgacaagggcggtgtcgccgccgccccgcgccgcttggcgcgctcgccacgagccgcgttccgggcaggttttgggtcgggccggccgagcggcgccgagaccacacgccgtccgtcgcccatcagccggcccccgccacgaggatttccccgctgaattcggtttttttggttgaagtccggcagcgccggccttagactccaaagcagcggttcgggtttgggcgtgaacgcccagcccctgggaaccggctgcaaagccttgttgagacgctactgctgcacgaactcctcgtttggaacccggctaatgatctcttctcctgctgcgctctcgcgcgctgcccggcgcctgctcttctgtgcggtcgctttgggcacgattgctcccgcttcggccggtgtgattaccagcgtcaccatgttcggtcccaacgcgggcgtaggccccgggctcggcaccgtcgcggtcccggcgatcatcacgggcgcgccgaacaacgacaacgtcccgaccccgggcgtccccgacaacaacgtcgtcgtgccgatcaagcggtttgatgcgaacggcttcatcgacatcgagttcttcgtctcccccagcaacggggtcaccgagtacgccttcttcgagtcggccgacaacaacacgggcgtcgattggagcggctaccggatgatcctcgggtacggcgtaggccccgccttcgtcccctcgggccccggcgacgggctcgactttgacttccccgattacgacctccccccgacttcctcggccttccccgtggtcgtgacgcccaacgaagacacgctgctgttcagcggagggacccagtccgccggcgccgagagtttccagttccgcatcgacgtcccggacgtcccaacgtccccctacttcagccgcttcacgctgcgtcaggtcccgcggcccgcgcccgtgcccgagccggcgtcgctcctgctgctgggcgttggagcggccgggcttggcgtctggcgccagggggcgtcgcgcggctgagaaccggagtcgcagcgcaggttcggggccacgggcgggcatccggacgggcatccggacgggcgtcgttcggtcgtcgcgcggggaagacccgccgccgccggccggcgttgcggaacaaccgctcgcctctgcgccagtgacgccgcaacccggagcccgtgccaaggcgggtcctgcaacttcggggcttcaggacaacggcttcatccacggcggccagttctgggagtaagtggtagaagcggcaagcctgttccgccgacagcagcggcgcggcagggacgctctggcggggctcaggagatggctcgccgcgtcgcacaagcacgccaggttgtggcctgccttggggccgcggacaccccggcggtctgcttgccagggggcgccgcggacccagtcgggtcggttctcgatgccccggtggcgccgctgcgcctccggcggcttcgccgcgttgccccccccgacgacgtaagacgcgggtagtggcgtgcggcgcctgggtggtcttgccatcgcggcgggttgtcctcttcagacggacatcctgccgcagcccgggccaacgcgtcagcgagggacccgcaccagtgcgggtccgcagcgatcgcgtgacgccgcggccgtgttcgtagccgcgaagacgtgcggcggtccgggcccgccttggcagcgccgacgaggccgtgccggcccggcgggcgctaaacattcgccggtttcgcggcataagaacttgaggaagccttagccgccacgccccgccaggggccgtggcccctccctcccgccggacggctgcttccaagcgtcgcgccgacgcgcccgcgagccccgcgccaacccggcgcccgagcccgctcccctaggccgacgtccctgccggcgccccgtcgtccgctctgcgcgccccgcgcgagcggttgtgttttcccccacgaccgccctcggcgtgcgggggcggtcctttccccaaggacgccccccgagatgagcgtagctgcgactacttgtacgccggcatggcaggaagggtttctggcgctgctgccgtctatcgaacgccaggtccgcaggctgctgggcggcctgcggggcgaggccctcgaagacgcctgcagcgaggcggtcgcccaggccgccctcaactactaccgcctggcggagcagggacgcgcgtcggtcgccttcgccacgccgctggcccgctacgcggtccgggtcggccgggccggcaggcggctggggtcgagcccggccggccgcgacgcccttgggccgggccgccgcggagaagccgcgggctgggccgagctggtcgccgacccgcgcgccacgccggccgagatcgccgcggtccggatcgacttccgcgactggctcggccggctgcccgcagcgaagcgacgcctggccgtcgcgctcgccgagggagagtcgaccggcgacgccgcccggcggctaggcgtctcggcggggcgggtcagccaactgcggcgggacctggccgagagctggcgggccttctcggcgacgccggccgcggcctagtggcgttctgaggaggttggtggcttgggcaggcctgtccagacggcctccgccggcgcgcagcatccaccgtgtggtccggcccccggttcgtaacgcggccgcccaatcgccgccggctgctgcgggagcgatccgggcgtcgcccggatccctgcgggccgctgcggacgccgctgcgtccgggcggcccgcaggggagggaaggcgcgttcgcccgggggcgccttctcttagccatcaggggttcgtcggatggacggggggaagcatggctcggcggggcgcggggtccggtggcgcggctgcttacgccccacccgcggggcgcactccatcacgcggttacgcagggcgccgcgatgcatcgcgatcgtgagcggacggcggggtgcatcttgcccccgccggtaagccggaggagttcctttcccacaagttccagaggcctgtgatggccgggcggcgacggtcgggtaagaagcggtcgttttggcgatcgggtttgggggagatctaggcgagcgggctgtcgccgcgagtgatttgcgggggtgaggggagagcggccgcgtcgttcgatgcggggcgacgacccctcctgccgagcaggtgcgagcgggcgcggaaaggcgggtcgcagcgctttcgagagccgcgtgaaccgggctagagtcgacttttgagaccaaccggcggcatggggggggatgaatcggcgtttgctcctcgggtagcaatatgccacccttaaggcatgagccagcctgtcaagctatcggacgacctcgttctcgacgcccgcgtcatcggggaggtcgcccagcgctcgatcgccggtcaaatcgagttctgggcgaggctcggccgcgccgtcgagcccctgatgagcggcgccgccgcgctcgccctgcgtcgcagcggggacgcgcggccgctttcggcgctgatcgaatcggtccactgcgatgaaggccgccagcgcgtcacccactacctgtcgaagcagccgttcccgcactacgaagcggccgacaaacagcccggctgcgtggttcggatcgaggccggcggcagccgcacggttgggcgtttcgtgaaccgcgtgttcgtgccggtggaaaaaccccccgccagacgcaagtctggttcgaaggcccagaagtgacggtgctgccgtggctggacgaacgtccgctgctggtcgccatcgccggtcccgatggcgcggggaagacgaccttctaccacgcgcacgtcgccccagccggattgccgctggtcgacgccgaccggctcgccttggaactttcgttggatgcttaccaagcggcggaggcggccgcagaaatacgccgacagctcgtcggtgcgaacgagagctgcgcgttcgagaccgtcttttccgaccccgtcgccgcggaggtgcggttctgggaagaagcgtcggctggcggctacacggtagccttgctgttcgtcggcctggcctcggcaaaacagtcgatcgagcgggtggcgatgcgtgtcacccaaggcggccacgacgtgcctgacgacaagctcatcgcccgctacccgcggaccttggcgaacctgcatgcggcgatggagtcggtccagcacgtcttgatctacgacaactccgacctcgccgatccctaccggttcgtggcccagtacgagttgggcaggagagtacgagcggcagagccgctgccgcgctggctgccggtgcgaggctgagcccccgcagcgaagcgacgcctggccgtcgcgctcgccgagggggagtcgaccggcgacgccgcccggcggctgggggtctcggcgggccggatcagccagccgcggcgggacccggccgagtgctggcgggccttctcggcggcgccgaccgcggcctcgtggcgccctgaggaggttggtggcctggctgcggctgcccagacggcccccgcccgcgcggagcaaccaccgtgcggcccggcccccggggttttggtcgcggccgcccgatcgggtccggctgcggcggtcgtgctcaggggggcgcccgacactctgcgggccgctgcgtccgcagcggcccgcaggggaggggaggcgcgtcctcccgtgggggccttctcttagccatcaggggttcgtcggggcgtgctgctttcaaggcgtgttcgaagagcagaggccgctgctcgctgaggcgcccgcacgcggccgccggttgagccccgagattccacccgcgccggcgaacgccccggggggtcgcacccaacgacgacgcggtcccaatcgcgggtcgttgcgccgaccggcgccccccccccccgcggcgggtccgtcagggccgaggcccgtgtgagccggcctctccgaggcgctgccgaccagaacgcccgaaggccggggaccgtcctccgaatggtgcgggcgtgggttggcggccccgtgttcaagcgcggcgctgatgtcgacttgtgggtggttctggtaggctagcgggggcgcggcgtgcacaacacgaggccgcggcttaaacgcgtccacccgatcgcgagctacttcccatgcatcacccgtttcggacgttatccctagcggcctggctgctgtgcgtgttgctcggcgccacggcccgcgccggtttcgtgaccaacggcggcttcgaagaccccgccgtggtgggacggtttcagacgttttcatccggcgagacgctgagtggttggcaggtcgggccggggggcgtggacgtcgtccaccaggcgtggcaggccgccgccggtacgcagagcgtcgatctttccgcgaccgacgcgggttcgatctctcagctgctcgcgttgacccccggacagacgtacgacctcgcgttctggttggccggcaacccccaggggggccccgcgctgcgggagatggaagtgttttgggccggcggctcgctcggcgtgttcgcgtttgacgccaccggtcgcacccccaccgcgatgggttggcaggcgcaccggctcaccgggctgtcggcccctgccggcgccgtcgagctccgcttcacgtcgctcacccgcagcgccttcggcccgacgctcgacggcgtctcggtcgtcgccagcgccgtgcccgagccgcctggatcggccctgctgggtcttggcagtgtcctggcctggctggggctcggccgccgcccgagagccgtgggctaacgccctccgcccccatcgttccgcaaggatgcgttctgcaagcacgcgagggcgacgctgcgccccgcgcgtgaagcggccactcgcacaacgcggcgacccccagcgaactgacgccggcaggtccgccgcgcgtctgggccgcacgggcccggcccgtcgctcggcgccgcgcagcccccctcagcgctgcgtctgcgcatgtaaccggcggggcgccgcacgctgggcgccggtcgtaacgatcgctggcccggggcgacccgccgcggggttgcacgctgcgccctcctcgggttgaaatccagtcacgggcgccgcgtcgtggcgcgccccgcctcttctacgaccggagccccccgtatgctggcgatgttccttgctcggtttgtcaccaaccgctgcacgctctgtgacctcgagctgggtgagcaggcggcccacgactcggaccccgacgtgtgccactgccgctgccccgactgcggcagctacgcgatcacccaggaggccgcgatgcagctcgaccgccacgcgtgggccgcggggctagcgaacctggccgccgcgatccgcgacgcgaaccagcgcggggagcggccgctggtctgcctcgccaacctcggccccgcgatgtccggcggcccgctgggcgccggcaacgccggctagccctcacgcgcgtccgccgcgggggccccgggcggcccccgatgccccgctccctccggcgactcgggtcggacccaccgagactctgccctgaggccccaccccccagaccctaaaaaaaggcccttaaaaaaaaaggccgccctggcggagccaaggcggccggttgccccgcggggcagtgcctgcgaattcttcgtcttgctacgaaaaggggcaggccaggatcggttacactcgtgattgtgactccggcgatccccttgtcaacacgaagccatgccccgaaccctcggcctcgccatcggaccccgctcgatcggctgggcgctggtcgacgacgaccgcgacgcgtccgccccccgcggcctgatcgacatgggggtgcgggtcttccccgcgggcctgtacgccttcgacaccttcaatgaaaaatcgctggccgaggcccgccgcgccgcccgcctgctccgccggaccggccggcggcgggcgcagcgggcccgccggctccgccgggcgctggtcggctgcggcctgtggcccggggaccccgagcggcaggcggccgagaccgccaaggacccctacctgctgcgggccagggccctgcgggagccgctcgaaccgttcgaggtcggccgggtgctgctgcacctgaaccagcgtcgcggcttctgctccaaccgccggagggaacgcggcgacgccgaggtgaaggggctgctcgccgagatccgccagaacgaactcgagcgggaggcggggggccacgccaccgtgggggcgatgctcgccgccaagcgggccgtgcaggacccccgccgccgcgaggcgggggaccacgtccgcaagcggcgtttctcgcgggagcagctcgaggcggagttcgaggcggtctggcgggcccaggcgccccaccacccgggcctgctcacggaggccctgcgggtcggggcgttggggggccagcggcggccgcgtcggccggtccccaggcgccaccccgaccgcgccgggctgggcgacctcgaggcgttcggcgtgcacgggctgatcttcttccaacgcaagtactactggcccaggtcggccgtcggccggtgcgcgctggagcccaaacgccgccgctgcccgcgggccgaccggcaagccgaattgctgcgggtgctgtgcgagctcaacagcctgcgctacacggtccccgcatcgggcgaagagttcgccctggaccagccgcaacgcacgggcctgctgggcctgctctcccgcaagccgcgggtgacgttcgacgaggcccgcaagcacctgggactgccggcgtcggcccgcttcaacctcgagcgtggcaagcgtgcgtcgctcgccgggcggagcaccgaggccgcgctcgccaaggcgaccggcgccggctggcgccggcggcccgaggacgagaaggacgccatcgtgcggctgctgctggacgacgacctggaggacgaggccctcgtcggccggctggtcagcggcttcggcatgacccccgagcaggccgccaaggcggcggccgtcgagctgccgtcggggcacggtccgctctcccgccaggcgatcgacaacctcctgccccacctgcagcgcgggctgccgtaccagtcgccgtccgagcccgagcacagcgcgttgcacgccgcgggctacctgaagggcggggcgtccggacgccccgcgctcgacgcgctccccccgctggagcggacccctccggccgacccggtgggcggcgaccccgccagccccgtgctccggcgggtcctcgtcgagctccgcaagctcgtcaacgccatcctccgcgagcacggcaaacccgaagtcgtgcgtctggcgttggcccgttcggtgaagctcggcaagcagaagcggggcgagctggcccgccgcggccgcgaagccctcgcccagcacaaggccgccgcccaggcgatcggcgcgctgggcgccccggcgggccccgaagcggtccgccgctacctgctgtggcgggagcaggcgggggggtgcctgtactgcggcgagcccatcggctccgagcagctcctgggggagggggtggtggtcaaccccatcctgccgctgacgcgcacgctggacgactcccgctcgaaccagctcgtgtgccaccgcgcgtgcgtccagaccaaagccgagcagaccccgcacgagtggctcgccgcggcccggcccgaggcgtacgccggcctgtgcgagcgggccggcctgctgatgcgtcgcggcgtcctcccgtacgccaagcagcggcggatcgtgcgggagggtttggagctcgaaaggcacctcgtacggcagctctacgacacgtggcacaccacccgcgcgaccgtcgcgtacctgcggctcctctaccagaaagagggcgcggtgctcggctaccagcggaagttcatccccgagctgcggcggcgttggggcctggagagcgtcctgcgcgagctgcccgacagccccgggtggcccaacgctgcggggctcagcgacgggggcctcaacaacgggggcctcgacaacgggggccagagcgacgggggccagagcgaccgggacaacgaccgcgccgaccaccgttcgcaggcgatcgacgcgctggtgatcgcgctgacgagccgcgccaggctgcgtcggctggccgcgagcgtcgggcaggggggcacgctcgcgcccccctgggaggggatgcgcgagcaggtcgcccagcggctgcggacgatgcacgtctcgcaccgcgtcgagcggaaggcccgcggggcgttgcacgaagaaacccagtacggcccgacccccaacccggcggagtgggtgaggcgcaagccggtggaggacctcacggccaacgaggtcgcgctcatccgcgaccccgggatccgccggatcgtgcaggaggcgctgcgcaaggcggggctggagtcggggcggggcaagaagcaggacgtccgacgcatgcggcaggcgctcggcgggctgcggatgccctcgggcgtcccgatcaagcgggtgcggctgctgcggcccgacgcgtcggtccggccgctgcgtgaccccgcgtcccccggccaggcgttcgtgcggcccggctcggtccaccacctctgcctcttcgagttcgaccaggacgggaagcccaaacgcgaggtgctggtcgtgagcctgctggaggcgatcacgcgtctcaggcggggcgagaggatgatccagcgcgaacacccatcacggcccgacgcccggttcgtgatgtcgttggcgtcgcgtgaggcggtgctggccgactggaaggggacgcagctgctgctggtttttaagacggcgacgacggtccacgggcagatctacttcgcgctggcgaacgacgcgcgacgcagcaacgaccagaccaattacacggccagggccagcacgctggtcgccaagaaggtgacggtggaccccctgggccgcatccgccgggcgaacgactaggcgggacgcggcgaaggcccgccctgccggcgttgggtctgccggtgttgggtcagcgcgcgttgggtctgcctgcgttgcaccaacggggacgcccagaacgagcgtccggcccgatgctcagcggcccggagctcagcggccgggcccctcgacccgcgtctgccgcaagaagcagacgcctgggatcgagagagccgagccgtgtaaccgaacctgacccgcaaccaatccgcagcggcgagccacaacatcaaggccaagtatagccggtccgggcccgcgtcccaaccatcttctcggcgccgcgcgacggccccccagcaggaccaggggagtccgtgccagggcatgggcgcccccccaaccgctcgaaggccccctcggcggcggcgccgctgcggtgagcggcggcacagaggtagggacgggccggtgcgttgggccccgcaggcgccgcccggttggaggtgagaggtgcggcctcaccacgccacgccggggggcacgtgagccccacgcgatcgtgacgcagcacgccgcgtccgcgttcagcctgtcatccgtgcggcgcgctggtccaccgggtgcgtgcgacgcggacgctgcacgcggcgcccaagagaccgagcagccaagcggccggctcgggcacgccggcgccgcgcgccggcgcggcgggcccgctcgtgccgaagcggctcttccagagggtgtagtccgcggcgtcgaccccgccgccgccgctgccggcgccgtggagcgcctcttcgctgggcgcgcccaggttgtcgcgccagcgggtgtagtcggcggcgtcgacggcgccgtcgccgttgaagtcccccgccaagaccgcggagaccccctcgaggcggacgttgtcgaagtcgaccgaggttccgcccgcgccgtcgagcgccaccagccggacgcccaacgcgccggcgtcgcccgccccggccgtgtagctgatcgaaacgtccgtgaaggtcccgtcggccaggccggtgatggcgccggagtcggtcaacacctgcccgcccgccagcagctcgatccgcgccccggcaaatcccgggctcccccccgcgtcgcggtcgccgatggcgacggtcagcttgtaggtggtcccggcccgaaccgccgcggacagcgtctgctcgaccgacgcgtccgcgcccgtcatggagagcgcgtgcgtgccctccatggcgcccaccacgccgccgttggcgtccagggccgacgcatccaggtaggcgccgccgcccgggttgaaggtgccgatcacgccgccgctcttgatccagcccgacacgatggccgggttgaccgcgtcgtcgctgcgggcgggggtctcgaaactcgggttggtgatctgaagcgggtcgagccggccctggatcgcatcggccatccgcacgcccaaggtctgttgggccgctgaggtcagatggagattgtcgccctggagcggcaggtcggtcgtgatcaccagggaggcgcgctcgtcgagcgcggcggtgcgggactgggcgttctgcaccaccggccaatgatcggtgcggctcgtcacggcgaaggcgagctgcccgatgacgaacggcatgtcgggtacgcccaggtcggtgcggaccgtggagatgaagttggtcaggttggtgtggtacgccgccgcggtcggggccgaagaggtgtccttctcgccctgcatccagagcatgcccttcaccgaaaaagtgtccgcggccggaagcgccgtgacggcgctatggagcgtgtcgagaagacggtcgtactcgttcgcgcccgggtcgtccgggttccactcctggatcaggtcggtggcgcccacggcgtgcttgacgatggcgatctggcggccggggttgtcgtccgccagcgtccggccgaacgtgatctcaggcccgaaggcgttcgcgttgttccccgacccgggcgccagcgggccccacgagccgtcgacgccgttaaagaacagcacgtcggtctgcggcgcctgcagcggagcgggcagagcgctctggtgggtgttccagcccacggcgttggactggccgccgagcaggtacaggtcccattgggcggcgaccgctccgccggcgcacaccccccaagccaacacgcagccaagcccgacgcgcctgccgcggcgcccggagcagcggggcgatcctctgccaggatgacgaagacgcttcaagagtgcttcccccttgtggttcacctcggaatcagcggcggcgtttctctaccgctaactgtcactttagctgcaagggcggctggtgcagagccggtccgcacccgtcgagcattgcgccgccagcccgcttggcggtgcagtgacgcgtgcttcgggttaggctcactccaacgagcggcgccagcagcagcgataccggctcaggaaccccaaccttgcacgccttgcacgcctggcgtcgacgcggcggacgcgcctcgctcgaaatagtccgtccacagggtgtagaaggcgctttcgacgcccgttgcggaaacctctcccgccgcatcaagctgaaacgccacggaccccttgcaaatcctagtcgcctctttcgcgagggctaaaggccgatctccttcggcggatacttcttaaaggtcgcggcatgggccttgagtttgcccaacacgctggccagccacgggtcgagccggtggccgacgggcatctcttctttggggtcgaggtgcaggttgaagaaccacggcgacagcccgacgtcgtgcagcagcgccatgtcgatgtgcatgtgcgttgcctgcggcaacaccaccttgacgtgcgccttgtactcgtgcatccggcaggccatcaattccgatccccaccagaagtaggccgtctcgcggttcgacacgccccggtcggtgagcaagaaagaggtctggtcgacgaagtcgtagtaccggtcggcgggcagcttgctgggggggacctcggcgagcgtcaacgccgttccgaacaagtccatcaggtcgaacacgtcgttgctgcaccggcccggcgcaatgacccctttccagtaggcgacgcccggcacgcggacgcccccttcgaacgtcgtgcccttcgcgccgcggaagggggtgtagcccgcgtcgggccaggcgtccatttgcgggccgttgtccgaggtaaagaacacaaaagtattctccagcactcccgcctcagcgagcgcccggacgatcgcgcccacgtgtaaatcgacttccgcgaccgcttctttgtaggcgtacttgctttggctcaaagagccgaggtcggggttgcggaagttgtcgcagtgcgccttcatgaagcagtgctcgatgaaaaacggcttctcctgctgcgcgagctccttgatctgggcgacggtaaaatcggccagcaccttgtcggcacggcccatgtcttcgatggattgaatctgcgcaagttgctcggtcccgccccccttgaagccgtgcgtcagatgatcctcgggtccgacggcctcgaagccccttaacctttgcgcgtccaggaccagccccggatagcgcctcgggtcgacccgctgggatatctccttctgggccgggtagtagccgtagaactcgtcgaagccgacgtcgtggggacgcatgccctcctcctcgcccacgtgccacttcccggtgagcagcgtgtggtacccggcgtcgctcaggagcttggcgagcgagacctcgtcctcccaagggttcttcgtgaccttgtcgccggcgaggatcggccgcgtcagcccggtccgcctgggcagccgcccggtaaggatcgccgagcgggtcggcgtgcacgtctgctgggcgtagcaagaggtgagtttcaggccctcggcagccagccggtcgatgttcggcgtggcggcgccggtcatgacgcccccgccgtagcaccctgggtcgccgtagcccatgtcgtcgacgacgatccacacgacgttcggtcgcttgccgtgctcctgcttcagcgcggcgagcttggccagggccgcctcctgctgctgcgggtgcgggatggcaggctcgaggttctcggccgtacgaaccgagcgatcgaacgacccgccagacgcctcggcgttcagtgagagcccgagcccgaggacgagcacgaaaatctggcagacctggcgcatggcggctcccgaccggacctagttgagttctatcgtaaccgccttcagcctgccggtgaagtcgaagggcatgtcgtacccgtccatcaccggggcgccggtgtcgaagccgatgtcgagcgtctcgtccagggtgacgcggttggggatgctcttctcgacgcggcccttaccgatctgcttgccccccgcgtacagcgtcacgtcggcgcccgccagcggcttgtcggcgtcggtcttgtagaccgccttgagcgcgactttgccggcggggagccgctcgtccgatgcgatggtgaaccgctcaacccccactaggttgtagtggtagaccaacttgccgtccttgatcatcagcccgtagcccgcgaagcggcccccctgcgtaatcagcatcccctcggcgcccgcctcggggatctcaacgtcggcggtgatggtgtggctcttgtgcttcaggtccggcgcggctccctcaaccaccctcgaaggcgccgctgttccgcacggtcgataagagcgggcggctgaccgatcgcggggtgggcggcgtcgagacctgccggagggtaaagcgacggctcgaagccgccggcttgccggggaacatctctccgcactcattccgctcctgcgccgcaaccgacctgctgcttcagggtgtcccgctggacgatgttcagcaccttctcggtcactcggatgtgcggacgacccgcctctacgaccgccggcagaaggcggtcacgcgggatagcgtcgagcggatctcggtgtgaatcgcaatctgctcacgcccgtcggtgctggttcggggcaacccggctcctttgccaactacccccatggcccgcttgacacgtaaggaaaagcatacactattccttacattatggcgaccgagaaaacgacgcaaagcattgtaggaaaggcacttaggtgaattcgcgggaagggacgcggtgccgtctttgtgccgggtggctttttcgacctgggaagccgcgaagcggttgatctggccctgcatcggctcgccaaaaagggcgttatcgggcggctcgctcgcggcgactacgacctgccaaagcaacaccggacactgcgggccgcttacgccttcggccgagacgatcgctccggctctcgccggacgcgaccgcaccagactgcaaccggctggcgcctacgccgccaacgcgctcggactttccgagcaggcgccggccaaggtggtcttcttcacagacggctcaagccgcacggtcaagatcggatcgatgacgatccagctcagacaaaccacgccacgcaacatggcggcggccggccgactcagcgggctcgtgattcaggctttccgcgagataggtcagaaaaatggcctcctcaccagaatcggtgggtgaactcgggctcgggtagggcgccgaggttgtgggagatcctaaggatgggtgtccccgggggggctgcattcagcctgaggaccgccggccgagaagagtgaggcaggattccactgcctatcagcgtttgcttgtaaatcgcgagcggccaatatagcctagtgggcctacagcactgcggtaacccacgccatcaggttggcattccaggtgcatttcttctcataaggagcgtctcatgagatcgctcattcgggtgcttgcgctcaagttgctcgttctgctcgccttggcggggctcgcgagtggcgcggctgctcaagcagtgaaggtcttctactcggaaggcgacagcagcgggctgatccaaccgatccattctatcggcgtggtgaactccgacggcaccgggaagcagaccatccactccggtctggggtttgttccgaacctcgatatcgacccgctaaatcaacatatctactggctcgaactcaccggcgggaacaacgtttacaatagccgcatccggcgttccgatttcaatggttcgaacctcgtcgacctcgttgtcaatcgcgacgagctcggcgggctctcgctcgatttgtcgcaaggcaagatctactggatcgagcaacagaatctgaacggacctggcgccgtttacgcctccgacctcaacggcctaaacatccaaacaatcgccacgagcgttcttgagtcgcgaacgctggaggttgattcaaactcaggcgtctacggtggtttaacaagcaacatcgagttcttcagcgctccgctagccggtggaccgaccacgccgctggtcgccctgcctgcgcagaccgagacctgggggatgacggtagacacgggtgcggggaacttctattggtcggagtcgagctccacggggggagtgatcgcaacgagcagcattgccacaccggcaagacaggttgttccaggctctggttctttgacagactttccgctgggcttggacttcgacccgatcaccaacaagctgtactggggcagcgtggacagctcgggcagccaactggtaggtcgaatttcctatgcggagcccaacggcgcttcgcggcaaacattgccgctggcttttgatgcggcggttcacgacgtggcggtgttggcggttcctgagccctcgacgctatggctgtgtgcagcattgctcgccttaagacggagttcagtcagcactcagttgtctccgcggcacgccccacaacgagcgtgcatgcccagaacgtgacgcgccggcgcccggagcggcgccgcacgcagcggtggatgcagcggtacgcagcgacctacgcaggaccgaccagatcagcgcgggccacgcgggccatgggggcctcgcgagagcgggaaacgaccggcaggccgtgcggtccacacgcgaacagatactggtcaagatggagttgtgggagatcttgaggatgggcgtccgcgggggggcccccggaggtcgcatccccggggggccgcaataagcaacacttcgaaaccgccatcttcttctaccgcggcgaactcgatctctacccatggagaaacccggacggaccattttcggaggaatcttcgtttccatgtcgagaacgccccgtcgcaaagcgcattggtcagtcagcagtgacgtaacccactgaaaagttggcaacctatcgatgaaggactctcccgtgattcattccgttctgaaagcaccgattcgaattgctccccttcccatcgcaccaggcagtcgaaaatggtcgacgttggtcggtttgctgacggcagtcgccttggtttgcccgtccgcgtcatctgaaacagtatcggtctttccatcaactcttcatcctgagcaccgcgccggtcctcatggccgcggcaacgcatacgcgccagacgtgatctgtgtctccgatgcgctttaccagtactacggcgcccagggcgtggacggccacgatcggatctgcctcgccacctcgcgtgacggcaaagtctggacagacgaatgcgttgtctttcaggttgagggattgaaccacgtgaacgatccgtccgtggtgcgagttgctgggcgttggaagatgttttacacccgcgccgaaattggggtaaccgatacgatcgggttggctgaatcagacaacggtcgcgattgggtcgaccgcggcgaagtattcggccctggcgaaccggaaagttggaacagcctgctggttggtcgaccgagcgtgctgtttgacgacggcaagtttcgtatgtggtacgacggccgcagcagcctccccgcctcggcccccgataaacaagcgatcaaaagttcggtctcgcaacgctcggttggctatgcggaatccgccgatggattaacctggaaacgccatcctcgccccgtgatgcatcgcgactcgggcgccgtccatgtttcgcagatcgacggttctttcgtgatgttaattgaatcgcgcaaaggaacgctgtgggcgacttcggccgacgggatccgctggcaacatcagggattgctggccgacgccggacccttcgcaccgcacgggcacgtcaccccgtttctgtgcaaggttgagaaccagttcagattgttttttggtgctgcaatgggaacgagatggaatgagaatcagctcgcttggatggacgtcgaccttccggttcagagcacgaccaaggacctcgccgcagatgttgtcgcaactttaacgaggaacgatccgcccgggccggatctgccattgcttgctcgcgtcaaggttgaagccgcttcgttggcgggacgccagcagcccgacgtgcggcccaacattgtcatgatcttcagcgacgatcaacgtcaggatgcggtcggctacgcgggcaattcagcgatcacgactccgcacctggatgccctggcgaagcaagggatggtcttccgcaattgtttcgtcaacacgtcgatctgcgcgatcaatcgagccaacttgctttcgggccagtatcccggacgacacggcatccgcgacttttttgaaaccttcacccatcagcaacttcgagaatcggtgcccggacgtctccgggatgccggctatcaaaccgcgttctttggaaaatggggcatcggcgacacttccgaaaaaacgcacctgggcgccgcggtcttcgactattgggccggtcagcccaaacaaaccaactacttccacgaatccgattgccgccatgttcgctacgacgggttctcgagatcctcagacgacctgtgtgattgccctgccgataagcgtggccacgccggcgtccaagttcgtgttggcaaggaaacgctcagcgatcccatccatcacgatgcagaaattatcccgatgcacgcccagcgatttctggaaggtcgcgaccctgacagaccgttttgcatgatgctgttctttaaatcgccgcacggtccgtttagcgattgggaccccgcaacgcgggagtacaccgccggcaagacgatgccaataccgctggctgcgacgaaagcaaatgcacagcgcgagccgaccgttgttcagagctcgctgggctggtctgccggtcaaacgttgttggacaatcccgcgcgtcatcaggccagcgtgagcgattactaccgaagtatttcgagcatggacatgggcgtgggccgcatcatggccgagctccatcgtcgcggcttggatcaaaataccgtcgtgctgttcacgtcggacaacggccacttcagtggcgaacatggtctcggcggaaagtggctgatgtacgagccatcgcttcgcgtccccgggttcctgtgcgatctgcgaaagccgcttcaggaagcagtctccgatgaacttgtcatcaccaccgatttttcagcgacgatactggcactggccggcctcccaattcccgacacgatctcagggttagatttgaccgcgttgactgacaatgaggaaatcgaatggcgagacgacatgttttacgaccacccttatggacacaacggaaagatcccaacgacgatcggggttcgcacaaggacgcatacctatacgcggtacacgtccgagacgcccccatttgagcaactctttgacaatcaaaccgatcccgaccaactgaacaacctcgccaccgatccggaattcaacggtcagttgcttacacttcgtcgtcgctgcgaccaactacaagaagaagttcaatgatgaactacccatctcttcggactttcgtttcgttcatcgtctccgttgcattcagcgcgacgggcctatgccaacggcccaacatcgttgtcatcatggtcgacgacctaggcttctctgacatcggctgttacgg

SEQ ID NO: 325 - DNA, 23216 bp, synthetic construct
  misc_feature 1..23216: note = Synthetic
  source 1..23216: mol_type = other DNA
gttgatctcggcggggctgcgtcgcgccgaccactgctcatcggtcagaggcttgaactcatcgcccccggtcgattgaacctcacgctgggcgtagcggcgggtctcgctggcctccctcatcagaatggcggcgcgctcgttgcagatggtcgcccgttcgtgggtctcgcgggcttggctttcgggctgggcgtaagactccgattccagttgcttggcttcctgcgacttctctttcgcctgccgatccatctcgttggccttggataagtcggcgatcgcccgcttccgctcggcgtaccggtccaggtcggcttgcagccgctccggcgggtagtcgagatcggcgagcagttgggccacgtcgcgcaactcgcccgcgtccgacggcgcggcgccggcctcaccgatgcggcgaacagcgtcgcggtattcgtcgctgcggccggactgaagggccttcagcggccccacgatgtcgatagtgctcatggtttgattcctttcgggtggttggtggtgatcagcggtaggacgcgacacgggccgcgtaggcgtcaacgccttcggtcagcgtctgttgggtggtggcggacaccggacgggtcgggtgaagtcgcgagcggatgcgccccggattgcggtagctctcgacgcgagccaggtaatcgctggcggcggtcgcttcggtcatcgccttaatcttctcgctggcggacgtacgtagggcctggacggcgccgcggtagtcgtggccgtgttgatccagggtcgccagaatcgattcccagaaagccacctcctgcttctcggcggggctgtcgatgccggggctggcgtcggcgccaagcgtttcacgcaagcggctaggccggctgggcgtgatctcttggagacgcgtcttgatcgtgttagcagccatcgtgggttccttattcaggggttggagtcgccgggggattcaaacgcccccggcggggaagggtttcagctcttgggggcgctatatgcgggatacagaacctcccgggtggcgaccttggccagctcgggatcggtcgcgtaggcgagtagccggcccgtctgacgcgtctgccgcgccaggtcgtgaatcgattcgcggagcgcgtcgccctcgggtagcgcgtcgcggaacgccgcttcgatggtcagcatcttggcggcgaatgcctcgaggtcgcgcactgcggacgcctcgaccttgccggcgactttgggttgttcggtggtggtcatgctcaaaactcctggacgaactcagtgagggcttcgggtaggtcacgcatcaacgcgacggcgtcttcatcggccatgatggtgcggtcgtcgctcgcttgtggggctcggtattggccgccgagtttggacagccgtttggcctctgtgatgggtgtgacgagtgtgaccccgattcccggttgatctctattcgcgagtacaaagctggcgttcataccggaatctggttcacaacccgtcacacccatcacacgacgccgagagcaggccgatgccgacatacttaaccccttcgcgtgtatggactttggaataacctcgttccgccaaccgccggccaagccacgtcgccgacccttcacgctcgtgaagggtttgagcccacgcgttgtaggaattgagcagttcggctgccttcgactctgccgaacccgtcacaaggcagcactcttggagccactttccaacgaggtcggagtcggcgcggtagccttcggtggcgaccttcacagcgcccgattccgcgagcccgcggcgctgccactcaaggcagccctgaaccatccagcgggcaatggctggcccttcggcgcgaagcttggcgggtaggttgcggtcctgccgatcgacgggaatcgtcaccgtgaacggcaacagacgcagccggcgccagatgccgtagtccgtcccgttgacgattggcttgtggttggtgatcaggaacggcgtatggcttggggcgaactgccagaagttttcacgcatcctccgagctttgatcttgtcgccgcccgtgatgctcttgatcagcccttcatttagccgcgccccatcctgcgtctcattcaggactgccaggcgtcggccgtggagatccgccaactcagtcgggtgagagtcgccgcgcttcaccgtgaagagattcggcgccgctgtaatcgcgtagtcgcccagaatgtcctggaccgtgccgaacagaacggacttcccgttagcgcccgtgccgtaggcgaccgggaaaatatgctcgagttgttcgccgatcagggcacagcccagcagccgttgcatgtagctgatcagctcgctgtcgcccgcgaacgtcgtgtgtaggaactctccccaaacgacggcgtcgtcgcccgcttcgtcggcgtaatcaatgccggtcgttttggtcagcaagtcgcctggatcgtgcggcctcagaacacccgtcttcaggttgaccgttccgttctcgaagttgagtaaccacgggtcggcgtctagcgacgtgtaactaatcgcgatcggcggctcacttcgggccatcgctagcatcgcttcgagtcgcgagcgagactgactggcgaacgcgaacttggtgatctctttctggcggtcctcatcctcggcgatggcggcctcggcgtggattgccttggcggcgaacttccccagccgcataacctcttcagtcgcatcctcgagccaccgcctaccgtcccacagcagccacttattccatgccgcgacgtagcgaacctgcccaccgtagcgagccgcgaaccgctcgccgttaccaacgtcggtcatggcccgcggagtgacgacgcctgccgccggatcgttcgcaggaaccgcgtaggaccgtgacgccttgggttcgaagtgctcccgcatttggcgccagtcccacgaacagctttcgtggtgacacttcgccacgatggccccactcggtagctgcgcgacgtagggcccgtctccgccatggtcgcaaagcggcgacgtgcggagagtccaaagccggccgccattcgcccacgggttcggcgggtcaacgtccaggccatgccgttcgatgaatgcttcgaggtcaaacgtcggcagcgaaccctgcgacgtcggccggggcgaaggctttgagggctcgggcttcaccggccccgccaatgcctctagctgcccagctgtgacgacgcgcaactcggccggcttagagatgatcgatgccatccggtgcggcctgtcgggcgtgtcgtcgcccttgcagcacttggtgccgtaacacttccaaatcctcgaagcgttgaagacgcctgtgtctaccttcacgctgtcgtcgttgaacttgtccgccaacgcttgcagcgtccgttgcacgatgccgccatcatcggccgctaagtcgatccgatagagaaggtgggccccgttgccgctgtcggcgtaaaccggggccggccagccgagccccgtcaggaactcggcgaccacttcggccttatcgagtgccgcttggtgctcggcgtcgctcgcactaataccactcggccggatcgcatcgaagtcgagtagcaaccaacgccgggcgatgatattgctgtcgctggtgctctcccccttcggcgtcttacgcagccgattggacgcacgggccaacaacgcagggtcggccgcgttgggtacaaagtagatgcccttggcccctttcagcatcgccagattgcgggccgcttcttcggggctgtcgaagtagccgctgtaagtcgtcggccatcgctcgtcaccactggacgcgtaggcgtccagggcccgtacctcggttaccgcgtcgccaacgattaaccgcagggcatcggcgacggcaaccgggtcaacaagcggtgcgactccattcgcttgagcgatcatcgcgagccctcccagcctgcgaattgcgggcaaatggggggctggggtgtgacaagtgcggacatcatccggcacactccgccgcccagcggatttgatcgacacgaaccgttagcccgcgctcagggacggcatgcgggaccgaatgcaggacgttggcgagatcgccccagccgtgatagctcccggtccaggcgtgtagcttgatccagccatcgcctaggtcagtgacgccctcgaaggcgtagacgcgcccactcacgagctcgcaggcgtagctccaacattggtcttcttcggccttgccgagaactccgggcagctttgattgccgccaagtcccgatcgcgttagaattattcacggtttgatctcgctggattggggctgtggtcgccctggttcaaaggaactcgcaaagcccggtggttgtggttgccaccgggcttttgcgtttgtcatgccgtcgccacgagagtcgggcgccgggtcgtcttcagactctggaggtagtcatccaggtcgagacgatcgatcagaacagaccggccatcgcggattgcgggcaggtcacccgcggcgatggcgcggtcgatggttgcgagagaacgattcgaatagcgggccgcttgggtgcggcgaagatagcggtcttcgatcatggctcgggacttgtcgaggcttcggccgcagtcacttgacctacggcgacggctggaaccgtcatgcctccaattaaggcgaggggaagaaatcccccgctttgttccccgcaagaaaatcgggaataccctagaacgccatgctttcccgcgggatggcgcgggccggccaactagaaaaaagaatggcgacgcgcgtggggaataattccgccgttgatttatttcccatttctccgatctctgagcagcgatcggatgtatttcgcatcgtcgatcccgatgctgaaggcgctggcgacctcaccttgagtcggcaaccggtctggccacttcactgcggcggcattcacaagcttcggggtctgcggctttccaggcgaacctcgctttccccccgacttccgcttggcccctctcgcacttgcgtccgctgtggctgcgacttcagtccgaataacagccttctcctttgtagctctcgccattagcactttcagttcgtcctcgccttcaggcgcgacaacgtagtgcactagctcgcgcactgccgcccatttgtcccggaagccatccgtgttgaaacgatcgagaacgcagatagggaactcacccgacacttctctcccaatccacgccgactgagcggcaacccatccctgccgatctgtctcaaaccacagtcgctccagcagtctcaaagcaatctgcgcgatcgcttcgtgtgcgcttggatagaatctgccggcgtgtttgcaagggtctgcggaagggatggccgctgcgtaccgtaagcggtgttgatggtacgccgctcgtgatctcagaagttggtcagccatgagcgaagccgtcactgaagcgctctgaataggatcgatcccatactcacgccactcgggctgaggatcgcccgtcatccaaaccatttgcgataattcgaaagcgatactgtcgatttcatcgctgaggctcacgcgatggatagcctttcgcatcccctcaccctccctagaacgcaggcccgaccgcccgggcgccgcgggaggtgcggccccgggctgatcgacgggggtaattactcccctagcccgcttggttgctctgcggccggaacgccccggccgctatcacttctacccgatccgggccgattggtagaaccggccgccccgattctgtgaccaaatagcgcccttaaaacgccttactgccgttttctcgctattttgcggggtggttggcttcctagagggagcactcgacaggcaaacgacttacgacgattgccttcacttgttccgccagacatggcacgcttttcggcacggcttcgagagcgataaagaccccgcccgggttgccgcccggacgaggcccacacagcaagccttcggctcactggacactggtttgtctcagtagctttaaggaggtttgtgatggcccgacgccccaccccttggttccgcaagggccgcggctggtacgttcagcaccgcggcaagcaggtcgctctcggcaaggacaaagccgaagcgtttcgccgcttccatgctctgatgcagaaggccgacgatgcggtcgcacagggcgactcgttcgcggcgatctgcgatgagttcctcgagtggacgctccagcaccgtgcccgtcgcacttacgactggtacgtcgctctcctgcaacccttcgccgcattcctcaaaacgcatggcttcgtcggccccgcggagggactgcgacctctgcacgtcaggcgatggcttgagcagcatccgacctggggcggtacgacacagcggcaggcaatcgcggcagtgcaacgctgctacaactgggccgtccgaatgggctttctcgatcgctcgccaatgaccggcatcgagaaacctcaggcgaacgtgcgaacgctggtcgtcacgccggcggcttacaaagcattgctgtcggagattaaggacgaagcgttccgtgatctggttgtcattgcttgggagactggatgccgtcctcaggaggcgattcgtgtcgaagcccgtcacgttgatctagccaaccgtcgctgggtctttccgccttccgaagcgaagggcaaacgcaagcctcggatcatctatctgaccgacaaggcgatggcgattacccgtcgctgcatcgagcggaatccgaccggtgcgctgctccgcaatcgtgcagggcgaccgtggacctcgtcggctgctaagtgtcgattcagcaacttggcggacaagcttggtgcgacttactgcctttacaacttccgccactcgtttgcgactcgcatgcttgaatcgggactcgacgcgctcaccgtcgctttgctgctgggacattccaacccggcgatgctctcgacgacttatcagcacctcgcccacaacccggcgcacttgctgagccagctcgcgtcggctggcaagtagcctagagcctcaggtgccggagccgccgcgttggcggcttcggcgctggctggcttgcattggcctggctgcaagacgcgtgcaggtattcggcaagttgttcttccgaaacgcggatagcgccgcgccctccgcccacgcgatgggctgcaagcttccccgattcgacaagctgatagaccgtcgtgcggcttactcgcaatcgctcggcgaccattgcgactgtaaagagtggagtggtcatccgagccccatccctcccagtcctttctcaatggtccggcgtacgatctcctcggccatgttgcgatccgcgatgatcgccgcgatcagatcggtggcgacggccaagaagtcgggattggttgcaatcggatagccaaactccacgatggccgtcttcagcacaccgacggccacattgactcgctgggagggatcgatggccaacgtcggcagcggcgtgaggtccgcgccgacgggagcgccgtagcactccgcaaacagcgtagccgccgcttcccatgccgggtggttgggcgttcgatcggagtggcgtcgatcgaccgggccactggtgagccggaaccaacttgcggtgaggtattggacgacgtcggcgcgcttcgcgatccagtcttcgacggtatcgacgccaagcttcttgagccgccctctccccagttggaactcgatgcgggtggcgacgtcgggaatgcccaaccacctcgaggtcgccatgatctccattttgaccgggtctctcatcgcatcgaggagcttgtcgtagatgcgtagaagcaacggggacttgcccacgcagaagcccgtgtctctctgaccggacgcgtaacttgtcgccggcaagattccttgatgacgactacgactcttggcgcgcgtcaccaaccaaccgttgctgtagggctccgtgaacgtggtcaccggtgtcccgggcaagtcgaggcatggatcgactcgcgacagcttgttggcgacgatcgtcgcgcctagctgttcgatgaggtagtgaaagagaccccagacacccgcgaagcccagtcgcatcatcggcaccgagggcgcgctgatctggacgctcgggtgggttcggtggggagtcgcacggtccgcgatcagtagcttaacgccgtgatccgtccgcacttggtagggcacatagaaccccttgtctcttgccccgacctttacgccaccgggcgacactaggccgacgacatcacccaattggagtgtgttggcgtcgctgcctcggagagcggcctcgcgtgctctctctagctgctcacggatgccgccaaagctttcatattccagatagaaattaacggttaggtaatcttctccacctagtgtggttttctgagggggtgtgttactgagaccaccccctccgttgaggattgccgggtcgaacgctagcgctgcatcgtctgcggatcgctgcgcggcggggttgtcgcctttggcgatagctggggagccccccgccgtctccccagacccctgacccaccacctcttctctgtgttcttcgctgcgccgggtaggctctgcctctggcgtgcttggggatgatctctcactctcggcgcgacggaactcgcccgacccgtcggccgccgctcctcgctccttacgtcgctgtggggcgtcgtccgccgggtcgttcgagttgtcgctggggggttgtgtgttcatgccccaaaactaggaggcatcccctcactgcgcccggacagcttctccgctttatatgtccgctagcagccactcccaatgctcgccgtctctgcgcagcattctggcgaaggagtctttctgcacgctcccgaagtcggcatcgacgatcacatcgggatcgcggctgatggctgcgatatcaaaaagctctctcacttgcggcgcggtcagcggttcaccgaagcgcttggcgacatggtagaggcccgatgcaatccagcgctttgtcgcggccaaggtaggggcgctatggacgcgttccatcgccgggtacacgatctcgaagcttgcgtaggctctcgccggaccgccggaatggagcaccgcacgcggagcgggcaggtgaatcacctcggggtcgatctctgcgagattggcgagtgcgtcgaggtccggccccgagatcgccgtcgctgcgccgtagagctgctgtggagtggtctgatgccgaatcatgcacggcacgaacacccgcacaaggaaagacaccgccggcaacgctcgcaattcgtcgaactcttccgccgcgaacgccggcggaccacctgtcgtccagcaatcgataagctcctcgataggcgcttcgccgccactggccgtcgggccctgcaaaggctcttcgagtcgctttagctgctgaaccacaggagcacttgggtcgccggccatcagctcgctcaagacctgagggcaaagcggaatcggcgaaggaaagctccccaacggtagctccatcacccagtcaagtgtggagctgtagtagcgttcccacgcctggtcggtccggtccgttgtcgtttgctggacgcgctcgccctctcgcgtcgcgatcagctcatggaccatctctgccgcgaaggcggcgggaatcgcgaggtagcagaatagcggggatttgcccttcacccaattcttgagacgttgcttcggcgtcatgcttcgctcatctcccgacggggcggcatggcatgaggacgagtgacacacctatgtcactcctaacgcgacaccaatgaaaaaggccgaccaccttggaagatggacggccggttgctccgtggagcagtgcctacgaattcttttcttgttacgaaaaggttcgcgggctgggattggttaccgaggctgttattatcgcttccacgtcctgtgtcaaccttttccgtgctcaactcgcaagacgcgatgtcgaatttagttctcgggctggacctaggccccaattccattggctgggccctagtccgtgatgacgacgccggcgagatcgtcgccacgggggtccgggtcttccccgagggcgtggacgcctttgacacgtccaaggaaaagtctcggaacgaggatcggcggatcgcccggggcatgcgcagacagattcggcggcgggtcgctcgacgccgcaagctcgtcgacgccctgatcaagtcggggctttggccggcggggtcggcgccgcaggaggctctataccgcaccgacccctgggagctgcgtgtccgcggcctcactgaggcgctgacaccgcacgagttcggccgtgtaatcctgcacctaaaccaacgccgcggcttctggtcaaaccgtaagcgggaccgtgaggacaaagaggccgaagggatgaaggcagagatcaatgccaaccgcaccaagcagcgggaggcgggacttgattcgatcggcgcctacctggcgccgaaactccgcaagacaaaggaagaccactgcgcgccgcgtggcgaaaccgacgaacggaaggtgcgcggcctgcacttaggccgcgaggacatttacggggagtttgacgccctgtggaagaagcaggccgagtgccaccccggactgctcaccgacaccttgcgttggggcaccctcgggccgatcaacaccgaaaagaccgccatcgccgcgcacaagccgatccccaagcatgacgagcggcgtaaaggcaagtccgacctcgaagccttcggcatccacggcctcgtcttcttccagcgtcccatcttctggccgaagtccgtcgtagggctctgcgaacttgagccgaagcaacgccgctgcccccgggcagaccgacacgccgagcaatttcggctgctacaagaggtcaacaatcttcgttacgccgatcccgatagtaacgaggagcagccgctcttgacggaccatcgtgcggtgctgctggactacttggcgacgatggagaaggcgaccttcgatcagattcgcaagaagctaggcttcctagattccgtcaagttcaacctcgaacacggcaagcgggccgcgatcaagggaatgacgctcgattggctgttcgccaagcagctcggcaaggattggcacaagcggaccgacgacgagaaggacgccatcgtcacgctgctgcgtgagaatgagagcgacgacgatctagtcatcgaaaggcttatcaacgagttcggtttcgacgcgaagcaagccgaggcggcgctcgatatcaacctgccggtgggttacgtcaatctctcgaggatggcgatcgacaagctgctgccgcacctggaacgtggccttgtttaccaatcgctgagcgatccggaggtcagcgccctgcacgccgcgggctatctgcgtcgcgacgaattgcaacgccggctgttcgacaagcttcccgatctgcgccgcgtaaaccccgccgactgcaagctcggggacctacccaaccccgtggtgaggcgtgcgctggtcgaggtccgtcaacttgtgaacgcaatcattcgcgagtacggcaagcctgaccaagtccacgtcgagatggcgcgtggcttggcaatggggccgaaggcgcgcagcgagtacaactcacgcgtgcgcaagaacgaagccgcccgtgaagaggcagcgaaggcgatccgcaacgtcggcgaacgaccgagccgcgacgccgtgatgaagtaccgtctctggcaagagcaggcccacgagtgcatctattgcggcaagacaatcagccaggagcagctcttcggcggcgccactgatatcgaccacgtcctgccgtattcgcgttgcctcgacgactcgcaagggaataaggtcgtatgccatcgcgaatgtaaccacgagaaaggtcagcagacaccttacgagtgggtcgccgaccgcgatcgtccgcgttacgacgctatctgtcagcgcgccggctcgctactgcgaaagggactgctgccttaccccaaatatcgacgcttcctgcagaaggaactcaagctcgacggctttatcgcgcgtcagctaaccgacaccggctacatctgccgcgctactgtcgaatacctgcaacttctctttgacaagccgagctgtgtgctcggcctcaaggggcaattgaccgccgagctacgatggcagtgggggctcgacaccattctatctgaattacccgacagccctgcgtggcaagcatcgaagaagctccgcgacggtgaaaagaaccgggctgaccatcggcatcacgcaatcgatgcaatcgtggtcgctctgaccaatcgatcgcgactacaaaagctctccgagttagttaagcgtggcggcggcagatcacacggcgagattctcttcgaaccgtggaacggcctccgcgacgaagtggcgaagaagatcgccgctatcaacgtctcgcatcgtgtcgagagaaaggtccgtggcgcattgcacgaggaaacgctctacggtccgacagagcatcaggatgaatgggtcgtccgcaaaccagtcgatactctatcgataaccgaaattgctcgcatacgggacttaggcatccgcaatatcgtgatcgagaagctaggtgaagcgggtatggaagtcacaagcggcaagaagcttgatccgaagaagattaagcaggcattggcaaatctcaggatgccctcaggagtaccgatcaaaagggttcgaattcttaagcacgaccagaccattgctccgcttcgcgaagatggctcgccgtaccagagctatgttaagaccggctcaacgcatcatctctgtatctttgagcatgatgtgaatggcaagaaggtacgcgaaccaattttcgtttcaatgcttgaagctaccgcgagactaaagcgcggccaaccgatcattcaacgcacacatcctcgtcgcgcgaatgctcacttcgtgatgacactcgcaacaagggagtgcgtactggcaaatgtcaacgggacacaacgcttgcttgtttttgtcacgtctaagtccaccactggagaacttcgttttgtggacgcgaacgacgctcgtcgacggaaagaccaacgcctcatctactgtacgccaaatactcttaatgcacgcaaagttactgtagattccctaggccgtattcgctgggcgaacgattaacggaaattgctagcggagggcctgtccccgaattacgcttgactagcgtaaccggcggggcccggcccgatccgcgtcacggacgattccctttgctggaatgtcggccgtgatcaaacgcacgattgagatatcgcgcgagcccgcccacctctccgtccgcaactctcagttgctgctcaaacgggacggcgtgattgttggccaggcgccctgcgaagacctgggcgtggtcgtcgtcgatcatccacaatcgacttacagccaccatgccctggtgacgctcaccgaagcgggcgccgctgtggtgctttgcggccgggatcatcttcccgccgcgattgtgctgccgctagcagatcactcgcaggttgtctggcgccttgccgagcagatcgccgccagccggccactcaagaagcggctctgggcgcagctcgttgttgccaaagtgcaagcccaggcgcggaacctctccccttcgctaccggcccaccaaaagctgcttgcgctggcgaaggaagtaaagtcgggagacccgatgaacatcgaagcgcaggccgccaaggtttactgggcgaactggctgatgacggcatcgccggagatcgccgacaccgagcgtttccgccgcgaccccgccagtgctggcgtcaatgctttcctaaactacggatatgcgatcctccgcgccgcaataggccgcgcggtagttgccgcgggtctagagccccgcttggggctacatcaccggggccgcagtaacgccttctgcctagctgacgacctcatcgagccgtttcggccgttggtagaccgtcgcgtccgctcgatgtaccgccagtggtacaccgaactcgatcagactgcgaaagcagagctgctaaatctgctgacattacgcgtacggctccggggcgaatcaggggaccaggtcggcccactgatggtgatgctgcaccggctcacgtgttcgctcgtccgttgctatgtgggcgacgccaagaggctggagattccagtcccctgctctggcacccgaattgatccccccactgccgaagcaccatgagagtcacggggtatcgcctgatgtgggtcctgacaatgttcgacctgccgaccgacacgaaaaaagcgcggcgggaacacgcccttttccgcaagatgttgctagcggacgggttccgacggatgcaatactcggtctatgctcgcccctgccccagccgcgaaaacgcggacgtacacgtcgcccgagtcgaaggagccttgccccccgatggcgaagtgcgcgtgctggtcatcacggacaagcagttcgcgcggatgcgcattttctggggaaaaaagcgtggcgccgttgagaaacctcctggtcagttggaactcttctaggtcacttcttggccgcaagtcgttgcttcctcgtcacttaggccgcaagcgaggggaaccaatcccagcccgcgaccaatccgcaacgcaaaagcatgctttcagtacgaacgctcgagggtaaccaatcccagcccgcgaccaatccgcaactataggagggcaggaccccgcaagcgattagggtaaccaatcccagcccgcgaccaatccgcaacttctttgattcgagcaggcggtcggcccagagggtaaccaatcccagcccgcgaccaatccgcaacccgctctcactgcggagatgctgggggaggagggtaaccaatcccagcccgcgaccaatccgcaacgccgccggccgcaagcggttggaacgctccagggtaaccaatcccagcccgcgaccaatccgcaaccccaggcagcgaagaaccaaccagggaagaagggtaaccaatcccagcccgcgaccaatccgcaactagtgcgggcgcctccctcgtcccgcgtccagggtaaccaatcccagcccgcgaccaatccgcaaccgagggccgcgacgtgctgtcgctgctggaagggtaaccaatcccagcccgcgaccaatccgcaacatccgcctctcgacgcaatcggcgacggtcagggtaaccaatcccagcccgcgaccaatccgcaaccccagcccgtcgcctgcggcgtggtgctgaagggtaaccaatcccagcccgcgaccaatccgcaacccagggacttcgcggggggctcggcgttgaagggtaaccaatcccagcccgcgaccaatccgcaacctcatacaccaagagcactaagaggaagcaagggtaaccaatcccagcccgcgaccaatccgcaacactacctctacccccaccgcaaaccgcaccagggtaaccagtcccagcccgcgaccaatccgcaactattcgccgcgcaccgcaaactcgttgcggagggtaaccaatcccagcccgcgaccaatccgcaacacgcagaacactaggaggatggctgtgacaagggtaaccaatcccagcccgcgaccaatccgcaaccaatctgcggcctcacggcctaggtcacgaagggtaaccaatcccagcccgcgaccaatccgcaaccttattggattcgagcaggcggtcgctgcagggtaaccaatcccagcccgcgaacaatccgcaacctcccccagctactgctctccgcgtatatcagggtaacaaatcccagcccgcgaacagtcggctgcctcttcgctgcttcgcagtgaagaccaagctatggactggtaagtgaagccgtccggtcgcaaggccatcaaaggaccctttagcattaagtcaattgtgctcaatagcggcacggcacctggcagggtaacgcttgcaaaccatgccaaaccgcctaaaatcgtgaaattacgatccattgagcattggcacgctgaccgctctaagtccttactgagtcgctgcttagttctgatgcctcgttgatcccgaagacgccgcctagcggctcttaatcaatgggttctaggttcgagtcctagagggagcacctcagaggccggcgtctaacgccggccttttttttggtcgtaacgacttatgtcgtgttggtgaagcgacgtctgcggctatcggcagcctgagatctggttcaacggagcggactcgcggcattggcgcgagtgtccgtcggccaaggcaaggggatcgttgggcctgcggtgcgaatggctaccgacgtgggagacttgaactggccagcctcgaactcgacccgcagttcactgagattgggcttgcctggatcgaaatagagatggcatgggctgaaaagggggaaaacaataacgccctaggcgggctgggccgcctagggcatcgttccaccccgcgacgccgcggaaagttgtgcgggtggcgccaaatgctgctagccgagctgcgtcgcgttgcggcgaacacgccacgcggcgggaatcaccaaagccgccagaagtgatgtcgaaggctcgggcaaattgaccaaaacgatctgtgcagcgttcccagccccgaagtcccgacgaaaggtcacgtcaaacgggctgccgtcggcgagcgtgcccacgatgtctccggcgacgaatggaatggcgccgaatggcgctggcatgccgagcaccgagaactctttgccgaagatcgtgatgaccgaccccgagcgagcctctagatcgccactcgcaaagacgccgcccgagatagaaacctcgcccgacagctcggcgtagaggtcgatcgagccggccgcgccgccggcgatctcggcaacgcccgccaagacctccacgtttagcgaatcggctaccaagccgtccaccagcagctcgccgccgctctgcgccgagagggcgattgaattggcagttccaccccgaagctcgacgcgtccattcagagacgcaatgacttccgcgccgagctcaccaccggtcgcacgaatggtccccccgggaccggcctgaataacgtcttcgacacgcccgccactcatgttgacgacagcccggtcgccagcaataagattgccgatcacgccgcctcgatagtttgtcgtcgagtcacctgaggcctcgatcgcgtcgccgatggtgatgtagtcgatatctgcgacagcattgtccgcgacgacaagatcgtcatcgacattagcgccgttgaagtaagcggaagagttctcgtagagctgcaactcgtcgtcgaattgtcctccggttgcttcgagccgtgaggtcccgaagaaaaaagcatcgtcatcgactttggccgacccgctgacgaagacacggctagcaccggtcgcgtcttcgatatcatcgatacgaccgccactgaagcggaacgtcgcggttccgccaacttggacggcatccaccgatccagccgacatcgcgaccaccgcgttgtcattgacaagaacatcgtcggcggacccaccggcgatcgagatcgatgaatcatggttggcaatgatgtcatcgccaatagcgccgctcgaaatcgcgatccgtgagatgtcgttggcgacgacggagtcggcggtctggccgcccgccattgcgacgatcgacgtatcgaacacggcgatgctctgggaactattagagctgacgggttggttcgttaccgggtcgaggaagagcgtgccgtcgagattgagttggtagccaacctgcgacccgctattgaccacgaggctaggcgcaccgccgacgccgtcacgcacttcgatgtcatcaatcggttgcgtgatgaggttctgggttccgttgtcgaatatggtcgtgccacgagccgaagggacggctgtgttcagaccaataatggtgagcacgaaacccgcaagagcggagttgcgaagacgcttgttgccgatcattagcgctacctcttatcgcgttggtgctttcgttagttgatcccgcatcggtctaatctctatggaccgcgtcgcgtttcatcgtcgcttagagtgcttagtaggagcctgcagcgactccactagtacgctcccccttcaactacatttccgtcattgcgggcgccgaggttctcgtacaactgatcgtcgatatcgtcccgcagaaaatgcaccgatccgtcacagaaggcgaagaacgcgccgccggcgtgccagctgaaggcgcaatcgtcatcgaggacagcgccgtcggtgccgtcggtgatatccactcctggacgggtgccgtagaagaacttatcgacggactttggtgagacgccgcagttgatgggagccgagcctctccccttcccgccgttatcgcgaccgcttcggggcgctgtcttgaagatggtattttcgtcactcgacaccccgcccatccagatgggccagtcggagttcttctcgccgactcccgcagaaaaatcacggttgtagtaggccgattccccgatcaggatcgtctgactcaatccgtccgtgatgttcgcgggcttgatggtgataggcgagacggtagctggtgacgtgtcggggtcctttccgagaaagcggattctcgcccggatgttgtcacagatatgaaagaagatgccatcgtcccccgtaccccccgaccccttgtaatcggaggtggcgtacccgttggtttcttcgggatggcattcggtggcgtgatcgggcaactgtgatgaagggcaccgataagtaggtaagacgtaatcccccccccgccaaacctcttctccaatcagtatgggccccgcctgcagcatgtttgggaacggccagttgttcttgatctgctccggatcgattccggtgctgtcaaaaactcgatcgtagagagcctgctcctctaggtatgggagcgtgtaagggatccatcccatacctctgtcgcagaatcccgttgaaggtccaccgttctccgccgcttcctcaccgggcacaacacggccatattggggattaccgccccgaaccccgatggggtactcatcggccacatcgacgtagttaatcaccgccagcgcgtcgttcttcaagttgctctggcactggctcctacgcgccgcctccctagcggattgaacagccggtagaagcaaggcgacgaggatgccgatgatcgcaatgacgaccagcaactcaacgagagtgaagcctcggtgattccaacgtgattggctttccattagcattacctcatcgactccgtgccggggtgggaacaactcaggcgcctagcgttcgacggcgcaacgacgatgcgatgacggcggcgagggctgcaacccagaggccactgggctctgggatcgaagcggctacaggtgcagcagccgcaggcgaagcgacggcgccatagttacttgcccaggtgtcgtagcccgcttgcgtgctgtcgggagacccaccgtcacgccagaccgtgtagtcggcggcgtcgacacgaccgtcgttgttatagtcgccgggtagcgaggcgatcgtcgacggcgcgaacaggactccgccgactagagttcctagccccgggacgtggtactccaaggcgaggtccgtctcgtcctctagcaaggtgaggtcgattggagagccgatcgacagcgaaccgccgttgggagacaaaaaggtcgagctgagtaggttgccttccgccaaccgattggcggcgccggcagccttgcgccaagcagggttcgagtcttgcagcggctcccaaccagttgggctcaggactcccgcggatgagcggatcaggtaggcgtcgagatcaacaccgaactccgactgattctcgagagtcgcctcccccgtggcggggtcaacgacgagcactacggtgttgcggacgctgaactcgacatcgccggtgaaggagccgaggccagggacactgtaggtaaagtcgaactctggttcggcttcgccgatcgacgcgggctcgatgggaatgtatggcgatccgatcgaaagcgaggcccctggttgtatcgatgtggaccccagcagattggtgtcgccgaggcgattcgctgccgcgggcccgtcgaaccatccggaaaccccttgctcgtcgaggctgttccaagcggacggatcgaagacggtcgatcctgcccgtaggaggtagccatcgacatcgatcggggcgttcgaatcgttgcgtagtgatgcagcgccggttcgaggattgacaacgatggaaagatcttcgtccgcgaaagtcggactgagagcggtggcgataacggcccaggccgccagcgccgtagaaactcgagtacgcatggtgtgagatcctgtggctgatcttgaaggaaatgctggcttcagtcgggtaagtaacagaagcatccgtcggccgcacacgagcggtcgcggatcagcgacgacgccaagcgccgccgatcaggccacagcaggaaagcaagaacagcgaagacggctcggggacaatggcggccatcgcgtaggcgaaagcgcccgtgccgtttacgatgtcgtactcattcttgaagatcgcgaagtcgttcaagtcaacgtcgcggtcgaagtcgaggtcgccggtcgaaccggtcgagatcgggccgtcgagttcgatggccaagttgtcgaggagggtttgatagtcgtcgaggtcgacgtcgccatcaaagtcgaggtcgccgcggccaccggggctcgcaaagatgacggtcaatgctggacgcagcagagtagcgtcgatcaattcaccatttacatcgacggtaccttcaccaccgttagtgaagtcgctggtgaggaagtcccagccgttgccggtgttgttgttgatcgaccagccgaagttgggcgcgccgttgacgagccagtcggtgacggccgccgttgcgtcgaagcggtagaaagactgggcaatagcgtcttgaaatgggaggccggacgcaagaagttccccgaggacgtcgctggaatcgtttgacgtgttgttgagaggatcgatgtcgggcgtcgcgacgacgaagtcgggcgtcgcagcggcctcagtaccatcctccttgatcgggtccccatcgaggaatccgccctggtccgggatcaagtcgccgccgagcgacgcccacgtgtcgtcctcctgccagaagtcgccggaggttgaatccacgctgacgatgcgattgaaattgatgacagcatttgaatcggtgttgctagtcacccagagactcagctcagcaaagaccaactcgaactgcccgctggcgacttgatcaggcaccaaaccgccctggctcaccaggaggttctcgaagcgaatcgcgccttgtgtttggaatccgccatcgaagtcgtcgatcgatatgccttcgttggcgctttgctcggttgtcgggttggctgcgcggaactcggtgtcgatggtcccgtcgtagatgccgccccccggtagttccgagacaccgtcacggaacgtgaccgcttggccatgaacggccgaggtcgcactgcatccgatagcaatcaaagccagtcttcggatcacggcaaactccttcttgaatgatgtcttttcgcagggtgggctaaccaactactgcggcgggcgccgcgcttggggtgcgacgttcagacgccgcgtcagatgcgggtgttgtaaacgggcgccagccgtttaccacctctgacttgaaacattcacggtctcttcaactggtctgcacaatcgattgatttgcgtaactctgcaggtgggcgccgggtgttaagttacgatgtggaatgcgcggaagagcaagaggaccgccttgtaagggaagtgtgaagagttcggacggacaacatcctcttgagaaacctgcatggaagaagccctgtcgcttcgattgaaagatgctttaccaattggaggatctctggcagacttcgcgcgtcggacatctctgtcatcgtcgatcctctgaccggaacgctcacgtccaatggcaatgaaccactcccttgcattcgcttggctgtcgctagccgccctggcttcgacgagtgactcttgggcccaggaagtcacccgcggcccttatttgcaactcgcgacgcctcgctcggtggtggtcgtcttgagaaccaaccaggccattgatccagttgtccgatacggaacgtcccgtgaggacctttcgcatagcacgcactcggatgcagtgacggtgcgtctgtctgccgatgtcgcagccactagcgacgccccctatggatcgattcccgttctctacgacgagccggatgcgtacgccggagaccgcaagctgtgggaccgcaacccttcgactcctgaggggacttggcagtacgaggcaaaggtcgccggattgaagccggcaacgaagtactggtatgccgtctacgatggagaccgcctcttggctggcggcgacggcgaccacaccttcacgacgccgccctcgccctcagccccggctgacttacggctttgggtcgttggagattcgggcaccggcgggcccgaccaaaagcgggtttacgaggcgatgcaggactttgccgcgacgaccggccgaacgcccgacgccttcctgcacgtgggcgacatggcgtatggcgacggcgccgatgtcgagttccaacggcatttcttcgacgtctaccagcccactctctgcaacaccgtctgctggccggcgatgggtaatcacgaagggcatacgtcccggggcctctcccagtttggcccctactacgacgcttacgtcctgccgaccgccggcgaggcgggtggactggcttccggcagcgaggcctactacgccttcgatttcggacgcgtgcattttatctgtctcgactcacacgacctcgaccgctcccccgatggcgccatggctcgttggcttgaagccgatttggaggagaacgactcggactggctgatcgcgttctggcatcacccgccctacaccaaggggtcgcacgacagcgaccacgaaacggcattggtggagatgcgcgagcacatcatgccgctcttggaggcgcacggcgtcgatgtggtcct

SEQ ID NO: 326 - DNA, 23099 bp, synthetic construct
  misc_feature 1..23099: note = Synthetic
  source 1..23099: mol_type = other DNA
tcgcgagcatttcaccgtctgcatcgtgggctataccaacgccggcaagagcacgctgttcaacacgctgaccgcggccggcgcgtatgccgatgacaagctgttcgcgacgctggacaccagaacccgcgcctggaggctggagcgggggatcgaggtgatgctcagcgacacggtgggtttcgtgcgggatctgccgcataacctggtggcctcgttcaaggccacgctggaggaggcggtccacgcggatctgctgctgcacgtgctggacgtgggacacccgcaggcccagcagcagttcgaggccgtgcacaaggtgctggaggagatcggcgccaagggcaagccccacctgctgctgctgaacaagaccgacacgcccgagggccaggccgcctggccggcgtggcgcacgctccatccccaggccattgcgctcagcgcccgcaccggagtcggcacggaccggctcaccgaagcggtggcgggcatcgtgcgcggccagcaggtcgaggcgacgctggaggcggacgtgaccaacggccggctgatcgcgtatatcgaggccagcaccgatgtgcgggatcgccagttcgtggacagccgggtgcggattcgcgccgtgatgggcaagcggacactggccgaactgtcgcgcaacggacaggtggaggtgacgagggtgggggcgccgcggtagccgtgctgtcatcgcccattgagaacaggagcggggtgggacgcgccgattgcggatgacgcattgcggcggaaagcctgcccgtcaaccatcccgaatcaatcgctgctggcggcccgcgcgcccccgcggcgcctgggcctcttgccgcagaagtccaccagccgggcgatctgatccctcaactggctgcgcggcacgacaaagtcgatgaatccgtgctcctggaggaactcgctgcgctggaagccctcgggcagcttgacgcggatcgtctgctcgatggtccgcgggccggcaaatccgatcagcgccttgggctcggcgatgatgaagtcgcccagcatcgcgaagctggccgtcacgccccccgtggtggggtccgtcaggaggctgatgaacagcccgccggcatcgtcgagcctcgccagggctgcggcggtcttggccatctgcatcagcgacagcgtgctctcctgcatgcgcgcgcccccgctggccgagacgatcagcaggggcagcttttcgtccacggcggcctcgatggtgcgggtgatcttctcgcccacgaccgagcccatcgaccccatcatgaatgtcgggtccatgaccgcgagcatcatttcccgccccttgatgtgtccccggccgcagcgcacggcgtcgccgctgcccgagcgagcctgttcctcgcgaagtcgctgggcatagggcttgcgatcggtgaaacccagcgggtcggtcggcaggatctcggtaaaccgctcctcgaaggcgcctttgtcgcagagctggcggatgcgcgtttcggcattgatgcggaagtggtactggcactccgggcacacgtcgaggttttcctcgacattccggttgaagagcatcctttcgcagtccgggcagcgccgccacagaccctccgggactccctcgcccttgcgcaccgcagcgccgtcctgacctggtatctgcgacatagaaaccctcgcaaccgatccgaatcgcaggcatgttcgccgtgaagcggcggcaatgcaagcctccgaccgtgcttgacaccgccccaggagcccgtagcatcgccgtccccttacggaaggacccattatggccggaaaaacagttgccgatatcgatgtccgcggcaggcgcgtcctcatgcgcgtggacttcaacgtgcccatcgagggcggaaagatcaccgacgaccgccgcatctcgcaggctttgccgacgatccggaacatcatcgatcgcggcgggaggttgatcctcatgtcgcacctgggccggcccaagggcggcccggagcccaaatactcgttgcggcccgtggcccagcgccttggcgagttgctgggcaagccggtgaagtttgcctccgactgcatcggcctggaggcccggcagctggtcaacggcctgaaggacggcgaggtgctgctgctggagaacctgcgattccacaaggaagaggaaaagaacgaccccaacttcgcaaagcagctggcggcctacggcgacatctacatcaacgacgcgttcgggaccgcccaccgcgagcatgccagcacgttcggcgcggcccaggcgctggcgggcaagccgcgggccatcggcttcctgatccagaaggaactcaagttcctgggcgatgccatcgcgtcgccgcggcggccgttcgtggccatcctgggcggtgccaaggtctccgacaagatcaaggtcatcgaggccctgcttcgcaagtgcgatctgctcctgatcggcggcgcgatggcctacaccttcttcctggcccagggcaagagcgtcggaaagagcctggtcgagccggaccaggtggaactggccggctcgctgctggcccaggccggcgcccggctgcgattgcccgtcgataccgtcgtggccgacagcatcgactcgacggcgacgcaggtggtggacggcggcgacatcccggccgacaaggccggctttgacatcggccccaagacccgcgaggcctaccgggcggagattctcagggccaagacgatcgtgtggaacggcccgatgggcgtgttcgagaagccgcagttcgcggccggcaccagggcgatcgccgaggccgtcgccgaagcgacccagaagagcggcgcgacgtcgatcatcggcggcggcgacagtgcggccgccatcgagcagatgggcctgggcgaaaaggtcagccacgtgagcaccggcggcggggcgagcctggagttcctggagaaggggcacttcagcacgctggatatactggattagctgcacagccaaggagcgacaaagcgacggcgcgacgaagggaagatggactttctatcgtcgccccctctcgtctggtcaccttcccttgtagttcagcaccgggcgcagggcgcggatgaccttcaccagctcgtgctgcgcccgcagcaccgcgccgatgtccttgtacgcgtccggcgcttcctctcgcagggcgcgggccatgcggtagtcgtaccagacgccctgcatctgccggtgcacgtcgcgctggctgatgcgctggcgggcggcttcgcggctgagggcccggccggcgccggatcacgccagggcgccaatgccatctcggcattcgacctcgtggccatgccctgactcccggtgcaaggcaacttgcgggctcacaaccattctggacgatagctgaatactggccatggtatcgaatccgtttgccatcaccacgccgctgcttgtgccgtcgatcctgtcggccgatttctcgcaactggccgcggagatcgccgacgtggaccacggcggggcggatttcctgcacctggatgtgatggatgggcactttgtccccaacatctcgtttggcccgccggtgatcgagtcgattcggccggtgacgcgggcgtatttcgacgcgcacctgatgatcgccgagccgctgcggtatgcgccggccatcgtgaaggccggggcgcagaacatcacgttccatgtcgagacggtcgccgatccatccgccgccgcgaaggaaatccgcaaactcggatgccatgtcggcatcacgctcaaccccgcgacgcccatcgaggcgatctacccggcgctggaccacgtcgatctcgtgctgatcatgagcgtcgtccccgggttcagcggccagcagttcatgccccaggttctgcccaaggttcgcgagatgcgcaagcgcctggccgctcaccagcggcttgagatcgacggcgggatcaacctggagacaatcggcgcggcacgggacgcgggcgtggactggttcgtggtggccagcgcgatcttcggcgccccggaccggtcggccgccatcgccgccttgcgggcggcgttggccggccactagccgccccccccccgcgtccgatggaaaaaaatagcggaggaggagggattcgaacccccgagaccctcgcgggcctaccggttttcaagaccggcccgttcaaccgctccggcactcctccgaggttgcgcttgaccatagcgagggcggcagaggcggtcaaacgtcggctggccggcctttgacgcggcctgtcgggacgcatagtgtgccggtgtcatgaccgccatcgccgaggctcctgctgccaagccgcccgatcacaaccgcacgggcatcgactaccgcaagccgatgccccggccgccggtgaagggcattgtcatcgattttcacgtgcatctgcacgctcgccggcatgggccggcgtggtttgcggcggcgcggcattacggcatcgacgcgtatgtctcgatgacgccgctggaagaggccctgggcctgcaacgcgactaccccgggcggatccacttcatcgtgattcccaactggcgtgagaccgatggcgatctgatcgacggctggctgcggcggttggaggcgttctacaacatcggcagccgcatcgccaagttctggtcggccccgccggcgatcggcgagcgaggctggcggatcgattcgccgcgattcgttccgctgtttcgcgagatcgccgcccgcggcatgggcatcatgacgcacattggcgacccggagatctggtatcgcacgaaatacgccgactcggccaagtacggcacgcgccaagagcactaccgcatcctggagaacgtcctgggcgagtatcgcgtgccgtgggcgggggcgcacctctgcgggcatcccgaggacctgcaccacctgcaggacctgctggaccgccacccgaacctgagcatggactgttcggccacgcggtggatggtgcgggagatcagcgcgcgccgcgatgaagccagggagtttttcatccgcaaccaggaccgcctcatcttcggcaccgaccaggtcagcagcgaccagcgcggattcgattttcaggccagccgcatctggtgccaccgcaagatgtgggaaacggcctacgtcggaaccacgccgatcttcgacccggacctgccggaggaccggcagccgacgctacgcggcctggcgttgccgacccaggtgctgcagaagctgtatcacgacaacgcggtgcggttcctggagatggtgggggccgaaccgtttcgcgctgcagacagcgaaccgggaatctgacaccggagatggcagatcccctgggccgagattccagacccgcaaagcaggcccgcgtcattccgacaactgcgtcttgacgggatacaccttcccatccttcacgagatggacctgctccacgcggacggtggcgttgtcgcgggggaagtgctggccgcggtcgttgtagagcatcgtgaagtcgatgcgcttgaggatgcccttttccatccggggcaggaagcacacgtactggcgattcacccagacttccacgttgctccagtcttcgttggacaaattgacgatcgacagccgcttgaggccgtagccgacctccgcgcgggcgggagcctcatgggccgaccccaccggccgggtggtgctgaatgggcctcgcttggcggcgtcggccgcaaactcggtatccttcttgcgcagctcccggtcggggttggcgcatccgccctgcattgccaggatcgagacggccagcgtgcacaaggcaacggacatggtgcgcatgggtttctccggttgacgggcagacgcaggccgcccacattcgttatcggacacccggcgcggttatgattagccccgatgcgccgtccggcccgctcgcatggccggcgccagggtaccacggagacgcaaccatcatggaaaacgatcacctggccggcttttcggccgacgttctttcgacggtcgcccggcaggcacttacggcgggagatgcctccacctatcgggaactgctcgtgcgcggacccggccgcagggacagcggcagactgctgatcgacgtgcagccgcggcaactgctgttgcgtccgcccgctcgcgaggagtatgcccgcgcgatgctggccgggctctggttgtggcatgactggctggaggagtcgcaccgcatatcccagtccatccagacggccacgggcagtttctggcacgccatcatgcaccgccgcgagggggactttgccaacagcaagtactggtacgcgcggtgcgaaggccacgagatcgtggacagcctggcggcctacgccgggtccatcgtcaacaacctgccggccgacaagggcctgctgaggctggtccgcaccggctgggatgcccaggtgttcgtcgatctggtggaggaggtctccgttcgggcagaggatccgcggctggcttcactggtggagcttcaacgcgtggagtggcggctgctgttcgagtactgcgtgcgcaaggcggccgagtagccgatgcgcccagacgtccgccgcgggccggcctatttcttcaaaaagttggcaagaagtctttctccctgttccgtcaggaagctctccgggtggaactgcaccccctccagcggccaggatttgtggcggatgcccatgatctcgtcttggtcggtccagctggtgaccacaaaatcgtccgggagcgtgccgttgcggatgatcagcgagtggtagcgcgtggcggtgaacgggttgggcatgccctcgtagatggacttgccgtcgtggaagatccggtcggtcttgccgtgcatgagccggccggctcgctcgacgatcgcgccgctgacatatccgatgcactggtgtcccaggcacactcccagcagcggcacctttggtgcgaagtggcggatgatgtcgttggatatgccgccctccctgggcgtgcaaggccccggagagatcacgatgtgggtggggcgcagctgctcgacctgctcgacggtcaccttgtcgttgcggaagacgcggatcggccgcgacgggtcgatctcccccagcctctgcacgagattgtaggtgaacgagtcgtagttgtcgatcagcacgatcatgcggcggtgaaggtaggaccggcaggaagaaaaggcaactgcgcaggggcaaagcgacgaagcgacgcagcgaccaggggtctgcatcgtgcggcttgtcttttgcggcccgccccgtaacctcaccgtccatgcttgccgaggcggccttcgactcgccgttgttctgggcgctgttcatcggctggatcctcaccgtcgtgctgcacgagttcgcccacggcgtcgtggcgctgtggggcggcgactggaccatccgccagcgcggcggcctgacgctcaatcccctgcaatacgtggaccccgtgaccagcatcatcatgccggccatcttcctggccatgggcggcgtgcctctgccgggcggcagcacctacatccgccgcgacctgctccgcagccgggcgtgggaaaccgccgtgtcggcggccgggccggccatgaacctgctgatcttcctcctgtgtgcgttggcgctgcatcccgccgtggggtgggtcggccccggcacccccgccacgcagtggaccgcgccgcagctattcgtgggcgccctggccgtgttgcaggtattggcggcgctgctgaacctgatgcccgtgcccccactggacgggttccagatgatcgcgccctacctgaacggcgacctccgcgaaaagctcaccactccgcccctggccacgttccttttcctgggctactttgtcgtgttgtggaaagtcccgcaggtgttcgggttcttcattcgcgtgctgctggccatgttgggcgtgctgggctacgacccgctgcagcaatggcagttcgtgcgggccttcgacatcgccctttggggcggcgggtgagtggacagccggctttgttccaacacccgtcccgcacggggggtataggttcctggaagggccttgcgaagcggcggcttgagcctgctggatcgccggtctatagtcggcgcggtatcgggagaaccatatggtcgatgacgtccgccaggaccagttcgtcctgatcagggtcgaggggatgcactgccacaggtgccagcaggccatccagcaggccctgcacgactgtccgggcgtgttcgaggcggaggtggatttcaacagccggcaggcgtcggtcctctacgacccctcgctgatctccgtccgcgaactgatgaacacgatcaaccaggccggctatcgcgccaccggcttctcccagggccagcgacacccctagcgccgcccgcggcgcaaccaaagccccttcaatgctccttccactccaccaatccgccgtcgatgttgagttggaccagatccacccactggtcgtcatcggggtaatgcagacgggcgcggatggcgtccaggcgtgcctcgatcgcgcgcagttcgctggccgcctcgcggctgagcggctcgttcccctggtcggcgtgcatcagcagtgaccattggccgtagtagggcgcgtagggggcaaaggcttccgacggctgaaactgcccgaatccccaagagttctcccagcggcgggtggtgatacagccgacgtccttgccgtccaggtacagccgtgcctttgctccgacgcggcgcatgcttacattgtaccagattctttccggaggtgcctgtccatgcaaacggccgctaacctggccctgctgctggttctcatccccactcgcacctggtatccgccgtcgatgccgcccaccgtccgcgtggagggccaggggcagatggtcttgctgctcaacgagttcaccggccggcccatcgagacgacccgccccgtaaccgcgtcggccggcatggaggtgaacctgctggagcactttcccgccctggcctcgcccggcacctacatccttcgagccgcgccggccgacggcaaagggcccggcttcctcggcacgccgctgatcgtttcggtccgccgcgaccgccgcctcaacgctccccccggcgcgatggtgaccaaggtccagcccctccagtacgtccgcctggacaccgaccgcggcccgctcgacctggccctgttctatgactcggcgccgcacaccgtggacaacttcctgctgttgtgccgcgagggtttctacgacggcctggccttccaccgcatcatcccgggcttcgtcatccaggccggcgaccccaccaacaccggcaccggcgggccgggctatcgcctggaggccgagttcaacgaccacaaacacgaacccggcgtcgtgtccatggcccgcagcgtggacccggccgaagccagcggcgtcatgccccgcgccgagtacgccgactcggccggcagccagttcttcatctgcctggaacgcctggagcgcctcgatcgccgttacacggccttcgcaaaggtcacacgcggaatggaagtggtgaacgccatcgccgcctgcgcccccgccacccagccggccgacgggccgcgcaagacgccgatcatccgcaaagcccaagtccggccggtgacgatcgacgacaacccctacgccgccctcgccccgcttccggccaaggaataacgggccatcggcacacgcctccccccggaagcacaaggcacccagggcaaccggcttggctccggccgccgcctgccccgcggcatggcaaaaaaagggatgcccttgtcttgcgacagtggcatccgggtgctccgtagagcagggcctgcgaatctttcctcttgttgcgaaaagactgcagagccggggtcggttacactgttgacaattgtgcgcatttcgtgtcggttgtcaagtacttcattcacgaaaggggcgtgaaaaatgccggatctgacactgggcctggatctcggggccaactccatcggctgggcgttgatcgacgaaaccggccagcggctggtcgccacgggagtgcgcgtctttcccgaaggcgtggacaactacgacacgggcaaggaagcccccaagatgcaggaacgtcgcatcaagcgggccatgcgccggctgatcatgcgccgcgccgcccgtcgccgcgcgctgcggcggctgctggccgacgccggcctctgccaggccgacgatccccgcctctggaccgaagacccctatgagctgcggcgcaggggcctggacgaaccgctcaccggcgttcagttcgcccgcgtgctgatccacctggctcagcggcggggcttcaagtccaaccgcaagaccgaccgggcccgcgaggcggatgacaagggcgttctgggcgagatcaattgggtccagcagcagattgccgtcagcggcagccggacgctgggggagatgctcgccaaggttcgcgccggcgagtggcactctccggacgccgtcaagctccacacccgtgtgcgagcgattcacacccgccgcgagatgttcctccacgagttcgacatgctctgggagcgacagaagtccttcaactcgccgctgtcggcgcttttgaccgacgagctgaaactccgcctcaacaaccccgccaaggatgacaaatggatgcacaagggcatcctcttcgggcagcgcaagctctactggcccaaggaggtcgtcggccgctgcgaactggaaccgcggcttgcccgctgcccgcgggccgaccgcctcgcccagcgattccgccttctccaggaggtcaacaacctccgctactacgaccccgacgcccgcgaggaacgcaccctcacccaggagcagcgcgccctgcttctggacaagctctcccgcaccgccacgatggacttcgacgccatccgcaaggccctggggttcatcgattccatcaggttcaacctggagcgcggccagcgccccgccctcaagggcctgcccgtcgatgccgcgctggcctgcaaggagattttcggccggcgctggcacgagttttccgagcagcagaaggaccagatcgtccgcacgctgatcgacgaatccgacgaggacctgcgccgcatcgccgtcgagcagtggggcctgtcgccccaggccgccgaaaaactcctgaccgtggaattgcccgacggctatgccgccctgagccgccaggccctggagaaactcctgccccacatggagcgtggcctgctgtacatgaccgccgacggcaccccctgcgccctgagcgaggccggctatcttcgtcccgaccagcgcccgcgcaagaccctgccgtttctccccgcgccgccggaggtggccaatcccgtcgtgcgccaggccctccacgaagtccgcaaactcgtcaacgccatcatccgccagtacggcaaacccgcccgtatccgcgtcgaactggcccgcgaggcggcgctgtccgccgaccagcgtcgcaaggcctccaagcgacgacaggagaatgaagacgagcgcaaccgcgccgccgacacgatccgccaggccggcgggaccgtcagccgcgacgccatcgagcgcgtgctcctgtggcaagagcaggacggcgcctgcatctacagcggccggcccatcagcctcgcccagctcctgggcggcgaggtcgatatcgaccacatcctgccccgctcgcgatgcctggacaactcccgccagaacaaggtcgtggccttccgcgacatgaaccgcgaaaaaggcaaccgcacgccccgcgagtggctggaggccgacccggcccgctacgaccaggtcctgcaacgggcctcgcgcctcagctacgccaagcgccgacgcttcatccagaaggaactggacctggaccagttcgtccagcgccagctcaacgacacccgccatctctcgcgggtcgtccgccagtacctggactgcctcgtcgagcagccccaccacatcctctgccccaagggctcgcacaccgccgaactccgccgccactggggcctggacaccatcctccagagcctgcccgacagccccgcctggcaggccgccgacgacctgcagcccggcgagaagaaccgcgccgaccaccgccaccacgccatcgacgccgtcgtcctggccctcaccgaccacaaacgccttcagcaattggcccgcatccagcgccagggcggcacccgcgccaccggccaggtcctccccgagccctggcccggcttccgtgacgccgtcctccaggccgtgcagtccatcaacgtctcccatcgcgtccagcgccgcgtcgccggcgccctgcatgaggagaccatctacggcccggtcttccagcgccgcctcggcctgggcatcgtgcaaaagcccggcgagttcgtcttccgaaagcccctggagtcgctttccgcccccgaaatcgagcacatccgcgacaagaccatccgccagatcgtcatcgaccgcctgaaggaaaggaacgtggccttcggccgcggcgccaagaaaaagaccatcccctcgagcgtctggaacccgccgctggccatgccctcgggcgtgcccatccgcaaggtgcgccttctcaagtacgaccagaccatccagcccatccgcaacggcaccgcctacgtcaagaccggctccatccaccacctgtgcatcttccagttcaccgaaaacggcaaacgcaaacgcgaggcggtgttcgtctccatgctcgaggccgcccagcgcatccgcctccgccagcccatcatccagcgcacccaccccacccgccccaacgccaccttcgtcatgtccctcagccgcggcgaaatggtcctcggaaccttcaagggaaaactgcgcctcgtgaaactcaagaccgccgtatcgaccgagcaaaagattcagttcgttgaacacaccgacgcgcgccgcggcaaccttgcccaaatcatttctgtcacgcctaacaccctcaagggcgaaaaggttaccgtggaccttctcggccggatccgcagagcccatgattaagcgcaccatcgagatttccggcggaccgaccttcctgtccatcgaactggaccagctggtcctccgccgccagggaacggagatcggccgcgtgccctgcgaggacatcggcctgctgatcgccgaaaaccactccaccaccttcacgcaggccgtcttcacccgcctgctggaagccggggccgccgtcgtgctgtgcggcccggatcaccttccggcgggcatgttcctgcccttcgccggcaactcgctgatcgcccagcggatggccgcgcaggcggcctgtccgctgccccgccgcaagcgtctgtggcgtcagatcatccgccacaagatcgccgcccaggccgccaaccttcccgccgaccatccggcccgccaggcgctgatggacctggccggccgcgtccgcagcggcgaccgcgagaacgccgagggccaggccgcccgcatctactggccggccctcctggggcaggactttcgccgcgaccccgacggtctgccgcccaacaacctgctgaactacggctacaccgtgctgcgcgccgccgtggcccgggcgctgtgcgccgcggggctccagccggccctggggctgcaccaccgccaccgcgccaatccgttctgcctggccgacgatctgctggaggtgctgcggccgatggtggatggggcggtggtggaactgtatcgcgccgaccgcctggtgctggaccgcgacaccaaggcggtgctgctggggctgctgacgcggacggttacggtgggggggcaggccgggccgctgatggtcggcctgcaccgcatggccgcttcgctggtccgagtatatcagggcgctcaagagcgtctggaccttcccgaactatagaacagacgggcctcgccgggcggagggctctcaggtgcaactgagcgcttaccgtttcatgtgggtggtggcgatgttcgatctgccggtggacacgaaggcggcgcggcgggaatacgcccgctttcgcaagttcctgctcaaggacgggttcacgcggatgcagtactcggtgtacgcccgctacgccttcagcgaggaaagcgcccaggtgcacatccagcgagtgggcggggccgtgccgcccgacggagaagtgcgcctgctgacgatcaccgacaaacagttcgagcggatgcggattttctggggaaaaatccgcaaaccgcctccacccgcgcccgggcaactcacgcttttctgaggcgcgggtggaggctaagtgccgctgccgggggcccttacggccgggaatagtgtaaccgaccccggcctgcgagcaatccgcaacgatagtgttcggctacatcgagggcgagcgagtgtaaccgaccccggcctgcgagcaatccgcaacggtcgccacgtggcccagtacagccgcaaagtgtaaccgaccccggcctgcgagcaatccgcaacaaccctgttcggacgcgcggcatccggtgcagtgtaaccgaccccggcctgcgagcaatccgcaactgatggggcgcctagcgcatgggtggaaattagtgtaaccgaccccggcctgcgagcaatccgcaacccgcgggacatcagtccatgacgcaggacgagtgtaaccgaccccggcctgcgagcaatccgcaaccagatgggggtcgcccgccagcagttcggcagtgtaaccgaccccggcctgcgagcaatccgcaacctgagggagctggctggatacgggctggaagtgtaaccgaccccggcctgcgagcaatccgcaacaaggaagcggtgcagtacgcacgcgacgcgagtgtaaccgaccccggcctgcgagcaatccgcaacgtaagggcggagatcctccgcgagcaggcagtgtaaccgaccccggcctgcgagcaatccgcaacaaagtggggggagcgtctgggtcgtgatgagtgtaaccgaccccggcctgcgagcaatccgcaacaatttgcaccagactgggtcgtcgcagactagtgtaaccgaccccggcctgcgagcaatccgcaacactcatgactgccggatggagacacctcctagtgtaaccgaccccggcctgcgagcaatccgcaacaatctcctgcctcggccggccccagccccgagtgtaaccgaccccggcctgcgagcaatccgcaacgccttcggccgcgggatttatcgctggaggagtgtaaccgaccccggcctgcgagcaatccgcaactgcgagagccggcagcagccagttccccaagtgtaaccgaccccggcctgcgagcaatccgcaacggtcgtcgaggcgattccctcgagccttgaagtgtaaccgaccccggcctgcgagcaatccgcaactcgcaatggtccgaaggttccgttgcctcgagtgtaaccgaccccggcctgcgagcaatccgcaacccggcaggcgacggactggacgagctttgtagtgtaaccgaccccggcctgcgagcaatccgcaacgagacggccggtgaggatgtcagccacatagtgtaaccgaccccggcctgcgagcaatccgcaaccctccgcagtgcgaacgcacacgacaacgaagtgtaaccgaccccggcctgcgagcaatccgcaacgtgaaaccgcacggaccgcggaggcggagccgacgcgggacgggcggttcgccgccgccacgcccctttccccgacgtcgccgtcacgctccgcgattatcgggccggtgcgcgcggcacagggtccgcatcttcgcgcaactcggctcgattcccgccgcagcaacgctctggcgatgtgccggccgagcaggatgtttcgtatatctgtgcagaggccgacggtcggccgaactggagccatgatgacccatcaggagttcgtcgatcatcacgccctggggctggtggatatcgaggtggacgaggcacgcgcggtggaactgctggccacgcaggcggttccgctcggccagcggctgatcacctggacgtggggggtgctgtgcgtggcgtgcttcccgggcgcgctgctgtgttgggcgctgaaggtgtggtgggccagcctggtgctggtggcggcgggggtggccattcccctggcgctgcgccggtcggccaccgaccggctgatcgcgcgggccctggaggacccggtgttctacgaactggcccagcaactgtacgtgatgcaggtcaacgagcggaccgagccggcacgggtttcgacgggccgctgatccgcttggcggccacgacaagaaaagcactctccgggaacttctcctcgtctgccgcttctaagcaggcagcgaggtgaagccatgttgacactccagcggcttttcgcggccgtcgcggcggttcttctcctggcgctcctgccgacgcccggtcgagccgacgggttcatcgtcatccacaacgccccgccctcggtggggcactttcgttttgcaccgctggaggtgagctaccaccgcgtcgaggtgaagatcgacgaccaggtggccgtcacctcgatcgaccaggagtttgtcaaccccaactcggttcgcatggaggggacttacctgttcccgctgccgccggggtcccacatcgacaggttccagatggacatcaacggcacgatgcaggaggccgagcttctgccggccgacaaggcccgctcgctctacgaggagatcgtccgcaagtaccaggacccggccctgctggagtacgtgggccgcgacgcgttcaaggtgcgcatatttcccatcgagcccaacagccgcaagcgcatcaagctgcaatacacgcagctgctgcgcaccgacacggggctgaccgaatacgtctatccgctgaacaccgagaagttcagcgccaggccgctcaaggaggtgtcgatcaaggtgacgctggccggcgcccagccgctgcggagcatctacagccccagccacaacgtgcagatcaagcgcgacggcgaccgccgggcgaccatcggattcgaggaaaaggacatccgccccgacaccgacttcaggctgatctggtcaaagagcgagtcggaggtgggcatcagcctgctgagctaccgcaccggcagcgacgacgggtatttcctgctgctggcgacgccgggcgtggaaagcactccgggacaggtccagctcaaggacatcgcgttcgtgctggacaccagcggctcgatggccggggccaagctggagcaggccaggaaagccctggccttctgcctggccaacctgaacgagggcgatcgcttcgagatcgtgcggttcagcaccgaggccgagccgctgttcaacgagctgaagcccgccagccaggagaacctcgacaaggcccggcagttcgtgaagggattgaaacccatcggcggcacggccatcgacgacgcgctggccaaggcgctgaagatcggcgcggatcggtccgacaaggccgagcggccgtatatggtggtgttcctcaccgacggccagccgaccatcggccagacccaggaagacccgatcgtggcgagcgtcagcaggaacgtggccaacacgcggatcttctcgttcggcatcggcacggatgtgaacacgcacctgctggaccggatcgccgaagcgaccaagtcgttcagccagtacgtgctgccggatgaggatatcgagatcaagctgagcaacttctacaccaagatcaaggagccggtgctgtccaacgtggagttcgcggtgacgagcccggacgtgcgaatcagcaaggtctatcccaacagcatgccggacctgttccgcggcgagatgctggtggcgttcgggcgctacagcggctcgggcccggcggcggtgacgatcaccggcacgctcaacggcgccaagcggcagttttcccaggatgtggccttcacgaaggacgatgccgacaagccgttcatcgcgcggctgtgggcgacgcgccgagtgggctggctgctggatgagatccgcatgtccggcgaaagcagcgaactgaaggatgaggtggtggcgctggcccgcgagcacgggatcgtcacgccctacacctcgtacctgatcctggaggatgaggcgcggcggggcgtgccgatgccggcgcgaactctgcgcgagatggaaggcgacgcccgcgccaagggccatgccggcgcctggtacgacagctcccgaaaggattcgtccaggctggagctggccggcgagcgggccgtggccaactcgcaggtggtcagcggcctgaagtacggtgtgaacgagcagcaggcccggcagttggccgaagtgctggccaagtcggcccctgcgcctgtgagccagccgggcgtgtcggtcgcggatggcgcggccgtcaacagcgaggggtaccggttccagcgtagctacgcccagcaggtccgcgtggtcgacggccgggccttctaccagaacggcaacacgtggaccgacggcacattgcagacgaggaaggacctgaaaccgctgcagatcaagttcaacagcgacgagtacttcgcgctgctcaggaagcacccgctggcggcggcctggctggcgctgggcaacgaggtggacgtggtgatcggccagacgctctatcagatccggtgaaggcgagcggccatcagtgatgcgctgcgggaggcgccggcgccccggccgccggcgaggaagccggccgagactgcgggctgtcgcggaactgctcgacgaggatgtcggtggcctcgacttcggcccggcggttctgggcgcggccgtcgggggtataagcccgcagcatcaccggctcgaaggtcgaacacccctgcacgcggaggatttccggctcgacgccggcggagaccagataggcggcgacggcctgtgcccgctgcagcgacaggtccatggccttttgcgcgtcgtcgtcctctgggaactcctcccgcgagacgtggcccttgaccaggatgacgttgcggtggccgcggatcagttgggccacctggtccagggcggcgcgagcgtgcggctccagcgcagcgctgtggggtgcaaacagaacgcgtccgccggtgatggcgtgacggctggggcgaagcgaggtgacgtcgggatcggtgccttcggcgccgcggcgggggacgttggtgcgcccgccctgcccgggacccttgagcgggttgatgtgctccagtttcttctgcagcatgtacacgtccacggggtcctggctgtgggggtcgggcaggtatttgaaggcgtcgcggatggcggccaggacctcgatgggcagctcgctggcctgctgtccggtcttggtcccctcgggcttgagcacccagaggatcacgaacagccccatcatgcacatgatcaggtcggccagggtgaagatccactccgggcattcttcacactcgacctctttgcatttgcaggacttggacatttcgcttcaccacggaggcacggagggcacggagaagacgtctgagttcagagcacccgacgtgtgatgccctccttgagcagggggacgttgaagttgatcagcaggccgactcgcttgccgctgaggcggaggtacgtcaacaactgcgcttcgtggattggctgcgttgcatcgattgacttgagctccacaacaacggtttcgtcaaccagcaagtccatgcggtacccgcaatccagccggacgcctttgcaagtgaccggcaactcgacttcggtgcggtatcggatgcccctcagttccagttcctggcacaaacacctgcggtaggcggactcgagcaggccgggtcccagtgctttgtggacctcaatggccgccgcaatgatcgcttgcgtgagttcctcggccacaagcatattcggctccgtatctctccgtgttctccgtgtctccgtggtgaatcttccgtcctacgccgctttcggcagcgccatctgttccttggcgctcaggaagctcagcagctgcatttccaccacgcgcgggttgttgccggcctggatgctcagcacgccctggaggatgatctccttgacgaagacctcctcgcggctcttgaggcccagtttctcggccaccggcccggccatcaggttctgcagcagcgccccgtagagcgtgccggtcagggccaccgccagcgcgctgccgatgaccgccgggtcgccggccaggttgcggaacatcgccacctgcgccaccaggcacgccaccagcccgcatccggggccgaacttggcgatcatcccgaaaaagtgcttgccgtgcttgtggcgctcggccatggcctcgatctcgatccgcaggatgcgctcgatgatctccgggtcggtgccgtcgatggtcaactgcagcccgcggcggaggaacggatcgggcgcatcccgcgccaccgactccagcgccagcaccccgtcgcgtcgggccgtttcggcgtatttgaccatctccttgatcaggtgttggatgtgcgtttccttcgcgaagagcatcttcttgaaggacttcagcgcggacagcaccgaatgcagcggcatcgaggcgaacgccgcgcccagggcgcatcccccgaccagcatgatctccccgggcttgaggtaggcccccagggcgccgtgggacgtgtggtacatgccgtagatcagcgcagcccacgccagcaggtaaccgatgatggttgccagatccatagccgacccttctccatcccgcacgccggcggtggccgacgcactttccccgctgccggcgcaccaggctcgcgccggcaacactgccacgtctcctcttatgtcggcagataccgccccgacgaatcagcgattatcggccgcagcattgaccgctccgccggccgcctcctacagtcgcctgcctgcatgattctcgatagccggccgccgacgccatccagcgggtggcgggcgtcggccgggcggtcatcggcccgatcgacgatcagcagttccgcggagtaacgatcatggatcaccaatcagcggcggagacgaccgaccaagtcaggcgggaagtgggccacggcgctgcggctctggacgagcgcggcctgcccaaggactacaagttcgatccggcctgggagttgaccccccggcaggtcaaggccatgctcgacgacggccagaagttcctgttcatcgactgccggcagcccaacgaggcagaagccatgcgcatcgagggcacgcagctgattccgttgcagcagttgccggcccgcctgggccagttgcgcgggcgggaagcggaaaagatcgtggtgcattgccgcagtggcagtcgttcgctgaagtttgcgcaactgctgcgtcagattgggtttagagatgtctggagcatggccggcggcatcctcctgtggaaccgcgacatcaaccccgccgggccgcagcactgaaggtcacgcggacaacgctacgggtggcgggttggcgggggggccaggggcgtggccatccattgtggtgcgggctttagcctgacttcggcgacctcagtcgagccgcaccccgccgtgggctggggctgaagccagcaccacaacgtggcccggcggcggtccccacaagccatggccgcgccccgggcgacgatcgaaaatctttcatcgccccgcttgacagcgccgatgagcttgctacattttccgatcttccgctgcttgggccgtgcgcgcgtgtgcgcgcgggccaagggcggcggccgacgaaacggacggatatgacgggcgatcggattcgaattcggatggaagcctacgaccaccgggcgctggacgcttcggcgaaggagatcgtcgagaacgccaagcgtaccaacgcgcgggtgtgcgggcccattccgttgccgactcggatcgagcgatacaccgtgctgcgaagcccgcacatcgacaagaagtcgcgggagcaattcgagatgcggacgcacaagcgcgtcatcgacatcttcgagccgacggcgcgcacgatcgaagcgctgaatcgcctggtggtaccggccggcgtctttgtgaagatcaaggcctagtttttcgcggaaatacgcccctgcatgaaggggcgttcgtgttgaggaagcgtggggttcagccaagaacccggttgcccgcggcggccacgcgttcccaagtgagatttcgtctgccgctcgggcggcgggtgcaggaaaggtcggcgcgaggcgaggtgcggcaaccgccttttttgccgcagggaacatgataccagcattgctaggcagaaagcttgggatgacgcgcgtgtacgacccgaagggtaccgtcgtgccggtgacggtcgtgcaggccgggccgtgcgccgtcacccaggtcaagaccgtggaaaccgacggctacaacgcggtgcaactgggcttcgaggaaatcgcgccgcggcacagcaccatgcccctcatcgggcatgccgcccgggccggcgtgggtccccgcaggcacttccgcgaggtgagactcgagcagaagccccaactgactcccggaaccaccgtggacgtgagcagtttcgcggaggtcaagttcgtggatgtgatcggcaccagcaagggcaagggcttcgcgggcgtgatgaagcggcatcacttcggcggccagccggccagccacggcacggagcgcaagcaccgttcgccgggttcgatcgcgtcgcgtgcgacgatgcgtggccagtgcggcaagcccaagaagggcctgcgcatgggcgggcacatgggcatggaccgcgtgacgacccgcaatcacgccctggtgcagatcgacaaggataacaacctcctgctgatcaagggagccctgcccggaccgaacggcgggctccttttcgttcgcaagagcgtcacggcccgcatcaggcccgaaggcgaccggcaggccagcgaagccaaggccaagaaggacgccaagaagaagtagtcagccagc

SEQ ID NO: 327 - DNA, 16643 bp, synthetic construct
  source 1..16643: mol_type = other DNA
  variation 12453..12757: note = n is a, c, g, or t
  misc_feature 1..16643: note = Synthetic
ggatatgagtgtcaacaagaaaatatataaaaaacactttacggatgttttttatgtttattttaatgaattggtgttaaaagtataaactaataatatactttaaaggtgtgtatatgatatcgtctccccaaattcgtgctgcgagagttatgctaaattggagccaaaaagaactggcagatgtgtcaggtgtttcaattaatgctattgccaagattgaatcagaaaaagtgcaaccacgtgaaagtacgatttctgaactgcaaaaaactttagaagcggcaggtatacagttcttaaaaaatggggttcagtttcgcgaagatttattaactcatattcccaccaaagatgcttttattcgtattttagatgatgtttatcattcactcaaagattcagagaataaggaattgctctatgtctgtgttgatgatcgtttgtcgccacaagaagtgattgacgctgaactcaggctgcgcaaagcgggtattcaatttaaaacgtttattgaggaagggaacactcacattctttacccgttagaggaatatcgatatgtctcacaggattattttaataataatacccttgtcatatacgaagataagattgcaaccatggtatatcaaggaaaggaagaaactggaggaattattattcatagcccgtcactgagtcaatctttgaggaacatatgccaagctctttggataactttggaaaaaccaacaaaaaccacagccgatagaacatatgactgattataaattaaaaaccaaaacgcctgcatggcaagagcatccaagatgcagtctggaaattagcttactcaccaccaagtttgatggtaacaagctaaaagctacaattgaatgggtaaatcgccattttgaagcgtgtacaattaatttggcagacacgttatatcgccataacctcgcaggcaccccgcatgagtcgcctacgcaagtcgcacgacgattaggagacgaatggttgtttcgtaacaatgaaattctagagttcttaacagtgccttatcaaattattcgatgggattcttttttaaaccatcctgaatttgcaagtattcaaagctattttgcaaaactctatcaaacggatcaaatcttcaaagatcttgttgatcaagatgcaagaatgtttgttgcaagaggcgaaagtaatcgcagcatgcaaaattcagtggactttattctagaagagttagcaggggatgagctacattcaaggatgtataaatacgtttacgtttatcctggcacacctttaagtgtacaaaattatataaacgaaaagaatcccagcatttcattcaataaaacgaaaatcattaaagttgattttcgtcgtcgtcattctccgcagttatgtgccgcctaacgtcttaagggttgagcctgcggacatttttgaacttgtccaggtcacggtcaaatgatgcaggcgagagcttttgtgcgacggataggctgccagtaaaacaaattgaattaccttcaatctctaaaaagtgtaccctaaactgtaccctgtggattggaaagcaaggcaaaaatgcggtatatgtataccaacagcggcaggacgtatcctgttgaattgttggaagttaggtttaattaaaaagttagcttgaggtaggcgtccggcgctcataacccggaggtcgttggttcgaatccagcccccgctatttcagtaatgataaggacttgcattaattgcgagtccttattttttgcaccaaaacagggtaactgccccataaattgccccatttttttcgcaagacaatttggactcacccacgttgaacactcaaccaaggagatccaatcatggcacaccttttcaaacgcggaaaacgctatcaccttaagtattcactcggtggcaagcagaaggaagtcgcactgcgcaccgactcattgcaactggccaaggaaaagaaacggcagtttgaatctgctctggcactgggtaacgaaaacccgtttccgactcagacaccgattgctgaagttctcaccgcctatgtcgcagccatccgtgcacgcaagtccgccaagtcggcacagactgacatctactacctgcgtgaaatcttcggctcagtctgcgatgcagtcaccatcacctcacgcaaaactactggcagaaaacgcccctccaaaatcagccaggtcgacaaacgcaaacgtctgcccatcattgaagccacctgctttgaagccatcacccccgcacagattgcagccttcatcgaatttaaagtccgtgaccaaggtttgaaacccaagaccgccaatcactatcgctcgatcctgcgccgggtgttcaattgggctatcgaggagaagggattgcgcatccccaactgcaacggcggacgccatggcaacaaccccgcagcgaaggttcgcccgtacaaggagcaggcccccaccatccgatatctgagcatgtcacagatcgacgaacaacttcacgtgctgcgcttcaatcctcgcctgcaaaccatggcagcagtcctgatctatgcgggtttgagacgtgaagaattactctggctcacgacggatgatatcatcctgtcccgcctcacatccacacgccccagcatgatccgtgtgcaagccaagacgatcaacggtcaatactggcaaccaaagaccaagcgcaatcgagcagtccccatcagtcaggcattacgccaacaccttgaccgttacacctcattggaaaacgaacacggtctgtacttccccagtcctaaaggcgaactctgggacccggacaacttcagtgcggatttaagaaaagccaacaaagccgccaacctgcaatgggcctgtctggactaccgccacaccttcggcagtcaactcgcccagaaaggcgtcagcctctacaagatcagcatcctcatgggcaacagtccagaaatctgccgcaagcattacgcaagtttgataccggaggcattggtggatgaggtggagtttggagattcgcaaaattcagatatctcattacaccgcgcataaaaaaagccgccctcattgagatgcggctggtcgttccgtggaacgtggccttcgaatgtttcgtcttgttacgaaaagtcatacgagcccaggttgattacactgacatgattatacgccaagacaagtaaacggcaagatcaaacattcccttttttctaaaatgcaatacaattagttttctggggcatatctattttattaacgcacccggcaaacaattgatacaaattttatgggagtgctttcacatggctacaacgcttggattagatcttggccctaacagcattggttgggcgttactggatgaaactcacattcttggcaccggggttcgcatcttccccgaaggtatggacaagtttgatactggaagagatgaatcccgcaatgaacaacgccagattgcccgaggcatgcgacgccaaaccaagcgacgtaaccaacgcaagcgactactccgcgaagcattgatccaagccaaactctggccaactgatcctaaaacacaaaacgaactttatgaattggacccgtacgaactgcgtagcaaagcagccagcgaaaaagtttccgcttttgaactgggacgcatttgtttacatcttggacaacgccgaggctttttatccaatcgaaaaaaagaccgcgaagatagtgaagtcaaaggcatgctcgcggagataaacaagctcgaagcagacatcgaaaaagccagctgtaaaacactggggcaattgctttatcttaagtgcataaattttgaccatgccaaacgtgtcgaagaagaccatatccgcaatcgtcatacccaacgaagcatgcttgcaacagaatttgaagtcatatgggaagaacaagccaaacaccatcctgcattactcactaaaacgttacgttatggcgtatcaggtgaaccggcgaaatacccaattaagcctcgccacaaagccaaaggacaaacgctgctcgaagcgttcggcgttcatggaatgattttctttcaacgtccaatgtactggccagcatcaatggtcggattgtgtgaacttgaacccaagcagaaacgttgcccgcgatcacatcgtatggcacaacgatttcgcttactcactgaaatcaataatctccaactcacggacaacacacaaagcccgcctaccccacgaagacttaccgattctgaacgtgcctatgttttggatcaactgcaaaccaagaaagatgccaccttcatacaaatcgcaaattggatagccaaattgcccgactccccccctgctgagagtattcaattcaacctgcaaaaaggtaaacgcgcggggatgaaggggatggtgactgatgcgatgttagccagcaaaaaagtgcttggagaaagttggcacaaacgtgatgaagagcagaaaaccgccatcgttgaattgcttttaagtattgaacatgatgaagaacagaccgttaccatactcgttgagcaatatgacttcactactgagcaggcgaatgctgcggtgtctgttaacttccctgacgggtatctgcatctgtccaaactcgcgttaagtatactgctcccccatatggaaaaaggtttggtttatcaagctttggatgaatcgaattctgccttaaatgcagccggttatctaagacgcgaccaacttaagaaacgcttgtttgacaaactccctcgccaggatgcgtttaactgtccgctcggggatatccccaatccggtggtcaaacgcaccctcaccgaattgcggcgggtcgtgaattgcatcatcaaagaatacaacatgcccgacgatatccatctggaaatggcacgctcggtgagtatgggaacacaagcccgcaaggaatttagcaaggttcgatccgaacgcgaaaaaatgcgcaatgacgcagcaaacgaaatacgcaaacttggattcaaagtttctcgtgaagcaatcaatcgataccttatctgggatcaacaaaatcatgagtgtatgtacaccggcaataagatttcacaaacccaactcttcaatggtgaagtcgatgtcgaccacatcctcccgcgatcccgttcgctcgatgattcacaaagcaacaaagtggtctgcttccgatctgccaatgcggataaaggacagcgaactgtctatgaatggctcgcagcatcggaccccaaacgctttgacgaaatcagcacgcgtgcgctagcctttgtgaagaatcacgggttcccttatggcaagttcaaaaagctgatccaaaaaaatgtcgatgtggatagcttcatcgctcgccaacttaccgatacgggatacattgcaaaggccacccgtcaatatcttgcgtgtctgtttgaagatgacaaacatatccttggcttaaaaggccaacacactgccacgctgcgtcaccaatggggcttaaacaatattttgcgtcatgatgatatcaatcagaaatcccgtgacgatcatcgtcatcatgccatcgatgcgattcttgtagcagtgaccaaccgttcgcgtttacagcagctttcaaagggctatcaagaagtcgaacaaatcgactacaccaccggcgaagtacaataccgccaagcccataaaggccctgcgttagatgaaccttgggaaaacttccggtcggatgttgaatcagcggtcaatgagattaatgtttcacatcgtgtgaatcgtaaaatttcaggacagttgcacaaagacaatcctttcgcaccagttaaagatcgtgaaggtaaaaccattgcaaatacctatgtcaagcgcaaactcgttgaaacactaactaccactgaaatcgaagcaattcgtgacgaaacgattcgtacaattgtcaagaatgctttgaaagtatcaggacttgatattgatagccccaaaaagccggacaaaaagaaaatgcaagaagtgctttcccaagtaaccatgccatccggagttccaattaaaaaagtgcgtgtcttaacaaaagaccaaaccatccaacccatccgaaccaagcgatccgaaaaagccaacgacccaactcaaatcgcatacgtcaaaccgggaagcacccatcacttgtgtatttttgaatgggaggaaaaaggcaaaaccaaacgtgatgcaatctttacttccagaattcaagcgatggatattctaaaacaacagcagcaattcgttactgaaaaagtcagccaattggatcaaaaaccaaaatctgcatctgccaaaaaagtgattcattctcagttctataaacaggcttctgaaaaattcccgctcattgaacgacaacatccaacacgcaaacatgcaaaattcgtaatgtcattaagcaatggcgaagctgttttggcgaattggaaaggacagcaaaaattacttgtactcagaacttccatttcaacaaataagaacgttatttttatcgaacacactgatgcaagaagagaatactcaaagcacaaaacgagtaccaacctgctatcagcaagaaaagttaccgtcgatccattgggacgtatccgttgggccaacgattaatcgaatgaaactcaaaacaaaaacgtaaacaaaaggattccggggatgatcaaacacaccattgagatatcacaaaaacctgcacatttatccagtaaactcgaacaactcactattgagccttacgaaccaactgatgcaaattcacggtcaataccttgtgaagatattggcatggtcattgttgatcatccccggacaacctattcgcatgcagccttttcctcacttttaaaacatggcgcatcgcttgtcatctgtggcaagaaccatcaacccgctggcatccttgtccccatttccgatcacacccagcaagtcagccgccttcaggaacaaattgatttaagtaaacctacggctaaaaaattgtggaagcaaatcgtcactgccaaaatactagctcagcgaaataatctgccaaccgactcaccagcagccagatcgcttaagcaacttgccaaagatgttaaatccggtgacccgcaaaaccatgaagcccatgctgcaagaacctattggagaaactggcttgatgatttacctcagcataaagatttcaaacgcaatcaaaacggctatgatcctgccaacgcatttttaaactacggctatgccatcctccgtgctgccgttgcgagagcacttgtcagtgcgggtttgcatcctgcacttggcctacatcatcacaaccgtgccaatgcattttgtctagctgatgatttgatggaaccacttcggcctctggtagaccgacgagtaaaaaactgtcttcaacgggatcgtcatgaactcgaccaactcaccaaagcatacttgcttgaaatgcttgctgaaccgactttgcttaacaaaaagaccggcccgttgatggtgcatctacatcgttatattgcaagcttggtgaatatttaccaaacccccaagcacaagctgaccatcccaaccgctttgccattgtcatgaaagatgttggccatgtatttaagtgggtaccgatgtatgtggattattaccatgttcgatttgccaaccgacacgaaacctgcacggcgtgcctatgctcaatttcgcaaggggttgctcaaggatggctttacactcatgcagtacagtgtgtatattcggcattgcgccagcgaagacaatgctaaagtacatatcaaacgggttcaagactcagtacccccgcaaggagaagtcagaattgtcaccattaccgacaaacaattcgaacgcatgcacgtcttttggggtaaaaaacgcaaaaagcccgaacctccgccccaacaactcgagcttttttagcctactcatcccccggaagtttttgttgctgctttggttacaagggaagtagtgtaatcaacccaagcccgtaagcaatccgcaacgaccctaacaccgaccacggttacaggactagtgtaatcaacccaagcccgtaagcaatccgcaacttaaacgcatcaatgattaacgccaagacagtgtaatcaacccaagcccgtaagcaatccgcaacccatagcaaggttaataggtttgtttgttaagtgtaatcaacccaagcccgtaagcaatccgcaactgttaccggcttttagtcttattaatatcagtgtaatcaacccaagcccgtaagcaatccgcaactcaaagtcttggtgaaagaagccatcgaacagtgtaatcaacccaagcccgtaagcaatccgcaactttgcccgcatcttgcctaacctcatcgaagtgtaatcaacccaagcccgtaagcaatccgcaacctgcgatgaaatagagtctcttgtttgtccagtgtaatcaacccaagcccgtaagcaatccgcaacctttggcatggcgtcaagggggtcggtgtagtgtaatcaacccaagcccgtaagcaatccgcaacggccgacgcagcgttgagcagttgggtattagtgtaatcaacccaagcccgtaagcaatccgcaacaccagcaaacttaccaactaacgcacaatagtgtaatcaacccaagcccgtaagcaatccgcaacgcccacgggggaattaacccctgtgttgtagtgtaatcaacccaagcccgtaagcaatccgcaactgatgacacattgctgtctgtcctgggggaagtgtaatcaacccaagcccgtaagcaatccgcaacgatgtgtcgcatgggaagcgattttcccttagtgtaatcaacccaagcccgtaagcaatccgcaactgccttccccctaacgccatccgtgacatagtgtaatcaacccaagcccgtaagcaatccgcaactgaggcaatgctcaatctgatcaacagacgagtgtaatcaacccaagcccgtaagcaatccgcaaccgaggcgaaccttcttgtatcgattgaccaagtgtaatcaacccaagcccgtaagcaatccgcaacgatcatgccgagtatgaatttcaatttaaagtgtaatcaacccaagcccgtaagcaatccgcaacatgcaatgaccaggcaggatcgtcacgtcagtgtaatcaacccaagcccgtaagcaatccgcaacaatgaaccggtgatgatcttcaggacggtgagtgtaatcaacccaagcccgtaagcaatccgcaacgaccagggccaagacttgctcaaggtccggagtgtaatcaacccaagcccgtaagcaatccgcaacgcatgtgttcaaatgggcgtataagaaggagtgtaatcaacccaagcccgtaagcaatccgcaaccgtcgatggggggaatgtcggcaggttcaaagtgtaatcaacccaagcccgtaagcaatccgcaacgcgacgatgatgtgatccacctgcagcagagtgtaatcaacccaagcccgtaagcaatccgcaactgcgacgctgggacaaagacgacgacgtcaagtgtaatcaacccaagcccgtaagcaatccgcaacgggcgacagttgacttggcatcaagttgggagtgtaatcaacccaagcccgtaagcaatccgcaacacgtctccaaacatcttgtccatttttccagtgtaatcaacccaagcccgtaagcaatccgcaacggtgcagcgtctgacaggcatgagaccgggagtgtaatcaacccaagcccgtaagcaatccgcaacgaagtcggtggtcgatccggatgcgtcctgagtgtaatcaacccaagcccgtaagcaatccgcaaccatggcatcaaggtcaatggcttggcggtcagtgtaatcaacccaagcccgtaagcaatccgcaacgccggggtattggctgtctgcacttgccgagtgtaatcaacccaagcccgtaagcaatccgcaaccgcagcacgcatgggtgcgtagtatctgaagtgtaatcaacccaagcccgtaagcaatccgcaacttaaaaagtgttggttggttattcgatagagtgtaatcaacccaagcccgtaagcaatccgcaacccgcggcaatcggctgatcgaacagtcaaaagtgtaatcaacccaagcccgtaagcaatccgcaactgcggtagagttgtttgcatacgcttcatagtgtaatcaacccaagcccgtaagcaatccgcaactcgtaggagtcaagacgctgaagttgcagagtgtaatcaacccaagcccgtaagcaatccgcaacacctgggttgaacggatccgcatcaaacaagtgtaatcaacccaagcccgtaagcaatccgcaaccacggaccagcgtgccatgtgcgactttgagtgtaatcaacccaagcccgtaagcaatccgcaacccagaacggacaagacaggacgttatcaaagtgtaatcaacccaagcccgtaagcaatccgcaacgcgttggtgatggcaacctgtgaggctgcagtgtaatcaacccaagcccgtaagcaatccgcaacaattactgccatcaggccgtacctcccatcagtgtaatcaacccaagcccgtaagcaatccgcaactccggtcggtttcgggcgagaccatgatcgagtgtaatcaacccaagcccgtaagcaatccgcaacagtggccatggtcaagactgaggcatctgcagtgtaatcaacccaagcccgtttacaaaataaaacccgctctggtgtccttgcatgaccagaacgggttggattgcggagtgtttttagtttgctgaaccgctctattcccacaggttcggttcagcaagtttgtctcatatgacctccagtctttggtagagtctcgttctgttggatcaatcaggattggctgaaacgattggattgatcgggcaggatgtcatagccgtagcctgcaccatcacagccatcgagtggacagcaccagccgccggtgggaatgggactggttgggccttgcttccattcgatcttgtcgctggtgtaggtacagccacaatgcaggcagtacacattgacaggttcggcaggtggtgcgaatgcttcacgtctcggtttgcgcatttcttttttctttgccatgggatttatctcctttctagggtttgagtttgatggttcgttctgattcaaatgccaaggcttcatcacgcaggtaacggacgatgccgttgcgaccttcgcctaggcagatgcgggtcatgcctgaacgttgtgcgatgcggtcgacacttgagcgagaacattgccaacgctcgcttagttcgttgggtgagatgtagattgattcggcagtatcttgttgtttggtttttgcggacatgttcagccctcctctctttgaatatgttcattgcgtgcaacttgtttgtatttacgaagtcggccatgcgtgaaccattcgtgcttacacttgttgggatacatattggcagcttccatgacctgatctgccaactcttcgaaatctgcccaattgccctgtagaaatggatagccctcttcgtcgtggaagatgtccatcttggattcaccagcaattgcggcttcgagttgttcacgtggaagtctgccatagaaagattggtagacttcaccgtcgtattcagtttcggcaaagaagttgatgatttgcccacagtcagccatgcggacggctaagggacgatgaacacgtgggagtgatttcttagcttcttcatcgtcgcctgcatctttggtggtcatctctcgatctgataccaaggggccaaccaagcgacttgcacccacccagcggatacgccgatcaagattaagtacccaagtcgggaaaccttcttcgggatacttcgtgagatatttagtgacatacatcagagcatgtcgggcagacttgctggatttgcgttgaagatccagacctccgagcttccatttgtcgcgccagagacgccaagcacgttcgagatcaagcttgccaatgggtaagtcaatgaccatgtgccaatggggccagccttcgccggtctgcatttggaattcaagtgtccatgcccaaagctcgacgcccagcagacgcatcaggcgacgaatgtagccctctttggtgatttgggtaaaggcatcaagcggagaactgaaagcctttctatccacagtcagcgtgaacatggcaggcttgcgaaagtccattgctctatcgagcaggcgatagcggacggctaaaccgtagcgtgggccacaatcttgacaggttcgacacctgcaattgcatggcttgacgaagaccctgccagtgtggttgtacttccgtttattgttgtaatcttcaagtctaggcgacgctagcgcgtcgccgggcgggggcggggcggnnnnnnnnnnnnnnnnnnnnnnnnnnnnnnnnnnnnnnnnnnnnnnnnnnnnnnnnnnnnnnnnnnnnnnnnnnnnnnnnnnnnnnnnnnnnnnnnnnnnnnnnnnnnnnnnnnnnnnnnnnnnnnnnnnnnnnnnnnnnnnnnnnnnnnnnnnnnnnnnnnnnnnnnnnnnnnnnnnnnnnnnnnnnnnnnnnnnnnnnnnnnnnnnnnnnnnnnnnnnnnnnnnnnnnnnnnnnnnnnnnnnnnnnnnnnnnnnnnnnnnnnnnnnnnnnnnnnnnnnnnnnnnnnnnnnnnnnnnnnnnnnncggggcgggggcggggcggacaagccgccactcgcccttgccacgccgttgcggttgtctggaggatcgttaagttcgaataaagaaatagccatggaattcccttcggtggttcacacctaaaggcccatggcttgctacgcactacttcgtgttggctggctaccgggcaaatataaaattagaaatgtatttttatcctcttcgaataattcttaaaacagacttcttaatttgttcgtgaatatgacctacacgtgcaccaagtcgtttttcaccagctggtgccaactcttgtatctcaaaattgcctgagtcatcctcaacgacaagaggcgcgggcaactctcgtttattcacaaaaataatgccattttcatccaccttcattttgcttcacttcctttccgcgctccatttgtgcactgatttttttatcaaggtacaattattcccgtatctattcggcctcaaactcatttctagcttcttgtatgtcaagcaagatttcacgccattgatcacattctgaataaggaaccaaatcgatttgcttccttgtttccttgtaggtttctttacctaatagcgttcgacttctttgtataaatttatagctgaatactgtaagaccgcctgtttcagcccttttttttactgcagctcttgacactccgacatacataggaacccattgcattggaagcaacaaactacctgtctctttcctcatttccttattcagctctttcagccactgtcgaaaatgaggaaccggcccttcttctacataccatcttgttccttctatcttgtaaacagctgctgacatcccccacattcccggtatcgatacatgcttaatagcctttctttctaccatgtgtatcatgatacgaaaggtttcgaaaaacgcagccttaaagtttcgatttccgcaactttttggcaagcagtaaatttaatgaatttgataaaatgtgaccatgttcaatatcctcagtgttgaacaatctgcattaaacgatgtttgctttcgtcatatttgtaaaaactctatccctgcttgggtccacattgcacggtaacgatacaccagacagtgacgtggatctgttagtggaatttcaacaaggacaaaaggtaggcaatttcagactcactgaattacagcttgcactcgaagacctgattgggcgaaaagttgatttacgaacggccaacgatctaagcaagtattcccgtcagcaggttttagaagaagctatggttatttatgagcgataaaaaatccgtcctatcgctcataaaccgcgatattagagctatagaacccattctaaatccatcacttaacatgtcatcaaatttccaatcgaattaaagctagacccgcaacgaaccgttgtgtatagtattaatatacacatatggagctatcatggatcgcacacaagccacttcagcacttaaacaaaccggcaaactgcttcaagagtccggccatcgggatacggtgattgtgattttgggcggttcagtggctgcgatgtctgttgcgaatatgccagcgacgcgcgtgacgcatgattgtgatgtgctggtcagtgaacccaacgatcaatggcaggtcgtgcaggccgcatcgcaacaaatcgccaaacaaaacggtttgccggagaactggctcaatcatgacagtcgcatgtatgcccacctgttacccattggctggcgaagtcgatgtgaagaagttggcacattcggtccgctacatgtgctggccattagtcgtctggatttgatggctatgaaactcatggggacaccggtcaggccgcaagaccttgaagacatattggcaatgaagcccaccaaggatgatttaaaattcctgcatcaacacttggaccgactggatgaagaatcatacacacgcgaaacgcacgacaacgaacgggccatattgaaagaactggaagaatcagatggctaaaaaagaaatcgacaaagtgattgctcagtgggcaaaggtcggcgtgttttttggtggctctgtcgcacgcaaaacacctgatcttgaacgcctgcttttaaacacggcccaatgcgtttgtggcagtgcgcgattgttttaccattgtgtctcatggctcagtcaatacgggaattttgtcgctcgccaccggctcaaacatttgacgcaaaccggtctgccagttgaacatcaacccgcacttgctgcattgctttcgttggcagtgaaacacggcgcatcaagagaacttctcattgctgctgatgtctgtcagaaagttgatgcaccacgccccttgtttgatgtacaacaacgatcaaagacattagccaatatcgcaaagcaacaggctagtgatgaagctttacattggaacctctgggtcactgatcaagcacccaaattggatgcgatccgccctgctcattggatcatcgaacgcaatactgactatcttgcacgaatcattcgtaagggtgatttgagatgttcaattcttcaggtactcgaacacgacacacccaacagaactgttgagtctgaaatatccttggctcaattgtgctcggccaatcgcatcgcggtacgccacgcgcttgatgatttggaacttgaaggttttattgaacgaatcaaaacaccaggcacacgcaacattcaaattcagcttacagcacctgccactgcacttggttaacgcacgtctgacggcaaagaaatcagcggctgatattgatactgctacgcagcactatttgcgatttctccccttcacccgctgccaccccagctcgcaactgggttgattggggcaactggtagcatcaagcataacagccaaacaccgcaccagttttctgacgctggtgtggaaaaggcataaaatgagataccatgataactctgcaaggaaattcccatggcaatcacgaacactgacagtaaaggacgtgtaacgttaggccctcggtttgccaatcgcgaagtcgtcattgaggaaatcaatgaatcatcacttcggatcattctggccagcgccattccagtaaacgaggcttggttatacgcaaataaaaaagccttggcagccgttcgcaagggattgaatcaagctcgagcaggtaagaccagtaaagccccaaatctgcgcaagcgatgaatgagaaagtcagtcaccaaagtatggttaacgtgatgaaccagtctttgcacgtgtgcgactagttttagtggtaaccttgcgcacctttgccgtacgcttcgttttactcgcaggaatccgttgatccactgcttctttcaggcgctcggccacccagccatttaaactcacaccttcaattgccgctaccatgttgagcttacgatgcaggatagaatccaatcgcacaacaaacttacccgaacaaggtttgtctggatcttcgccacgttcttggcagaatgccaggtaatcatcaactgattcgtgaaacgctttttcaactgccttgactgattggccttgaaaagtcaccacgtcgcggatgcccatcacttcaccatgtagaacacctgcatcggcatcgaattctacttgtccgatatatcctttgtattgcatcatggtttgactcctgcttctgtgagaaatcttctcatagacttcacagcacctttatcggtttccttctgaggatgtggccgatgaaagacggcacggacaccattaagaaagattcgcacgcgcgatccgttgccctcgctgatctctgctccaagggctttgagcattgtttcgatatccgaccatcgaatattcgattgcacaggatcagtaaagatggcctgaatagcctgatcatgctt

SEQ ID NO: 328 - DNA, 14880 bp, synthetic construct
  misc_feature 1..14880: note = Synthetic
  source 1..14880: mol_type = other DNA
ttcgcaggcccgcgccgccggccgcggcgatggtgatcggcgcggggggaacaaagttcggcaggatgttgttgcacaggtcgcgcgccgtgagtgtcacgacgaacgggctgccggccgcctggttcagcgtggccggaacagcggacaccgtgaagtgatcaaccgccggtccggcgatgacgctcacgtccacaatggggacattgacaagcgtagaaccggccgcgctgacggtcaacaggatgtcggccgcggggccggctgttccgccggtgcagtcgaccgcgcgcaggcgaatgtcggggaagcgaatggtgctggcgatggtgctaccggcggtgacggtgaaggtcacgctgtttgcggcgggcgtctcggcgcccgcattggcgagcatgacgtcgcctgcgatgaccaccgcgttatacaacaccgatgtgtcgaaaacgaaatgggtcggcgcggtgagcgtgatcgtcgtaccggccggccattcgttgaagaaggattcggtgatcgtcggcccgaccgcgacggcgttgaacgcgccggtgacggccgagttggcgtcgaccacgatcacgtcgggcacaaacgagtcggcgcgggcgctcgccggggcgatcagccacgaggcggcaacgagcgcggcgaacgcggcgcgcgacgatacgaaacgatcgacacggttcatcttggcgtggaacgaattcatgatgctccccttcctcttgttgaaatacaacgcgcgccgattcgccttcgtccattcagcgcggagcgcaaagcgctcggctcggcgacgaggcgtcgcgcggacagaacctctcactgcgtggtgagttcgtgccctcccagtgcgaactggcgccggcgatctgacaagacgggatttcgcctgcgccgtccggaaactttcccgctcaattgaacgcggcgtcgagttgatcgccgcgcgcgtcccttaatctccattctaatgattcgcgcccgccgactccagcgctgaacggctagattatcaagccagcgtgaactttcgtgtgtccttcgccgcgctcgcgagcgttgcggtccttgcaccgcaggatcgggccgctccaaatgaatacatagtcctaatatcccgaagcgtccgatacaatcccttctgccgcgcgaatctcttgctcgcctcattctttcctgcatgaaagcccgatcgtcgcgggggagacgccggcgcacggctttccaggttgccggtttcgcgcgcgaccgcaacaacgaaaaatctttccgaaagcagtcaaacaccgtgcgggcattgactttctcggccgtttctgatgaagtagtgggcagagggaaagaaaacctttcgcaccgctcggagcgaaacggggggcgaagcaactctgtcaaacgcgatgcctgcccgcgcgccgttcggccgtcgactcttcttcttgccgggatggaccggaagaaaccggaggttcaatcatgttgcgcgcattcaaacgattcacattcaaagcccaggcctgtctctgcgtcatgctggtcctgcactcgcagttcttcatcgcggggtgcgggccgggattcagcctcttccccacgggcatgttcatcattccgcttgaagcgggccatccgattgtcaccgcgctggagggctcttccctcgcggggccgacggcgctggaagtcacccccggcacgcggcagttccggctgatttacagcgacgcgcgcgagttgagcggcagctacatgatgaacggcgacgcgatcacgctggccgatttcaacttctcggtgcacggcgaaggcgccaagctggagttcaacagtgccaagcaagtcgccgccatctcggtgcacggcggcccgacctgggcgcgccccgccgatgacaacggtcgcgtcgtcgccgccgacggcaattccaccaatccctacatggctgccaatcaggacatcctcgaattggccgcatcgctggatcaggcgtcatcacagaacggcggcacgccgcctgcgaccccgcccggcggcggcggcccgatcaagggatcaacggcctccgcgaccggcacgctgaactccatcctcgccgttctcgcggcgatctggcttccgatcgcgagcatcctccagccactggcgcagcttttcaccgtcgcgtttgtgctggacaactcgttcggcctgcgattcgacggcacgtggaaagccgtgaactcctcgagcaacctgcttgtcactgtatcgggcgggaaaatcaccaagctcgtcgatgacgcatcgcgccaggagttgaacatcgtcaccacgcgcctggcggatcgttcgggcaatcggatcacctgggtcgtcaatgcgcaagtcctcggacaggcgacaaccgtcgagttcaccttcgacgtcgaagagctgaccaacggcaatctggagggcacgctgaccgcgctgggcaacaccttcgcccgcgtgccggtcacgatgtcgcggctgtagtcgtcgtgctgcgcggccgctcccgcagggggcggcttgcgcgcacgacccaaccccggctgggcggccgggccatgcagcggcgcttcggcgtcgcgaatccggcggcgggcgaatcgctcgtcgcgcgcggggcctgccattgcatctcttgccatttcatccagaaggaggaaggaacatgactcgcacgaattttatcgccccggctcttgcggcgattctgacacttgtcgcatcgcgtccggcggcggcgcagtatgaacaggtcgagcagcccgccgacaaaggcgccccggctatccagaacgccttcgcactgcaaggccccatcagccacggcgatttgctcgacctcggcgaggacgaccacttgcaatacgcactgcttgccggccgcgcgggcgggcagatcttgagcggcgggacggccagcggcgacgccctggcactgcaaggctcgacggccaatgatggcaacattctcctgaacgcgctgggcggaaacgtcggcatcggcaccggcgcgccggccttcctgcttgatgtcaacggtgcggccaacatcgccggaaatctcaccgtcggcggcacgctttcagtgccgggcaacttcaacttctctggcgatctcactgtcgacgggacggtctttacgcacttcgtcacggccaacagcccgctccagcttcaaaccgacggcgtcacacgggtctatatcgacgacaacaccaacaacgggaacgtcggcgtcggcaatccgccgcccgtgccgccggccttcccgctcgacgtgaacggcgatattcatacgaactcgcaattgcgatcatcgatccctgacggcaccgcgccgatggtcgtcgcgtccatgacgcgcgttgacaatctcaatgtggacaagctcgacggcctcagcgaagaggaattcgccctgctcgccggtcgaccgggcggccaacaactcaacggcggaacgaacaacaacgatccgcttaccctgaacggctcggcgaccaacgacggcgacgtcatcatcaaccccaacggcggcaacgtcggcatcatgacgacgaccccgggcgaaaaactcgacgtggtcggcggcaacatccgcacgaatcagcaattcatctccaccatccccgatggcaccccgccgctcgtcgtggactccatgacggtcgtcaccaatctgaatgccgacaaactcgacggtcgtcatgaagacgaattcgccctgctcgccgggcgaccgggcggccaggtgctgcacggcggcgacgccgcgggcgacgatctcgtgcttgattcgaccagcgacccgatgaagggatttgtcattctcaacccgacgccggtcggccccggcgccggcagcgtcggcatcggcacgatgaacccgaccgaagcgctggaagtcatcggctgcatcaaggcggattgtctgaagatcaccgcgccgaacttcgtcggcgtcagcccgctgggcatggtccgtgcaggcaccagcgttgacgtgctgccacaggtagacggcaccgcgaaggtccgcgcgtcggccgtcggcacgcacagcacgatgatcccggtgaacctgcacacgtcgcttttcggcacgcagcagaaactggccaacgtgcaggtgtattacaaggtgacgtcgcccaacagcttcatcgcggtgacccgcgcgcgaatcatggggccgaacggcacgttcacgaaccttgccgtcaacgcgacgcagcagaagtccaccgcgtggacctcctacttcgtcacgccggcgacccccgtggacatcaccggccccctctacctgaattttgaattgaactacaccggaaccaacacagcccacgatatccagatcggccagatcatcctgacgacggtcgagtgagcgcgccacgggccgcacacaacggagccaatgacccaaagcgaaagccccgtgcaatgcgcatggggcattgccttggcgactatgccgcctgcagagctataatcgatccggcgagtccgaatagcggcccgaacgccgccggaattgcccggcgaataaccaggcctgctgttccgtttatctttgaccggagatgggagttttacccctctgtgttatcaggtgtctcgatgccttttttccgaccattgaaggctcgccggctgcgcggcggattcacattgattgagctgctcgtcagcgtcgcgatcatttccctgttgatcgccattttgctgccctcgctcggggcggctcgagccaggggccggcggacggcctgctcgagcaatctgcgccagctcgccatcggcatgcggtcctacctggactcgagcggcgacatctttccgcacgcatcgttcatgccgtcggtggatccgtttccaatcggcatgccgacacccgacaatcccgaccctgatccgaatcccgttgcgatctatctggccgacgtgctcgcgccgcacgtcggtgactcggagaaggtctttgcctgccccgacgacaacgggcagatcgtccgcggcgctcccaacgagggcagatcctatttctccaccgagaagagcagctacgaataccgattccgtctcggaggcatttcgatcgccgaatcgatcaagcgcatggccgagttcaccggccgcacgatcaacgagaacacgctctggattctgcgcgattatgacaattttcacgggcccggcggcaagcccggcgcgcggcggtacgtgtattacgatacgcacgtgacggattttgagaattaacgcgagccggcgggtctcgccacagcagaaggaaccacaccatgtctgtttcatccagtccgaagacgcttgtcattgccggcgcgttgatcgccgcgctgggcggcggcgcgtggggcgtcgcgcatttcgcgggcggcgcaaaggacgccgaggcgacgacgaccgccctgcccgaagagtacaccgtcgagaagatcaaggcgtcggccacggaggatccgtccgtcgtcatggagcgcatgcgcaatttcatggatcgcaccgatctgacggaggagcagcgcgagcaggcccgcaagaacatgcgcgaggcgatggaccagatgatgcaacagcgcgtcgatgaatacttcgccgccaagaccgacgaagacaagaacgccgtgctggacaaacacattgacgaaatgcagaagttcatgaaggcgatggaagagcgccgacgccaggaagaggagaaggaggcggccgaggagagcgatcccgaaaagaaggcggagcgcgaaaagcggcgcgaggagatgcgcaaccggtgggccaatcgctcacaggccgagcgcaaggccgactccgaaacgcgcgatccgaacaaaagcgcccagcgcatggcgtacttcggtgcgatgatgcggcgatccgccgagcggggcatacaaatgccgcgctttggcggaccgggtggacgcggtccaggcggccccggcggcggccgccgcggcccgggcgggtaatcgacatcgggtattcgacatctattgactcggacgattcccgctaaacgattcacgctcaacgagccgggggcttcagcccgcgcggcccgcttaaccgccaaataattccaactgccccgcacgcgccccgcgccggctcatgtcgatccggatttcatcggcagcgcgcctcaaaatcgacatgcgtcgcctcgctcgggctggctggcgagcgagaaatacatcagccagaactccgtctccggcggcaggatgttgaaagcgaatccggcgggcggcggcggcggggcggccgtcggcaggctggcctgcaagagatcgatggcccgctccgccagcacctggtgcgagacgcgcgtcgggtggacgtcatcccagaacaaatacgcatcgggattctcggccagttggccctcgccgcccgcgtagccgagaaagccgccggtccacgcggggtcggtcgtattcgttagccccggcggcggcgacgcaatcatttccgcgaagagcgcggcgatgtccatccgccagatgcggatgtcgggcagcgtttcaagctgatcgagccgggcgccaagcgccgcgttcacgtcattggatagctgcgtcgcccgctcctgccgaggcgtgtcgcgatagcgcggcgtcagcccgatgtcgggcaggttcggcacaaggaaccaccgcccgccgagttcgtaaagccgcgcgacggcgagaaaaacgttgtcggcgatggtcgtgggcgggtcgttgcagtcgtcgcccaaaacgtcgaaaacatcgttggccccgccccagacaacgaacagctccgtgccggctggctgaccgtgatacaaatcgacctgctgccgaacgttcggccccagcggcagaccgaacgactggcccagcccgcggccggtccctgatgcggcgtgggcgaagttggtcccgccgcggaagctgggtcgcgcgacgagaccgtagcgcgacgcgagccgctcgacccagaccggcccgtttgatagacggccgtcaaaataaggcgcctgcggcacgatgctgaaggcagcgtgaatgttccccgcgtcggacaggctgtcgccgaagacgacgatctgcgtaaacggcccggtgggcgcggtcggcgcagaaaacaggccgcaaccggagatcgtgaatgcgacaagggcgatggtcgcaaaggtacgcatctaaaacgccgcgtggcctgtcagttcccggccgacgaccagttcgtggatcgtctcggtgccttcgtaggtaatcaccgactcgaggttcagcatgtggcggatcgggctgcactcgatgctgatgccgccggcgccgaggatgtcgcgggcgtcgcgggcgatgtccagcgccatgcgcacgttgttccacttggccatgctcacctggctgtggtgcatcgtgccggcgtctttcaagcgccccagttgcagggacagcaattgcgccgtcgtgatgcgccggctcatgtccgccagccgccgctgaatcgtctgcgtgtgcgcgatcggccgcccgaagacgacgcggatcttcgcgaactccagcgcctctttgaagcacgcgatggcggctccgatcgccccccaggtgatgccgtatcgcgcctgggtcaggcagcccagcggccccttcaaccccacgacgttcggcagcatctgcgaggcgggcacgcgcacgttgtcgaaaaacaattcgctggtgacgctggcgcgcagggagaacttccgcaaaatgtcgcgtgcggtgtagcccggcatgcccttctcgacgatgaacccgcgcacgccctcgtccgtcatcgcccagacgatggcgatgtcggcgatggtgccgttggtgatccacatcttggccccgttgatgacccagtcgccgccctttttcacggcgcgggtcttcatggtgccgggatcgctgccgccgtccggctcggtgaggccgaaacagccgatgcactcgcccttggccatgcgaggtaaatacttttgtctttgttcctcgctgccgtaggcgaggatggggtacatgcacaggctgccctgcacgctgacgaagctgcgcacgccgctgtcgccgcgctccagctcctggcagacaaggccgtagcagacgttgttcaggccggcgcaatcatagccctcgatgttgcagccgagcaggcccatcgaagcgatctcgggaacgagttcctttggaaaacggtggtcctcaaacgcctgcggaatgaccggcagcacgcgctcgtccacaaaccgcgcgaccgcgtcctgaatggcgagctcatcgtcagagagcaggctgcggatgttgtagtagtcgtacggattgggcgtttcaacggcggtagtcatgctcggtgcggccatgtgcggttcctcgtgcttcgggtccgtgttgcgggtccagggtgtcgaaccggggattgtaacgcagcggcgagcctcaatgaagcacggcgatgacatgactgcatgtgattatgggctgttttggtcgggccaacttgacgccgggccttcgctgggccgatgaacagggtgaacgaatcccgattcaataaatcgagccgccggggtgcgacatggcgcaatcattatccacacacaggagcgatgcgcggccgctggtgctggtcacgctctgcggcggcggctggcatcgcgagacccagcgcatgctggaacagttcccggcggaccaatttcgctacgcgtatgtttacggccattgccgcggtgtccacggcgcggcccggctggagatgccgcacgacggccctcgctacccgatgcactacctcgggccgacgcgtgcgcagcggttcggctggatcggcaacgccgtgcgcttcgcgcggtcgatgatcgaggccgatcgactggtcaggcggcttcgcccggccgccatcctcgcggtcggcacggccatggcgctgcccctgttcgtcgccgggcgaaggtgcggcgcgacctgtgtgtttgtcgaatcgctgacgagatttcgcaatttgtctgcgaccgggcgatgggtgcggcggctgcgcctggcggatcggctgtacgtccagtggccacggttgcagcggacgcttccgggcacgacgtacgcgggggcggtgctgtgatccttgtcaccgtcggcacacagttttttgacgagttgatcgacgaggtggaccgcctcgccggcgcgagagccttcgaccaattcaccggcgcgggggcggcaacaactcttgccgacacatctcctgccagcgctggccccgcttttcatgggccgaaccggctgaaagcccgcgccgcagagtgcgcaaaagccacgccggtgtcgggccggctggaaaccggcggcgcagccgtctttgcgcagatcggcctgcaaaagaagccgccgaaacatatcgcccacgtcgcgttcgatcgcgagctggtcagcaaggcacggcgggccgatctcatcatcacgcatgccggcaccggctcgctgatggagttcctcccgatgggccggccgctcatcgccgtcgcgaacccgaccaaggccgacaaccaccagttggagttcctgcacgcgctggatgatgaatacgatttctgctggatcgccgaaccgcgctacctcgaatccgccttgccccaggcgcgcccgcctcgacggcgacaccatcccggcaatgcccccgggccgagcatcggcgaaaacatcgccgcgttcctagtcggcagaattgaatagggccgatctggcggcaataatttattgcctttgcgcaataaaaaggccgcacccttgcggttgcggccggtcgccccgtggggcgtggcctgcgaatctttcttcttgttacgaaaagacacgcgggccgaggtcgattacactggtcgtaattctgccaaaatgcaaccggcttgtcaagtgcttttcaaccgcgcgaaagggagattgatatgtctgggttggttctggggctggatttggggcctaactctctcggctgggcgttagttgacgaatccgagggggggaaggggttgatcgattgcggggtgcgggtgtttccggagggtgtcgacaatttcgacaccaagaaagaaacgccgcgcaacgaggcccgcaggattgcccgtggcatgcggcggcaaatcgctcgacgcgctcggcggaaacgccgcctacgcgaggctctcattgcatccggtctataccctgccggtcccggtgagcaaaagaagctcgaaggcctggatccatacgagttgcgcgcccgcgcattggatgaaccgctcaagccttacgagattggccgcatcttgctgcactttggacagcgccgagggtttctatcgaatcgaaagcgggaacgcacgaacaatgaagtcaagggcatgctcgcggaaatgagcgccttacaggccgacattgaagcaaccggcgcgcgaacgcttggcgagtatcttcaccgcaagtcgcgcgaaatgaaccactgcaagcgagttgataatgaccacgttcgacgtcgccacacccggcgcgacatgctctcttatgagttcgacagaatctggaaagaacaatctaaacatcatgccggcctcttaacggacaagctgcggtatggcgcatccggcgcggcacaaaaatttccgtcgttgccccgcaggcggaaaaagggccaatcatttcttgatgcctttggcgtcgaggggctgattttctttcagcggccaatctattggcctcggtcggtagtcggcaagtgtgagttggagccaaagcaaaagcggtgtgcccgcgcggaccgccgagcgcagcggtttcgccttctacaggaagttaataatttgaggtatatcgatccggatacaaatcaagagcggtctctttcgccggagcatcgcgacacgctacttaaaaagttgtctcggtccaaggaaatggatttcgacaaaattcgcaaggcgctggggttgcacgaatcggtgcagtttaacctcgaatccggcaagagaaaaaaactttggggcatggtgacggattcgcttctggccgccaagggcgcatacgggccgaaatggcatgaactggcggagcagaccaagaaccgcgtcgtcgaattgcttgtgctttcgacggatgatgacgaaactgccgaacgcctgatagaggagtgcggcctgacaaggagccaggccgagtcggtgctgggtgtagatctgccgcagggctacatccacttgtcggtgatggctctcaacaagcttattccccctcttgaacgcggcttgaagctgatgggaaacgacgaaacggattcagcgatgcacgctgctgggtatatgcgccgagatcagctccaacggcgagtcttcgaccatttgccagacccaacgagagcaagggacgctcgcatcggcgacattccaagccctgttgttaaacgagcaatcgttgaattgcggaaggtcgtcaacgccatcatccgcgagtacggcaagcccgcagcggtacatgttgaattaacgcgccaggttcgacaggggccagaagctcgccgtgaatacacgtctcgtatccgcgaaattgaagaagagcgcgcggcggcggctgacgaaatacgcaaactcaagatagggggggcgtctgtagctgtcaatcgcgacagcattctgcgttggctgttgtggaagcagcagaaccatgactgcatctactgtggcaataagatcagccaggcacagttattcggcggcgagatcgacgtggaccacatcttgccgtattcacgcagcctcgatgactcacagatgaacaaggttgtctgtcatcgaaattgcaatagcgacaaaggcaatcaagcgccctacgaatggttgtgcgataagaatcccaagaaatacgccgaagttctgcaacatgctttgtcactggttcggcgcgggacgctgccctacaaaaaataccgcagaatcagccagaaagatttgatattggacgactttatcgctcgtcaactgacggcgaccggctacatcaccagtgcaaccgtggagtatctaaaatgtttgtttgaaaacgagcacgccgtactcggcctgaagggcgagttgacggcggagctgcgacaccagtgggggcttgatgacgtgctgtcatcgctgccagacagccccgcctggcaggagcaggccgatctgcggtcaggggaaaagaatcgcgccgaccaccgccaccacgcaatagacgcgatcgtcgtcgcgctgacaaatcgctctcgccttcaacagctgtcgcgcattcgcaagaggggcgggggagacagggctgacgaagccctgcccgcgccgtgggcgtcattccgtgatgatgttgttgcgaagatcagagatatcaacgtgtcgcgtcgcgccaaaaggaaggtggcgggcgcgctgcatgacgacaacccttttggcaagacgcagaggccggggtactttgtcaagcgcaagccgctgatagagctctcaccaagcgaaatagacaagatacgcgacgccgctatcaaggacattgtaaagggcgagctgtctcgggccggcattatcgctgggcgcgggaagggggtggatggtggggcgatgaagaaggtcttggcagaattaacaatgccgtcaggcgtccctattaaacgcgctcggctcttggtgcccagtgaaaccattagaccgatccgtgagaaaacaccgcacgaagtacaagtcaatccgatgtcaacacatcacttggcgttgttcgagtgggatgaaggcggtaagacaaagcgcaaagctgttttcgtcacaatgatcgacgccattaagcggctcaagtgccacgagcccattatccaacgcaatccgcccaacaataatgctggtattccgcaaaatgcacgatttgtgttttcgctaagcggcggagagcttgtgttggttgatgtcgggggtaacaaaaagctccttgtctttgacaccgcggctcaaacatcacagcagatgtggttttatgaacataccgacgcccgaaagcacaagaggctgtatagtttcatgccgaataccctcaaggcgcgaaaggtgacggtagaccccctaggtcgtattcgctgggccaacgactgataaataaagaaccccgccgtcgcgaccgatctaccacggtcgacggaatgggggccgtgatcaagcgcacgatcgaaatctcccagaaccccgcctacctggccgtccgcgacggccaactcctcctccgcgcgcagcgcgagaatactgacacccagccggaccgcgaccccgacggggcgggttcttcccggcgcggtgcccgagcgcaacacgatccggaccatcgacccacgccggccattccctgcgaggacatcggcgtcctgctggtcgatcaccccgccgtgacgtattcacacagcgcgctcacaacactccttgagcatgatgccgccgttgtactttgcgggagaaaccacctgccaatcggattgctgctgccgatcgcggagcactcgcaggtcgtctggcgagtgcaggcccaaatcaacgtgccgaagcccgtccgaaagcgactgtggcagcaaatcatccgcgccaagattcgcgcgcaagcggcgaacctgttgcccgacaccctcacacgtaccaagctgctcggcctggcgcggaatgtccgctccggcgaccctgacaacctcgaagcccaggctgctcgggcctattggccggcatggcttcaaaccattcacgccgaggcggcgggcagagccgccgtgccggatttccggcgcgatgccgacggcccagcaccgaacaacctgctcaattatggctacgccgtcctgcgcgcggccgtcgcgcgggccttggtatgcgccggcctgttcccggccctgggattgaagcactcgaaccgttccaacgcgttctgcctggcggacgatctcgtggagccgcttcgtcccatggtggacgcggccgtgagtgggcttgcgcgtcaaggggtgcttgagctcggcccggacagcaagaaagcgctcttggggctgctcgcatcggacgtcgaactagcgggacaaaccggcccgctcatggtcgcgctgcatcgttttgccgcatccctggcgaagtgtctcgacggcgacgccgaggaactggagattccggtcgcatgtacttgagcgggtatcgctgcatgtgggttatcgccatgtttgatttgccggtcgatacgaaagcggcgcgaaaggcctacgcgcagtttcgcaaggccctgctcaaggacggctttgccaaaatgcagttttcggtctatattagaaattgtgccagcgaggaaaacgccaatgtgcacatccagcgcgtgcaggggtttcttccggacgacggtgaagtgcgcatcctcaccatcactgacaagcaatttgagcgcatgcgcgttttctggggaaaacggcgcaagccccccgaaccggccccgcaacaactcgaacttttttagaccgggctgctcgcaagtgtcggtcggaaagccgcttcggaacgaggtagtgtaatcgaccccggcctgcgagcaatccgcaacgtcactcaaatcacaaacaaccttaccacaagtgtaatcgaccccggcctgcgagcaatccgcaacgtgccctagcgggttgctaccttcgcgtgtagtgtaatcgaccccggcctgcgagcaatccgcaaccagaccgagagcgacgactcacgccgacaaagtgtaatcgaccccggcctgcgagcaatccgcaaccttttcgccggtgtcgaac

SEQ ID NO: 329 - DNA, 10142 bp, synthetic construct
  source 1..10142: mol_type = other DNA
  misc_feature 1..10142: note = Synthetic
acaccctgcgcctgaccatcgaagacctcaaggggcagaagatcggcgagtcgtcgatcgacctggagatcgtcagcgagtcggcctcgcagccccggtagagccgcccggcactgatcggcagacggggcttggcccgtaggatggacatcttgcccgccggtaggatggacatgtacggaagtgtgaagtggtgtgaagtaccgacgaggcagccaaaccggggcgacttcacaccagttcacaccaggcccagtgtgaagttaagtccaggcttccaaagaacttacgtgctacttcgcacttctgcggcggagagagggggcctcgatggatctggtcgaacgccggtcgatccgcggtcgtcgaagcccaaacgcggcttcactcccgaggagggtgtgatcgcccaccgggacaggtaaacgccaagagtggggggtgcatagcacaaaaaacggccgccctacccgaaggcgaggcgaccgggcgctccgtagagcggtgcctgcgaatttttcgtcttgttacgaaaagccgcaggcagggatcggttacactgaccccattttgcgctataatgggaaagaagtcaactccttctaattgggggaatgctcatttttttcgtagaggaggttctgtgatgccgaacttgaccctcgggctcgacctgggccccaattctatcggctgggcgctggtcgatgaagaaaggcaaacgattgtcggccttggggtgcgcgtgtttcccgaaggagtcgacaagttcgatacggccaaagaggtgtctcgcaacgaggaccgccggacggcacgcggcatgcgtcggcaagtgcaacgccgggcgcgccgaaaacgcattctggccgagcagctaacgcgcaccggcttgctgcccgaacagcccaacgaactcgaatcgctcatggggcaggacccgtacgagttgcgtgcgcgggcgctcagcgagaagctcaccccccacgaattggggcgcgtgttcctccacttggcgcagcggcgcggctttctgtcgaaccggaagagggatcggggcgacagcgaagtcaaaggcatgctcgccgaaatcgaggcgctgtccgaagccatggccacggggaacgaaccgcaaatgctggggcaactgctcgccgcgaaactccgcaacctcgaccatgcaaaccgaaccgacgacgaccacgttcgccaccgccacaccgagcgccggatgtacgaggaagaatttgagcgcatttgggaacgtcagcgcggcttcggacatgaagcactgctgaccgacccgttgaagtacggccgcgcgggcagacagaagtttcccggcaagccgcgcccgcgcccgcggggcacgtcgccactggaggcgtacggcattcacgggctcatcttcttccaacgcccgatgtactggcccaagtcggccgtcggcctgtgcgagttggagccgaagcagccgcgatgccctcgggcccaccgccacgcgcaatggttccgactgctccaggaggtgaataacttgcgctacgtcgacctgggcgacggccggcgcgccgagcagccgctcagtgccgaacagcgcacgctgctgctggcgaagctcgccgagaaagaccggatgacgttcgacgaaatacgcaaggcgctcggcttcctcgaaacggttcgcttcaacctggagcggggcaagaggccgtcactggccggcatgacggtcgacgtgcgcatggccaaggccgtcggcaagcagtggcacgaacgcgaggaagacgagaaggacgccgttgtgcgcctgctgctggacaatgaggccgacgacgacgaaacgctgggccgcctccgggaacggcacggcatgacggcggaggaggccgacgcggcgttgggagccgatctgcccgcgggctacgtcatgctcagcctgaaggcgatcgacaagctgctgccgcacttgcggaaggggatggtgtaccagtcggcaagcaaccccgagcagagtgccctacacgcggcgggttatatggaccccaagagcctgcggcggcgcattttcgacgtgctgcccgaccccgtgcggatgcgcgactgcccgatcggcgacatccccaacccggtcgtccggcgcacgctcgtcgagcttcgcaagctggtcaacgccattctgcgccagtacgggaaaccggcggccgtccacgtcgagatggggcgcgacgtaaaaacccgtccgcagcagggcaccgaggcacaccgccgctaccaggaccagcttgcgcgcatgcgcgacaacgagcagcgccacgcgcaggcggccgagaagctgcgcgaacgcggcatgaagcccaaccgcgatgcgcgcatccgctacctgttgtgggaggatcagaaccacacgtgcgcgtattcgggcgagccgatcagcctcgaccaactgtacggcggccaagtggacgtggaccacgtcctgccgtactcccgctgcctcgacgattcgcagggcaacaaggtagtgtgcttccggcgcgagaacgacgccaaggggagccgcacgccctacgagtggcttgccgccgcgcagccggaccggtacgagcagatatgccaacgcgcgagccggtggatgaaggacgggcgcatcagttacccgaagtaccgccgcttcctccagaaggaattgaagctcgacgacttcatcgaccggcaactgaacgacacccggtacattgcccgcgccacgggcgaatacctccgctgcctgttcgaggccggccatgcggtgctgggcttgaaggggcaattgacggccgagttgcggtggcagtggggactggatacggtcctggccgaattgcccgacagccccgcctggcagcagcaatcgaagctcgcgcccggcgagaagaaccgggccgaccaccgacaccacgccattgacgcggtggtcattgcgctgacgaaccggcgacggcttcagcagttggcgcgcatccggcagcgcagcggcgacggccggcccgacgaaatcctcatcgacccatggcaaagccttcgcgccgacgtgaagaaggcggtcgccggacttctggtttcgcaccgggcgcaacggaaggtgcgcgggaagttgcacgaggataccttctacggtccgaccgaaaaggagcacgtgtgggtgatgcgcaagccggtcaccgacctctcacccgacgagatcgaacgtattcgtgacgtgggcattcggcggctggtggccgaacgcctaaagcgcgaaggcatcgagttcggtcgcggcaggaagatcgacgccaagagattcaagcagctcatggccgacctgaagatgccctccggcgtgcccgtccgaaaggtgcgtgtcgaaaagccggagaagacgatccggcccattcgcacgggggggccggacgaagcgtacgtgaagccgggctcgacgcaccacctatgcattttcgagttcgacgaacgcggcaagaccaagcgggaggccgtcttcgtgacgatgcttgaagcggtccaccggctcaagcggcagcagccggtcatccaacgcacccatcccacgcgccccaacgcccgattcgtcatgtcgctctcggctggcgagatggttcttgctgagtggaacggggagcagaaactgctggtgttccgcacggcgcccgccacggcacagcaacttcgtttcagtgagcataccgatgcacgcgcgtccagtgaccgtcaattgttccgcgcacggcccaatacgctcgacgcgcgcaaagtcacggtcgatttgctcggccgcctgcgttgggcgaacgactgaattctgcccgctagtggccacgctgcgccgtgcggtccacggcggtaacgaactggcggcgttcgacgccccccgtgcgttccggcatggtgccaccgtgtacctcggccccgagccgttttttttcgcttgaatcccgattctaagtaattacactggacattgacggcatacaacccacccgccgccacggacggcatccgaatgcccgaaatacccgtggtggaggacgcggcccagtgatcaaacagacgatcgagatttcccaaggccccgcgcatctatgtgtgcgcctggggcaactcatcatcgaacgcgacggcgaaacgctcgggcgggtgccgattgaggatatcggcgttctggtggtggatcacccggcggtcagctatacccacgcggccctggccaaactggccgaaagcggcgcggtggtggtcgtatgcggggccgaccacttgccgacggccctccttcagcccatggccgaccacacccaagtagtgtggcggctcgaggatcagcttgccgcgggcgcggtgctgcgcaagcagttgtggaagcagatcgtccaggcgaagctccgggcgcaggccgccaacctggatgaggagtgctcgggccgcgcaaaactgctcgcgttggcgcgcaacgtccgttcgggcgacccgaagaacgccgaggcccagggcgccaaggtgtactggaaacactggcttcccggcgggcccttccgccgcgaccccgacgggaagggcctgaacgcgttcctcaactacggatacgcgatcgtgcgtgcggcaatgggccgggcgattgtagccggggggctattgcccaccctcgggctgcaccactgcaaccgcggcaacgccttctgcctggccgacgacctgatcgagcccgtgcgcccgctggtcgacgcccgcgtgcgggcgatgcacgccgaggggcgcacggaacttgatccagcggcgaaggccgctttgctgacgctgctcggcgacccggtccaattcgacggcgacgtcggcccgctgatggtcaatctgcaccgcacggtggcttcgctggtgcgttgcctgcgcggggaggcgaagaagctggagtttccgcgatcatgctcgtaacaggataccgctgcatgtggatttgggtgatgttcgacctgccgaccgatacgaagcgggcgcggcgcgagtacgcgctgttccgcaaggcgctgttggccgacgggttcacgatgatgcaatactcggtatacgtccgtccgtgcgccagccaggagaacgccgatgtgcacgtccagcgcgtggagcgagcgatccctccggatggggaggtgcgcttactccttaccaccgacaagcagttcgagcggatgcgcatttttcttggaagactgcgcaaggcgcccgaaaaaccgcccagccagctccaacttttctaacccggccgcggccctaaccctttgccccggaacaacttacaggcaggagagtgtaaccgatccctgcctgccggcaatccgcaacacccagctcgcccgcatcaccggggacccgagtgtaaccgatccctgcctgccggcaatccgcaacggagggtctcgacgaaaccctcaaaggtttagtgtaaccgatccctgcctgccggcaatccgcaaccagtagcgagagcgccgtggcggcgaccaaagtgtaaccgatccctgcctgccggcaatccgcaacgcctggcagtctacctccgcgacgatttccagtgtaaccgatccctgcctgccggcaatccgcaacgatagatgagccgaatatgctccggcggctcagtgtaaccgatccctgcctgccggcaatccgcaactacgaaagctccgcaagcagttcgggcccaagtgtaaccgatccctgcctgccggcaatccgcaacgtaagggacgggatggccctgtttcccggtagtgtaaccgatccctgcctgccggcaatccgcaacatcatcgacactgacgaaacgttctcggcagtgtaaccgatccctgcctgccggcaatccgcaacctcgcgttccgcctggcggtgcgcctcctagtgtaaccgatccctgcctgccggcaatccgcaacccgtagggcgtttcgcccggtgccccgggagtgtaaccgatccctgcctgccggcaatccgcaacacgcgggtgacgaggaatgctccaggtcgagtgtaaccgatccctgcctgccggcaatccgcaacacactggccggggtaatcctcggccgcctcagtgtaaccgatccctgcctgccggcaatccgcaaccatgggtccttcgggcccgccggggcgatcagtgtaaccgatccctgcctgccggcaatccgcaaccagttcggtgaccgtgtcgcggacgccgttagtgtaaccgatccctgcctgccggcaatccgcaacgcggctcgtcgcggtagtagcccagccaggagtgtaaccgatccctgcctgccggcaatccgcaaccaccggcccttcgtgctccgtgcttcggacagtgtaaccgatccctgcctgccggcaatccgcaacccggtcaggtctacacccggcgccgggtcaagtgtaaccgatccctgcctgccggcaatccgcaacgccgtcttacgagacgagcccaacgccacgagtgtaaccgatccctgcctgccggcaatccgcaacggtagctactaaatctatcgtctgccctcgagtgtaaccgatccctgcctgccggcaatccgcaactacgacggccagtggatggacgacgcggaagtgtaaccgatccctgcctgccggcaatccgcaacggcgtggttttcaggggccgccacaatcgtagtgtaaccgatccctgcctgccggcaatccgcaacgttgcggtggatgctgagcacctcgatccgagtgtaaccgatccctgcctgccggcaatccgcaacgacccacaaggaggccctcaacgatgcattagtgtaaccgatccctgcctgccggcaatccgcaacggcgagccggaccatggtggcgagcgtgccagtgtaaccgatccctgcctgccggcaatccgcaactatgaactcagccaattcttccactgctgcagtgtaaccgatccctgcctgccggcaatccgcaacctatggagggcgtaatacctctggcggggagtgtaaccgatccctgcctgccggcaatccgcaaccactacctatataacaaatttcatcccattagtgtaaccgatccctgcctgccggcaatccgcaacgtaggggttctggttgtcgtcctcgcagtgagtgtaaccgatccctgcctgccggcaatccgcaacttgccgggcgggcgcgtgccctcgtgccagagtgtaaccgatccctgcctgccggcaatccgcaactccatcttcgacgggtcaacattgtccattagtgtaaccgatccctgccagccggcaatccgcaacatgccgacaatgccggccgctgtgtcagtagtgtaaccgatccctgcctgccggcaatccgcaacggcgagaccgccgaggacagggacatcagcagtgtaaccgatccctgcctgccggcaatccgcaacgaacgggcctcgaatacctccagcagcttcagtgtaaccgatccctgcctgccggcaatccgcaacccggtgatggaccgggactatttcgtcgtcagtgtaaccgatccctgcctgccggcaatccgcaactttcagcttcgcaagatccgcttccgtggtagtgtaaccgatccctgcctgccggcaatccgcaaccggtcggcaatgagcgtttcgagcagcttgagtgtaaccgatccctgcctgccggcaatccgcaacaatccgaactcgccgccctgacggagcgtcagtgtaaccgatccctgcctgccggcaatccgcaacgatgacgcggagtgaagacatgcaatcccaagtgtaaccgatccctgcctgccggcaatccgcaacgaaaagactacctgacaggtacgcaatcccagtgtaaccgatccctgcctgccggcaatccgcaacgccaaggaagccgacctcggatttccccggcagtgtaaccgatccctgcctgccggcaatccgcaacctcgccggcagccggtatcgccgcgaacaaagtgtaaccgatccctgcctgccggcaatccgcaacatcgagatgtacaagggcaacgcgtaggcaagtgtaaccgatccctgcctgccggcaatccgcaactaggcgtcctcgggcgggccgccgcccgtgagtgtaaccgatccctgcctgccggcaatccgcaacatgcggtaggtgcgcacgcccggagattggagtgtaaccgatccctgcctgtcggcaatccgcaacaccagcccggcctcaccagacgcgaatcgggcacctagaagcggcccacaacagccggcagcccctggacgcgggcacggccgaatggctggccgacatcagcgacgacctacacggccggcttgcacgggccggacttgtcgagccccggcagccccgggaacgggcaacgctggccggcttcatcgacggctacatcgacagccgaatcgacatcaaggccgcttcgcgggtgattcttgggcacgtgaggcgaaaccttatcgagtgccttggcgccggccggccgttgcgggaaatcagcccgaccgatgccgacgcggtacggcttgccatgatacgtgaagggctggccgattcgaccatcgccaagcgattgcagcgggcccggcagatgttcgcggctgcgaagcggcgggggctggttgacggcaaccccttcggcgacgtgaagcacaacgaaggcaacccggccgaacggcagcggttcatcgaacgggaaaccgttgcccgaatcctggcggtgtgcaatccgacgtggcggctgattaccgtcttgtgtcgatacggcgggctgcgatgcccaagcgaagtgctatccctgaagctggccggtatcgactgggcggcggcccggcttcgcgttgacagccccaagacggaacaccaccccgggcggggcagccggattatccccctgtttcccgagttgcgggccgagttggaagccgcatgggaccgggcggccccgggcgaagtgtacgcggtgtgcggcccggatgccgacgcataccgggtggcggcccaagggccggacgggtggcgaaacgcgaacctgcgaacccagtttaaccgcatactgaagcgggccggcgtggcggcgtggcccaagcccttccaaaacatgcgcctgagccgggaaaccgagcttgcggccgagtaccccttgcacgtggtaacggcctggctgggcaacactcccaaggtggccatgcggcactacctgaccgtaaccgatgccgacttcgaccgggcgggcggaggcgctgcaaaaagcgctgcagatgcgctgcaaaaagcgctgcagatgcgctgcaaaatgcgctgcagccgacacaagcccctatcggccccaatgcgaatcggccgacgcaagcccaagagcgaaaagcacttaggcatacatcggccgatggtgacgtattccggctggaatcatcagtggcggggacaggacgcgaacacccccaggaaaacccggggaaaacgggggttgacgattcgggcgcgtcaaaatgcgcggcattttcggccgaaacgattgcggcacaccctgacttgcgacggctgatacaggcgtggccgaccctgcccggcgacgtgaaagccggcatcatggcggcggtacggggggcgtagaatgggccgtcaacaggcgggggcgacggcggccgaagcagccggcgggcggtgttccaatacaccatgaagggggcagggcgggggcgtttccgacccccggcgcccttaaaagggaggttagggtgtcaaaaatcgaaccgaaacgcaatcgcgggcggccccgcgggcggctggacccggcgcttgtgcggcggctggcgggcgcggggttgaccactgaggaaatcgccatggtgtgccaggtgtcgaaatcgacgctgctacgccgtgccaagccggccctcgagcgcgggcgggcgcggctgaatgtctcattgaggcgcgcgcagttgcgagcggcccgacgcggctgtacccgcgcgctcgttgcgctaggccgagccatgttgggccagcgcgatcgggtggaggctacccactacgggggcacgctgcgcgttgtcgagcg

SEQ ID NO: 330 - DNA, 9996 bp, synthetic construct
  misc_feature 1..9996: note = Synthetic
  source 1..9996: mol_type = other DNA
cgcggcaacagggcctgggaaaccacgccgatcatggccaccgacaactgcgtgccgatctgctcctgctgattcgtggcgaaaacgtcgatgcttcggttgaccctgacctgtccgcctctcgtgtgcagcgtgccaaacacgatgtggcccgtctcggccgccgtaatcgccgcctcaatcgtctccaagtcgcgcatttcaccgaccatgatgacgtccgggtcttgacgcaacgcgcggcgaatggcctcggcgaagctcggcacgtccacgttcagctcgcgctgattgatcaggcacttgtcgtggtggtgaaaaaactcgatcgggtcctcgatcgtgatgatgtgccggtccgtcttgtggttgatgtagtcgaccgccgccgccagcgttgttgtctttccggaaccggtcggaccggtgaccagaatcaaaccgcggggccgcatgatcagccgctccaaggccggcggcgtgcccatctccttgaagtccatcagccggttgggcaattgccgcaacacgatgccgacgtaaccgcgctgtttgaacacggaaacgcggaatcgggccacgtcgccaaacgcgaaaccgaagtcggtgccgcccacctcctgaagctcctgctggcaccgttcgggcgtgatgctcttcatcaggcccacggtgtcctccggtcccagctccttggtctcaagccgcatgagccgtccgtccacgcggaccaccggcggcgctcctaccgcaagatgcaagtcgctcgcattacggctgaccaccgtatgcagcaatttgtcaataagaatggtacccatttagatccacttcacagggagacaatgccacgggcgcactcggctgcggtatgccgcttctaatgacggttccgttagacgaaagaggttggcccacctccgaagcgtggccaacctgcactcccccagccgagcggggcagccaatcgccaagtggcatgagcctgcctccgctgcgccacaattattcgcgccgggcatgaatatctcaagccaaacgcgaccaaaccatattcacctttgatctacaggtcctactccccagccaccttggcgacccgcatgacctcctccatggtggttattccccggcatgcctttatcatgccgtcttcgtaaagcgttttcattccttcactaatggctgcctgccgcaccgccgaggtaggggcgcaattgaaggccaattcgcgaatcttgcttgacatgagcatcagctcgaagagggccaaccgcccgcggtagcccgacccgccgcagctcccgcaaccacgacccttgcagaacgtggcgttggcggccatctcgggcgtgattccggcggcccgcaaggctgactccgagggcgtgtatggctgtttgcacttctggcagactacccgtaccagacgctgcgccatgatcgcgacaatgctgctggagactaggtaagcggcaacccccatgtcaaccagacgtgtaatagcactgggcgcatcgttcgtatgtagtgtactgaaaactaagtgtccagtcaaagaagcctgaattcccatctgcgcagtctcaagatcacgcatctctccgaccaaaacaatgtttggcgcctgacgcaacattgcacgaatgacccgggcgaagtccagcccaatgtcgtggcgcacctcgacctggtttatccccggaaggtagtattcgacggggtcctccgcggtgatgatcttccggtctggtgtgttcagggcgttcagcgctgcgtacagcgacgtggtcttgcccgagcccgtggggcccgtcaccagaataatgccgttgggccggcggatgaggctctcaaacttcttgtagtcctcgtcggaaaagccaagctgccgaagccccactttgatgctgtccttatcaagaatccgcatgacgaccgactgcccatgattggtgggtatgacactcacccgaaggtcgagttccttctccccgatcgtcaccttgatgcggccgtcctgcgttcggcggcgctcggcgatatcgagccttgcaagaatcttgatgcgcgacaggatagccccgagtagtcgcctgggggggctgtcccgctcgaccaggcggccgtcgatccggtagcggacccggacccggtcctcgaacggctcaatgtggatgtccgacgcccgcaactgcacggcctcggtaatgatcagatgcaccagtcggacgatgggggcgctactctcgtcgatttcctcttcaccgcggcccgcttcgtcctcggtctcggtgaaatcgatggccgtgtcggtgaactcctggagcatcgagtcggcgctctcgccgaccgtctggccgtagtagcggttgaccgcttccagaatgtgctctcgcggggccagggcgatttcgatctgccggttcagaatgaaccggagtttttcgaaaacttcaaggtccaaggggtcgctgacaatcaccgtcagctcgccgtcgctttcggccagcggcaaaatcgcgttttcgcgggcgaccgactcgggcaccaattcgacgaccgagggggggatgaccacttccgagaggttgacgtagtccaagccgaactgcttggccattgcgcgggtgatttcctcgggggtcgcgtaacccaatcgggaaagcgcctcgggcagcttcacgttggactcggaagccatctgcttggcttcggccaattggtccggactgatggtgccctgggcaataaggatttcggtccaatcacctggacgcttagccatggctggctcccgtagcagcagagaaggcggtcacaccagggcctaagcggagcagataaggggggaaacctctcctccggcgcgagcgggtcccggtccgagcgccgccactgcaaaagccgtactaaccccggaatacctttaggctaacgtcgaattccggcctgtcaagcagtagccaccccaacggcggggaacggcccgcgcgtcatgtcctccgtcgtgggggtgcccgggcatgtccaaccgcgaccgcctggcaaacgaccatggccgcccgatcgttcgaggtttccagcagcaagtcggtccaggcgtgacacattgttgtcacccctgccgcctatactccttccccatggagctaacggcactcaacagccacacggttggcggcttgcgcctgatgatcgtcgacgatcatgcgttgtgttgcacgggtctggcgaccatgtttcgggccgtgcccgaggtggctgaagtttccgtcgcgaccacctcggaacaagcccttcgcatcgcgaggctgctgacgcccgacgttctcattctggatgcggccatgccctcgcaccaagggttcgagatggcccggctccttctggagtcttccttgccgcgtcgcattctgtttctggacgacacggtgaatcacgctcacatccgctctgcgcttcgcctgggggcacatggctattggaccaagcacgcgaccttcgacgagatccttgcggccgtgctccgcatcagcgcgggcggcacgtctttttgccccgcggccgcccagtgcctggtgccgacggaatctgggccgcggtttgagccgccggccattccagcgccgctggagaagctaacgccccgcgagctggaagtcctgctgaacctggccgacggcctgagcgtgcggcgatgcgccgagcggatgcgcctctccgagagcacggtcgacaatcacaagtcgcggctcatgcggaagctcgacgtacacagcgtcgttgaactggtccgcctcgccgcccgcgaggggctgttgtagtacccgtgcccgtccgcgagtgaggctggcacttcgggctgcggcggggtacgatgacggctgcgatcggacccccaatcccgcgcgccgtccgaagcggcccgagcgatgccctactacgttggaaccgacgaagccggctacggcccgaacctgggcccgctggtcatctcggcgagcgtctggcgcgtgcctgagccgaccgacccagggcagctctacgatttgctcgccccggccatcgtcccgtcgccgcggctggcctcgtcggtgtcggtcgccatggccgactcgaaggtcctctacggctcgggcaagacgctgcgacacctcgaacgcggactgctcggcgccctgtgggccctgggtcgtccggttgaaggctggcaagacgcctgggccgcgctggacggccgctcgcgcgaggcccggcagagtgcgccctggtacgccgactatcactgccgcctgccgctggccgtcgagccgagcgagcccgaccgcctggccgacgcgatgaagaccgcgttcgaccagaccggcgtgcgtctgattgatctgcggagccgggccgtctttccggccgagttcaacgcggcgtgccgccggctcgggtcaaagggcctggcgctgtcccattggacgctcgcgctgctggccgacacgatctgcggtctggccgacgagcccctccacgtgctgtgcgacaagcacggcggccgcgaccactacgccgacctcctggctaagcattttcccgagtggctcgtcgaaatccacggcgaatcgcgccagcgaagcacctaccgcttcggcccgccgcgccgccgcgtcgaaatcgcgtttgccgccaaggccgagtcctatctgccggccgcgctggcctcgatggcgtcgaaatacgtccgcgagctggccatgctcgccttcaatgcgttttggaccgcccgggtcgagggcctgcaacccacggccggataccccgtcgacgcccggcgtttcaaacagcagatcgccgcttgccaggagtcgctggggatcgaagacgacgtgctgtggcgagagcgataggccgcgaggcgcgaaggacgcttgacgccttcgagcggcaacgccgctggcagaaacgcgcaaaaaaaaggccgccccgtaagagacggccggctgctccgtggagcagtgcctgcaaatgtttcgtctttgttacgaaaagccgcaggctgagatcggttacactggcaggtagtgtatcgcactgctacactggtgtcaaccatctgtcccagattttttgggcggaaccgcacaacttttcagaatcgagggcaaatcatggcaggattcacgcttgggctcgatctgggccccaattcgatcggctgggcgctgatcgacgaagagaaccagaagatcatcaacacgggcgttcgcgtctttcccgagggggtggaccagttcgacacggccaaggaggtgtcgcgaaccgaggatcgccggattgcccgcggaatgaggcgccagatcaaacgtcgccaacgccgcaagacgcagatgcgccagacgctggtcgaggcgggcctgctgccggccgacccggcggcccttgaagctgtactcgccggcgatccctacgaactccgcgatcgggcactccgcgagaaactctcgccccacgagctgggccgcgttttttaccatctcgctcagcgccgtggtttcaaatccaatcgcaagaaggaccgggccgacaaggaagtggcaggcatgttggccgaaatcagccagttggaagccagcatccggcagagcggttgccaaacgctcggacagtggttgtgcaacaagatgcgcgaaatggatcaccgccgtcgtcgcgacgacgaccacgtccgcggccgccacacgcggcgcgacatgtacgaaaccgaattcgacgccatctggcaggcccaatgcgaactgggcaacgccgggctgctgaccgacgcgctcaagtgcggacaacgaggaaaacagacctatcccgcgcggcccgtcccgtgcaagaagggccgctcgctcctggctgagtttggcctggacgggctcattttcttccagcggcgcatgtactggccccgctccgttgtcggcgcctgcgagctggaacccaagcagaagcgttgcccccgcgccgaccgccgggcccagcgattccgcctgctgcaagaggtcaataacctccgctacgtagatacggagtcgcgcgacgaggagcagcgtctgaccgccgagcagcgcaccctgctgttggacaagctcgaaaagaccgagaagatgaccttcgaccagattcgcaaggcgctcggctttctcgacagcatcaagttcaatctcgaacggggcaagcgttcccaaatccagggaatggtcgtcgacgcccgactggccaaggccacgggcaagtcatggcaccgacggtccgaggagcagaagaacgagatcgtccgcctgctcgtcgacaacgagcagaacgaagccgcgctcgaaaaacggctggtcgacgagttcggaatgagccccgaggaggccgaagcggccgtcacggccgatctgccggccggttatattgccttgagcgtcaaggcgctcgaaaagctgcttccgcacatggaaaagggcctcgtctaccaggccgccagcgaccgcgagcaaagcgcgctccatgccgccggctatctgcgtcgcgacgagctgcgccggcggctgttcgacaagctgcccaacccccaacggacggccaactgcccgatcggcgatctgcccaacccggtggtcaagcgaacgctggtcgaactccgcaaagtggtcaacgcgatcatccgcgagtacggccggccggcggcggtccacgtcgaaatgggccgcgacgtgaagacgcggcccaagcagggcaccgaagcgtatcgcaagtatcaggaccgcattgcggagatgcgcgagcgggaaaaacgccgcgaggacgcggcgcagaagctccgcgacaaccgaatcacggtcagccgcgacaacatcacgcgctacctgctctgggaagaccagaaggagacctgcatctactcgggcaagcccatcagcttcggccaactcttcggcggcgaggtcgacgtggaccacatcttgccctattcccgctgccttgacagctcccagaacaacctggtcgtctgcttccgcaaggccaacgccgacaagggaaacaagactccctacgagtggctcgccgacagacggcccgaacagtacgaagccgtgtgcgtccgagccaacgggctgctgcgcgacgggcggataccctatccgaagtatcgccggttcttgcagaaggagctgaagctcgacgacttcatttcgcgacaactgaatgacacccggtacatcgcccggctggcggccgaatacctgcggtgcttgttcgaggccgaccatcacgtcctgggtctcaagggccagctcacggccgagctccgccaccagtggggcctcgacacggtgctggccgaactgcccgacagccccgcttggcacgagcagagcaagctccgcgacggcgaaaagaaccgcgccgaccaccgccaccacgccatcgacgcgatcgtcatcgccctgaccaaccgcaagcggctgcaagaactatccagtatccgccagcgcggcggaaccgaggccaccggcgagctggttgtcgatccgtggctgtcgctccgcgacgacgtgaagcagataatccgcgacgtcaacgtctcgcaccgcgccgagcgcaaggcaagcggcaaactgcacgaggaaacgctctacggcaagacggagaccgaaggcgtctgggtcgcccgcaagccggtcgagtcgctctcgcccaacgaaatcgaaaatatccgcgacaaggccatccgcgaaatcatcatcgccaagctccgccagcacgggatcgagttcggccgcggcaagaagatcgacaacgccaagtggaaacaggccatgacggacttgcgcatgccctccggcgtgccgatcaagcgggtccgcgtcaccaagcgggaactcacgatccgcccaatccgccccggctcgcctggcgaggcctacgtcaagcccggctcgaaccaccacttgtgcatcttcgagttcaacgagaacggcaagacgaagcgggagcccgtcttcgtctccatgctcgaagccgtcggccggatcaagcgaaaggagccgattatccagcgaacgcatcccgaacgccccgacgcccgcttcattatgtcgctctcccgaggggaaatggtcctggccaactggaaaggcgaacagaagctgctcgtgttcaagaccgcgtcttcgacccaaggtcagatctggtttgccgagcacaccgacgcgcgtcggagcgcggattatcggcagtatgtggccaacgcgaacacactcgatgcccgcaaggtgaccatcgaccccctcggcaggatccgctgggccagcgactgagcggccaacggttcggggacgggatcatttttcggccctcttcgcgttgccctttccacgcgctggacggccgaaagatgtgcctgtccccctcggccggcgatttccgtcggcgcagaccgcttggggtaatcaccccaagcccccccatagatttctggcaatccactgtccgccgaactatagtggagacgagcgccggacgctacgcctgcgggaccaggagggtctgcatcacgttgaacaccgttccctgggcgtggggcagccatgatcaagcgcaccatcgaaatctcgcgagagccagcgcacctctccgttcaacgttcccaactgaccatccagcgcaatggcgaaaccgttgggagcatcccctgcgaggatatcgccacggtcgtggtggaccatgcgcaggtcacctacacgcagtctgccctcgcctcgctggccgagagcggcgccacggtcgtcgtctgcggccggaatcatctgcccgcggccatgctcctgcccctggccgaccacacggaagtcgtctggcggatccgcgaacagttgagcatcggcgcgccgctccgtaaacagctctggcggcaactcatccaggccaagatacgcggccaggcggccaacctgcccgacgattgccccgcccgtcgcaaattgcttgacatggccgcgcaggtccgcagcggcgacccgaccaaccgcgaagcccaggcggcacgcgcttattgggcccactggctccccgatcagcccttccgacgcaaccccgacgcgctcggcatcaactcgtttctcaactatggctacgccgtcgttcgagccgcgatcgctcgggcactcgtcgccgctggcttgttgccggcgatcgggctgcaccactgcaaccgtggaaacgccttctgcctggccgacgacctgatcgagcccatccggccgttggtcgacgcgcgggcccgcaagctgcacttgctgggctaccaggacctcagccaggaaaccaaggcgttcctgctggaagtcctggcggcacgcgtccgcacgggcgagggaaccggcccgttgatggtcggcctgcaactcatggtcggctcgttgacccgctgctaccagggcgaagcgaagacgttggagattccccgcgcatgtttatcaacggataccggtgcatgtggatcgtcgtgatgttcgatctgccgaccgacagcaggccggcgcggcgccagtacgcgctgtttcgaaaacacctgctggaaaacggattcatgaagatgcagttctcggtctacatccgccactgccccagcgcggaacacgccgaagtccacatgaagcggatcgagcactatgtcccgccagagggggaggtgcggattctcaccctcaccgacaaacagttcgaacggatggtgatcttttggggaaaaatgagaaaagccgtaggccaagccccccgtcagctcgaattattctgacgaccctgggccctcatcttgttgcgcggaaaggacttagcgaggtgaggagtgtaaccgatctcagcccgccagcaatccgcaacaggttccgtggtagaccgagcggcaaagtagtgtaaccgatctcagcccgccagcaatccgcaacgtcccatcggcgacgaata

SEQ ID NO: 331 - DNA, 6035 bp, synthetic construct
  source 1..6035: mol_type = other DNA
  misc_feature 1..6035: note = Synthetic
gctcgctatcggaattccaatccgtgtctctggttggatctcgattccggcaagtgcaagtaccacaatgtacggccagtcctttgtcgatggttcgagccagggtgtctggcgtgcaatgaacagcgtgtcaaagtgggccttccgagcttgccgagtaggcaagtgagtttatgagggaactgttcgatccgaagtgggccagtccggtgttcgcactcaccgccgctggtctctcgatggcctacttgtgacagggtgcgggaaatagttccgggcagatcactatcgagcgatctctccgcctgggcacccgccgaacctcctttcgttacgccatgcgtcgtccttgcctctgagtatacaaaaaaacagccgccctgcttgcacaaggcgactggatgtgccccgtagggcagtgcctgcgaattcttcttcttgttacgaaaagctgatcgcaggccaagatcagatacactgaccacattctacaccaaatgtggattccgtcaacaggggcctcttgcactcaccgccacagcctgccataatccgtggtgcccccctcttgcgggggactcaggattcctggtcgctgttgacggttgtgcggtcactttgacaggttcattcctttcggggggaggacgtcatggcatcacgcggtgtattggggttggatctcggcccaaactcgatcggttgggcactcatcgatgaggaagaggaggcgattgtcgacattggcgttcgggttttcccggaaggggtcgacaacttcgacacggcgaaggaggtctcaaagaacgaagaccgccgtatctcgcgtggcatgcggcgacaggcagagcgtcgttgtcgccggcgacggcagattcgcgatgcacttgtagaagcggggctgttcccggccgagcccgagcggcaagaggccctcttggcaagcgatccctacgaactgcgatcccgggcgctggacaagaagctgtcaccgcatgaacttggccgcgtcttctgtcacctgggccaacgtcgcggctttctctcgaaccgcaagaaggaccgcggcgacaaagaagtcaagggtatgctggccgagatcagcgaactggaaggagagatgaaagaggcgggcgcggagacattggggcgattgctgtaccgcaaggcccagtcgttggatcatgcgagtcgccgggagaacgatcatctccgtaaccgtcacacgcgacgaaagatgtacgaggatgagttcgaggcgatctggcaatcgcaatgccggctgggaaacgacggactgttgaccgacgatctgaagtacggcaagttcaagccgaagcgaggccacgagcaactgtatccccgcaagccggcccgccgcccggcgggactctcgccgctggaggcgttcggcattcacgggctgatcttctttcagcgcaagatgtactggccccgttcggccgtgggtacgtgtgagttggagccgaagcaaccgcgttgtgccagggccgaccgtcgagcgcagcgattccgcctgctgcaagaggtaaacaacctccgctacagcgacctggagacgagcgaagaggaacggctgtctggcgagcaacgcaccttgctgctggacaagctgtcgcaatccgcgaaggtgacgttcgaccagatccgaaaaacgctgggcttcatggagagcgtcaagttcaacctagagaaggggaagcggcccggcttgcagggcatgatcgtcgatgccctgatggccaaggccgtcggcgaagcgtggcacgcgcgggacgaacggcagaaggacgacatcgttcggctgctgatcaacaacgagagggaagacgacgagttggccgagcgcctcgtcgaccgcttcggcatgaccgccgccgaggccgaggccgccctggacgtcgatttcccgagcggacacgtgcatctgagcctgaaggcgatcgacaagctgctgccgcatttggaacgcggcctgatcctgcaatcggagagtgaccccgagaagagcgcgctgcacgcggccgggtaccttcgccgcgatgaattgaagcgacggctgtttgacaggctaccagacccgcagcgggcgcgtgattgcccgatcggcgacacgcccaacccggtggtgaagcgaacgctggtcgagctgcgcaaggtcgtcaacgcgattgtccgggagcatggcaccccggcggcgatccacgtcgagatgggtcgcgacgtccgcacccggccgaagcgcggaaccgacgcctatcgcaagtatcaggatcgcatcgacgaaatgcgaacgcgggaaaagcgtcgtgcggacgccgcagagaaacttcgcgaatcgagcatccgcgtcaaccgtgacaacatcaaccggtacctgctctgggaggatcagaaccgcacgtgcatctactcgggcaagccgatcggcttcgggcagcttttcggcggtgaaatccaggtcgatcacgtcttgccctattcgcggtgcctggacgattcgcagaacaacaaggtcgtctgcttcggtaagacaaacgctgacaagggcaaccgcacgccctacgagtggcttgccgacgcacagtccgatcactacgagcaggtttgccagttggcgggcaagctgatgcacgacggacggattccgtacgccaagtatcgccgattcgtacagaaggagttgaagctcgacgacttcattgagcgacagctcaacgacacgcgttacatcgcccggctggcgggcgagtatctccgctgcctgttcgaggccgaccatcacgtgcttggtgtgaaggggcaactgacggccacattgcgtcacgactggggcatcgagaatcttctggaggaattgcccgatagcccggcgtggcaagacagcagcaagctgcgcccgggccaaaagaaccgggccgatcatcgccaccacgcgatcgacgcggccgtcgttgcgctgaccaatcgcaggcggctggcggaacttgccagcatccgcatggctggcgggacggaggcgacgggtgaactggcggtcgatccgtggttgagcttccgcagcgacttgctggacgccgtgcgcgaggtgaaggtctcgcaccgggccgaccggaaagttagcgggcggctgcacgaggagatgttctacggcaagacggagcggccggatgtttgggttctgcgtaagaaggtggaggaactttcacctagcgaagtgccgaacattcgagacagggagatccgggagatcattattgctcggttacgcacgtatggcatccaagttggtcgaaagcaagggaaggatgagaagaagtggaaacaggctatggcgggtttgaccatgccatctggcgttccaatcaagaaggtccgggtatgcaagaaggatggcacgattctctccattcgtgaagggaccgacaatgcagccttcgtcaaaccgggcaagacgcaccatctgtgcatcttcgagttcagcgaaaagggcaagacgaagcgagagcccgtctttgtaacgatgctcgaagcgatcggccgcgtcaaacgtggcgagacggtgatccaaaggaaccacccgcaacgccccgaagctgagttcgtgatgtcgctctcacgcggtgaaatcgtgttggccgagatgaatggagaggaaaagctgctcgtctatcggacgggtgcatcaacatcggggcaaatcaggtttgcggagcatacggacgcccgaaaagggtcggactacaagattctccgagccacggccaactcgctgaaggcgcggaaggtgaccgtcgatccgctggggcggattcgctgggcaaacgactgatccgtggaccgccttttcttgtcgcattcggaatctggcccgactataatggcccctaggtaggaattccgccacggacggtcgtcgcgtgcaacccagcaggcaacggccatgatcaagcgcaccgtcgaaatctcccgcgagccggcccatctgagtgtccggaacgatcaactcgtgctcaagcgcaacggcgacgccgtcgggcagatcccctgcgaagacgtgggcgtcgtactcgtcgaccagccgcagacgacctacacgcactcggccttgacccgattggccgactgtggcgcgacggtcgtgctttgcggacgcgatcatctgcccgtcgcgttggtactgccgctggccgaccacagcgaggtcgtctggcggatcaacgaacagcttgccgtgaaaaggccgttgaagaaacagctttggcggcagattgtgcgggcgaaaattcgcgggcaggcaaagaatctggccgagggtaccgcagcgcgaaagcgactcgttcagcttgcccgggaagtgaagagcggcgacccgaaaaatgccgaagcgcaggccgcccgaatctactgggcccaatggttacccggcgaggagtttcggcgcgaccgcgatcttccgggtgtcaacgcgatgttgaactacggttacgcggtggcgcgggcggctgtggcccgggccctggtggcggcggggctgctaccggcaatcggactgcaccactgcaaccgctcgaacgccttctgtttggccgacgacctggtagagccgctgcgcccgatggtcgaccatcgagtacgtgatatgcgacagcagggcctcgaggaactgacccagcagacgaaggccgagttgctgcgactactgaccgaccgggtgcaagtcggcgacgagaccggccccctgatggtcaacctgcaccgcatggtggcttcgctggtgaagtgctttcagggcaagaccaagcggctggagattctgaagcctgtttccgagccagactgcgaaaacgcgaaacgcgaaaactgaataacgatgtatatcaacaggtatcgatgcatgtgggtgatcacgatgttcgacctgccgaccgacacgaagcaggcgaagcgcgactatacgctgtttcgccgacacctgttgtccgacgggttcaccaggttacaatactcggtctacatccggcattgcccgagccgggagaatgcccaggtccacatcgaccgggtgcaggcacacctcccccctgacggggaggttcgggtgattacgatcacggacaaacagttcgagaggatgttcatattttggggaaaaatgcgcaaaccccccgaagccgcgcccgagcagctcagccttttttaaggtcggatcgaccttatctgtcgttgcagcaaggacttaggccgggcagagtgtatctgatctcagcctgccagcaatccgcaactgcgatgccaacctccgcggtgccaacctcagtgtatctgatctcagcctgccagcaatccgcaacctgccaccatacccagaggttgtacccatggagtgtatctgatctcagcctgccagcaatccgcaacgcaacagcagcggccgtcctgatggcggtcagtgtatctgatctcagcctgccagcaatccgcaacggacgctggcaccctcgcgcaggttgcggagtgtatctgatctcagcctgccagcaatccgcaacatggagcggcagttgcaattggaggaggacagtgtatctgatctcagcctgccagcaatccgcaacacagcgggtcatcgacagctcgggctcgaaagtgtatctgatctcagcctgccagcaatccgcaacaacatgacagagagcctagcagcaccactgagtgtatctgatctcagcctgccagcaatccgcaacctcaaggggatggtgcaatcgttccaaggagtgtatctgatctcagcctgccagcaatccgcaacggcgaacgcatcgtgatgcacggggatggcagtgtatctgatctcagcctgccagcaatccgcaacatgccagccaggatcatcaggaacccggtcagtgtatctgatctcagcctgccagcaatccgcaacatgtatggaatgcgtaggaatagattgaagagtgtatctgatctcagcctgccagcaatccgcaact

SEQ ID NO: 332 - DNA, 5570 bp, synthetic construct
  source 1..5570: mol_type = other DNA
  misc_feature 1..5570: note = Synthetic
gtcgctgtcgatcaacttgggttcggtgcaactcaaccaactgaccaacaaccctgcgctgtggaccgtgccagtgatgggcgcttatccgcaggtcgatttaggctcgataccagcaggtgccatgtcagccactggcagcaaccatgcagcgccgccattgcagacgccgcagtcccgtctgatccagccgcccgtattccaaacgccaacgacaccgcctacactgcttcttcaaaaccagccacctgtggctcagcagctaaggcctgggggcgtagcgattcctcaaacggcaatccgttagcgcagagtgacgacatagggtgcagcctgcaccttgtgctgctcacacgcaagcgcccaccagcacccattgctaggggaagaagtggggggagcagaatgccttcttttgctctaagcaagccgatctcgaaattttgagaagccacttcgagaagccacgccgcgcataaaaaagaccgcctaccgaggtagcgcggtcggttgctccgtagagcagtgcctgcgaaattctatttttgttgcgaaaaggttatttcgcggacgaggattggttacactgattgcaatcctaacaactctcttcctgattgcaagcggaattttagcaaatgtcaaaactcattctcggtcttgatcttggccccaattcgatcggttgggcccttattcgtgatgattcagacgatcctagccaatcggagttggtcgatctcggttctcgggtctttccagagggggttgatgccttcgatacttcgaaggaaaaatcccggaatgaggatcggcggattgcccgagcgatgcgccggcaggtccggcggcgggtggtacggcgcaagaatctcataaaagccttgatcgaatcgggcctttggcctggaggctcggcatcgcaggaagcactttatgggctcgatccctatgtgcttcgcgctaagggcctaaccgaacggcttgagccgcatgagtttggccgagtgttgttgcacctcaaccagcggcgagggtttctctccaaccggaaaaaagacaggggcgatagcgaagtcacgggaatgctcgctgagatcaatgaaaacgaagcgaagcgcgaggcggggggctttgcaaccattggcgaatacttggctagcaaggcaaagaaggaaggggacaagcaggcccatcgaaaccctgtcgaggacgaccatgtgcgtaatcgtcacttggctcgcagccaattctaccacgagttcgatgtcctatggcgtgaacaggcgaagcatcatcctgagctactgaccgacgcactccgctggggcaagctcggatcggaagaagaccccaaaaaagccgttgcctttcgtaagccgatatctaaaagcgacgaacgacgcaaagagaaaggcaaaaagctcagcgacctcaaatccttcggcttgcacgggatgatcttctttcaacggcccatgtactggcccaagtcagtcgttggactctgtgagttggaaccaaagcaaaagcgttgccctcgagccgatcgccatgcggaacagatccgcgtcttgcaggaaatcaacaatctcaagtatgccgataccgagacacacgaagaacatcctctcaacgaagagcagcgaacgcttctactcgaccatcttgccacccgtgagaaatccactttcgatcaaattcgcaaaaagctcggcttccttgaatcggtaaagttcaaccttgaacgaggaaagcgatcgtttctcaaggggatgacactcgattggctcctggcaaaggcgaccgacaaaaaatggcacgaccgtaccgaggaagacaaggacgcgatcgtcacgcttttgcgtgataatgagcgggaagacgatcttgttgttgcccagcttatcgacaagtacggcttcagtgcggagcatgccgaggcactgctcgacgtagacctcccgcccggctacggctccctttcacgcatggcaatcgacaagctcttgccacaccttgcgaaggggatgatctatcaatcgcaaagcgatcctgagcggagcgccctccacgcagccggctatctccgcagggacgagctacagcgccgactgttcgatcaacttcctgacctaagccgcaccaatccgcgcgactgcaaactgggcgacttgccgaaccctgttgtcaagcgagcgctcgttgagattcgcaaggtggtcaacgccattatcaaagcgtatggcaagcccgatgcggtacatgtcgaaatggcccgttcgcttcggatgggaccgaaagctcgcagtgagtacaacacgcgcactcggcagcgggaaaaagaacgtgacgaggccgcgaaagcaattcggaatacaggcgtggcggtacgccgagaagggatcattcgtttcttagcatggaaagagcaatcgtgcgaatgcgtttactgcggtaaggcgatcagccaggaacaactctttggtggtggggtcgatgtcgatcatatcttgccctactcccgttgccttgacgattcgcaaatgaacaaggtcgtttgccatcgcgaatgcaaccacgacaaaggacagaaaaccccgtacgaatggcttgccgatagcgatcccaagcgatacgaggccattggccagcgagttggctcgttgatgcgcaaaggggcttttccctaccccaagtaccgtcgctttttgcagaaagaactcaagctcgacgattttatcgctcgccagcttgccgatacaggctacatcacccgagcaacggtcgagtacctgcaactattgtttgacaagccgagcgacgtactgggactcaaggggcaacttaccgccgagctacgttggcaatggggcttgagtaccattctcagtgaattgcctgatagcccggcttggcaagaggaagccaatgtgccaactggcgaaaaaaatcgggccgaccatcgccaccatgcgatcgacgctgtggtgctcgccctgaccaaccgcaagcggttgcgagttctttccgatctggtccaccgaggcggagaacgcaagcatggcgaaattgtcttcgagccgtgggataactttcgtagtgatgtcgcaaagcgaatcgcagcggtaaacgtctcgcatcgtgtcgaacgcaaggtgcgcggggctttgcacgaagagacgctctacgggccaacgaagaaccctgaagaatgggtcgtccgcaaagcggtcgtcgatctttcagcagccgaagtagatcgtgtccgcgacccagccattaaaaaaatcattcgacgagcccttgccaacgcgggccttattgcaggccgcggcaagaaacccgatgccaagaaaatgaagatgacgctttccaacttagccatgccctccggcgtgccgatcaaacgggttcgccttatcaagccagagaaaaccatcgcccccttgcgcgaagagggggcgaaggatcaagcctatgtcaaaccaggctcaacacaccacctttgtatctttgagttcgaggtcaagggaaagaaaaaacgcgacgcggtcttcgtcacaatgctcgaagcaacgcagcgaatcaagcggcaaaagcaagccttggcaaagagcttgaacgaactgaagggccaaggcttgagcgccaaagaattacaaaaacaccgaaaagaagcaatgcgacaggccgcaactgaacacccacttatccaaagagacgccactcagctcagcagcgaagatcgcaaaaaaatccctgcagacgccgagtttgtgatgtcgctatcgagtcgggaattggtccttgctaattacaaaagtgaaaaactgcttttgcaattcagaacggcggcatctacctcggggcaaatatggttcactttggcaaccgattcacgcccaactaaaacacggaaagtatatagttttagagcggccacgctagacgctcagaaggtaacaactgatcccctaggccaaattcgctgggcaaatgactaaaaaatcgctggcaccgaccttgccgtgtgattaccgtagaatcggctcgccattcggttgaagccggtccccggtcacggatgacgctcactctcttggagcgacacccgtgattaaacggaccctagagatttcgcgagaagcggctcaccttgccgtgcgcaacgaacagcttctgctcaaacgcgatggccagattgtcggccagattccctgcgaagatctcggcatggtggtcgtcgatcacccgtgtacgacctacagccatcatgccctggtcacacttgccgaagcaggggccgccgtagtcctctgcggccgcgatcatttgcccacagccttggtcttgccattggccgaccatacgcaggtcgtctggcggcttgccgatcagatcgcagcgagtctgccactcaaaaaacggctctggcaacagttggtcgtagcaaaaatcgaaggccaagctcgcaacttgctccctgggctgcctgctcacaaaaaactgcgtgccttggcccgtgaagttcgttcgggcgatccgaccaacatcgaggctcaagccgccaaaatctattggcgcaactggctcgctaccgacgacccggccgtcgccgacaccgaacctttccgccgcgaccaaaacgcctcgggcgtcaactcttttctcaattacggctacgccattctgcgagccgcattgggccgagccattgtcgctgctggtctacagccggggcttggcctgcaccactcgggccgtagcaacgccttctgcttggcggacgacctcatcgaacccttccgacctttggtcgacgaccgggtccgagacatgcacagccagggctacgagacacttaatcagccggccaaggccgaattgctagagttgttgacgctcaccatgcgattgcctagccgtagcacaccgaatggaaacggaagccaagcaagtggtgaccagaccggcccgctcatggtcatgctccaccgccaagtagcgtcgctcgtccgttgctacgccggcgaggcacgacggattgaggttcctattccctcgatcagagaccaatcagaagcctccacgacgtcaggaagcccaaccggcacccaggagacaaccccatgcgaatcacaggataccgactgatgtgggttttagcgatgtttgatctaccgaccgacaccaaagcctcccggcgagagtacaccctttttcggaagcaactcttgacaaacggcttccaaatgatgcagtattcagtttattcacggccctgcgcaagccgcgagaatgcggaagcccatgtggcccgaatcgaggcataccttccccgcgatggcgaggttcgaatcctcgtcattacggacaaacagtttgagcgaatgcgaattttctgggggaaaaaacgtcgtggtgtggaacaacctcctaatcagttggaacttttctagttggccggcaggccacaagtcgttgccgcattgtcacttagcaggggaggcagtgtaaccaatccccgcccgcgaccaatccgcaactaagcaagggcgacacaatcg

SEQ ID NO: 333 - DNA, 5378 bp, synthetic construct
  source 1..5378: mol_type = other DNA
  misc_feature 1..5378: note = Synthetic
cccccctcccccgatgatgcccatacgcccgatacagaaaccccacctccgcccccggctgctgcaccgccagccgataaagctgcaacctgtgtggacgcgggggtttggatgccatcgcggtgaggattgtaccgtaaagacacgcaatgcgaacctgaccggcccggctgcggcctgccctggcccggagggcggctcgcggggggtctgccaccgtgtcgtcagggcgccatgtgacaatggcgcagaaaaaaggcggccgcccttttcgtggcggccggtcggaccgtggtccgtggcctgcgaacgtttcttcttgttacgagaaggtccgcgggccggggttggatagacgcccatatggtatcatcccgcacaggggattcaagtcctccggaggaattttcatgcccaccacactcggtctcgacctcggccccaattccatcggttgggcactgattgatgagtccggcccggctaccgggcggatcatcgatctcggggtccgcatctttcccgagggggtggacaatttcgacacctccaaggagcagtctcgcaacgaggcgcggcgggtcgcccgcagcatgaggcgccagacccgccgccgcgcagcacgccgccgcgcactgcgcgatgccttggtcacctgcggcctctggcctgcagatgccgcggaggccgaccggctgctggccctcgatccctacgaactgcgggcccgcgcggtggacccccaggccgagccgcttaccccacacgaactcggtcgcgtgctgttgcacctcaaccagcgccgtggcttcctgtcgattcgcaagcgggatcgcaaggacagggaactcaagggcatgctcgccgaaatcagcgagctcgagcgcgagattcaggatgccaacccgcccacgctcgggcgcttgctgcatggcaagctacaggcactcgacccatgccagcggcgcgagggcgatcatgtccgacgtcgccatacccaccggcacatgatcgaggatgaattcaatcgcatctggcagacccagcaacgtcaccatccccacctgttgaccgaccggctgcgctacggcacggtcggccgtcgccgctatccggcccggcccattcgacgcccgaggggccagacgctgctggaggccttcggcattcacggcatcatgttcaaccaccgccagatcttctggccgaggtcggtcgtcggctcgtgcgagttggaacccaaacagccgcgttgcccgcgtgccgaccgccgcgctcagcgcttccgcatgcttcaggaggtcaacaacctccgctacatcgaccccacccagcgcagcgagcgacggctcgatgaccagcaacgtgccctgctgatcgaccgcctgtcgcaccgcagggagatgaccttcgaccaggttcggcgcgagctgggcttcctggacaacatccgcttcaacctcgagaagggtgagcgttccaaactcaagggcctggtcaccgagtacgaactggccaaggccaccggcaagagctggtggaatcgccccgaagcgcagcgcaaccagatcgtcgatctgctgctcgacagcaataccgacgatgatgacaagcaggctcggctcgtcgacgactttggtctgacctccgcccaggcgcacgccgcgctgctggccgacctgccatcgggacacgtccggttcagcgtgcgggcgatcgagaatctgcttccgcacctggaacgcgggctggtgctcatggacgatgatgcgggcaactccgcccttcacgccgccggttatctgcggccggatgagcttcagcgtcgggtgttcgaccggctgcccgacccccagcgcagccgcgactgtccgatcggggacattccgaatcccgtcgtcaagcgggcgctggtggagctgcgcaaggtagtcaacgcgatcatccgcgagtacggcaagcccgatgaggtccacatcgagatggggcggcaggtcaagcagggcgaggaggcccggcgaaagtacaacaagaccatccgccagcgcgaggcggagcgcaatgaagcggccgacctgctgcgcgaacacggcatccgcgtcagccgcgatgcgatcaaccggatcctgctgtggaaggagcagggcgagatatgcacctataccggccggccgatcagcttccgccagcttttcggcggtgaggtggatatcgatcacatcctgccgtattcgcgctgcctcgatgactcgctcatgaacaaagtggtggtcttccgggatgccaacgcccagaagcgcgaccagagcccctgggaatggctgggtgagcgggacccggatcggttcaacgagatcacccaccgggcccgcaggctgccctaccccaagtaccggcgcttcctgctcaaggaactgcagctcgacagcttcatcgcccggcagctcgtggatacatcctacatcgcccgggcgacggtggcgtaccttcagtgcctcttcgagtccgaccagcgccactcggtgtggggcatgaagggccagcttacggccgagttgcggcatcagtgggggctcaaccgcattctcggcggcgaagatggcggcatgaagttgcgcgatgaccatcgccaccacgccattgatgcagtggtctgcgcgctgaccagccgctcgcgcatgcatggcctgacccgcattcgcaaggccggcggtgtgctccagaccggcgaagcgctcgatccgccgtgggaaggcttccgcgatgaactcgcccgccgcatcgcacgggtgaacgtgtcgcaccgcgccgaacgcaagatcgcgggcgcattgcacaaggaaaaaccttatggccccctacgggttccaggtggggaacgcaaggaaggcttgttcgtcatccgcacctcgttggatgagttgtctgccaacgaagtcgagatgatccgtgatccagttgtacgtcgtgtgattacccaacggcttgcagaacacgggatcgagaccggacgtgcgaagggcgaagccacgcgcaagatgaaagcggtgttgtgtgatcccgacaatcccgtgagaatgcccacgcgcaaccccgacaagttgggtccacccatccgtcgtgttcgtgtgatccgccgtgatctgaccatccgagccttgggaaggaacgatgatgcgggggggagcacctttgacccagcagaagaccgcacgaagttcgttaagccgggagcgacgcatcatctgtcgctgtttgagtgggctgtgaacggcaagactcggcgcgatgcggtgtttacgagcatgcttgatgccgcggatcggctcaagctgcgccagcagtacgtcaaggagagggtcacggcactcgagaagcaacgggtctccaggatttcacgtaaaggaccagaatgcggcgacctcatgcgggaagctgagcggcgatatcccaccatcacacgcgttcatccggaacactccgaggcaaagttcctgttttcgcttcggcgtggcgaatacgtcctcgcggatgtcgacggaaagcaagtgctcttggtgtttaatacagcagcctcaaccgaaaagcagctccgcttcttccatcatgccgatgctcgcccatcgaacaaatcgcagaagtcaggacagcgtcggctataccgcttccagccgtcaactctcaatgcccgcaaggtaacggttgacaccctcggccgcatccgctgggccaatgactgaagcgccgggtcgaaccgtccgatatccccttgggggcacttccgccccctccgcgggatatcgccatgatcaagcgcaccatcgaaatctcccgacagccggcgttcatctccgtgcgcctcggccaactcatcctccagccgcccgaggccgacaagtccgccgcgcacgccattccctgtgaggacatcggcctggtcatggtggatcagccacgggtcacctggacccacagggctctggccgaactgatgaagcatggcgctgcggtgtgcatctgcggcgatgaccacctgcccgccggcctgctgctgcccctgcccggccacagcgaggtcgtctggcgtatcgatgaccagatcaacgccacccggccccgcagaaagcgcatctggcagcaactgatcgccgccaaggtccgcgcccaggccgccaacctcgaacccggctcacccgcccgcaagctgctggagaacctggccggggaggtccgctccggtgacagcaccaacgtcgaggcccaggccgcccgcgcctactgggccgcctggctcaccgacggcccacgacacggaccgggcgcggccgagcctggccggcccgccgcggccggacccgcgctggccacgagcctcaccgccgaaggtggcggtgaggtgttcgatgccgaccgcccggatgccccgcgcttccgccgcgaccccgacggcctggacccgatcaacatcatgctcaactacggctacgccgtgctccgggccgcggtggcccgggcgctggtcgcggcggggctgctgccggccctgggggtccaccatcacaaccgcgccaacgccttctgcctggccgatgacctgatggagccgctgcggccgatggtcgatgcgcgcgtgcgcgagctgcaccgccgcggccacgcccgcctcgaccagctcaccaaggcctgcctgctggatgtgctggtggagccggtgaagatcaaccgccagcgcggtccgctgatggtcagccttcaccgcctggtggcctcgctgcgtcgctgcctgcgcggcacgggccggctcaccgtcccgatcagcgacggcccggcccggatgcagcgcctggaatcggactcgggtccggcgccggccgcgggcgcggccggtgaaggggccccggcgtgctgatcagtggataccgctgcatgtgggtggtggtcatgttcgatctgccggtggacaccgccgatgcgcggcggcaatacgcgcgtttccgtaaatcccttattgaggatgggtttacgatgctccagttctccgtctacgcccgccattgcgccagcgaggaaaacgccgaggtccacctccgccgcgtctcggccatggtcccacccgacggcgaagtccgcgtcctgaccatcaccgacaagcaattcgagcggatggcggtgtacctgggcgaaacccgcggccaaccggaagctcccccgcctcaactgcaccttttctgagcggccaatcgcaataacctcctgtcagcaagtcacttcggcggggaagagtctatccaaccccggcccgaagccaacccgcaacctatgcgacgtgcccgtatacacccaccccagtctatccaaccccggcccgaagccaaccc

SEQ ID NO: 334 - DNA, 5190 bp, synthetic construct
  source 1..5190: mol_type = other DNA
  misc_feature 1..5190: note = Synthetic
ggggcacaagctgaaggtcaaatccccgatccgtgaggtggatcagcccatcaaaaaagccgccgcagctttcgccgggcgacccctgcgctttagctgcatttgttacgcgcccgcaagctgaacttcaaatcggcgctggagaaagagtagtacatgtagccggccggatcaaacgaagtcgacctagcttacctagagaaactttcattctctcgaaatctcatcgggcttgtcaaaacatgagagatccccccgctggccaaggccagcgggggtaacccttctgaagggaaaaaccctcttaccgtggcttccctacagacttccctgagggccgaagcttgcccctttgcggtgtaatcgtcaatatccctatcaactcgtgggcgatagcttcttgaaaatactcggggaggagcaaatcatgtcgaacgtccgtgattatccaatcgatgaagacctcgccatcggcctcgacatcggcatcggatcggtaggctcggcagtagcctcacgtgacgccgtgctatttgccggcagccgttgctttgatgtaccggaggagcccaagacccgcgaactcaagaacaaaacccggcgggaaaagcgtggacaaaggcgggttaccagacggcgccggcagcgcctggcggcgattcgggatctactgcttcgaaacggtcttttagagagcatcgacgtggccaaagagggtcagcgcgaccgggcaactcccgatccctggcaggcgcgtgccgccggtctcgaccgatcacttactaccgaagagctagcggccactcttatccatatcgccaaacatcgcggtttcttgtccaaccgcaaggacagcggcaaccaagaagcgccggacgatgacaagaagatgcttgccgcgatcaacactaataaggagttgtcggggcgctatcggacggtcggcgaaatggtggcaaaggacgcccgcttcgccatcagcaagcggaaccgcggtggcgactacgcgcacacactcgcgcgcaacgacctgaaagccgaggtagcgaccctgttcgccgcccagcgccgccacgccaataccgaggcgagcgaaactctggagtgcgcgtatctggacatcgcgttctaccaacgtccgctccaggacagcgaggacatggttggagattgtcccttcgaaccatcagaaaagcgcagtgctcggcatgcgccatcgttcgaaaagttccgcctgctatccaagctcaatacggtcaagatcatagaggcggataacagtctgcgtcgccttaaggtggctgagcttgccgccgcgctcgatgatttcggcgctcaaaagtcgattacctggaaaaccctggagaccaagctcggcttccgcgacgggtgccgtttcgaaggcatcgacgagaccaaggcgaaaaaggatgtgtgcgccgccgctggcgcctcgcggggtaccgcgacaatccgcgaagttgttggcgccgccggttggaacaccctacgccaccaggaggcgacgctcgacgatatcgtccgcgtcctatccttccgcgatgacatcgcgagtatccagcaaggccttggcgaaatcgagctggagcccctggttctcgaggcgttgatgaaaggcgtaggtgacggcaagttcagcaagtttcgcggtgccggccacgtctctgccaaggtcgcacggaccctgttgccgccgttgctcgatggcaaggtgtattccgaggcatgcgccagcgtcggttacgaccatgcccaggcgcgcaaggtgaccattgaagatatccgtaatcccgtggtccagcgctgccttcgcgaagcatgcaaacaattcgaggtcctggtccgcgagttcggcgtgcgtcccggccgggtggtggtggagctggcccgccccgttggcaaatcagccgaagaccgtaacgagatgaccaagggaatcgagaagcgcaccgccgaaaaggagaggcaccgcgccgatatgcaagagctgcttggcctggacagcgagcccgatgctgaggacttgctacgttacgagctctggaaggagcaaggctatcgttgcatctataccgatcgtgagatcgctcccgaagacattcgcgccgatcgtaatcaggtgcaggtcgatcacgtgttgcctcgtagtcgtagccaagacaattcgtacacgaataaagttctttgcctaactcaagccaatcaagacaagggccagcatacaccctgggaatggaaggtggagaacgagggcgacgatgagtggtggcgtgagttcgaagccagggtacgtgcgctacagatcaagcggttcaaacagaacacgctcctgatgcgcaattttcgtgaccgcgagaacgtcttcagcgagcgtaacctcaacgaaaccaaatacgcagcgcgcgccacacttgcagcgctacgcgaatactattctgatgaacccgatcccaacgccgaaggctacctaagcagaaagcggcgactcttcgcacggccgggaacggttaccgcacagctcaggcgtgcctgggggctggagggcatcaagaatcgcgccgaagaccgccatcatgcactggatgcactgatctgcgccgttggctcggaagccactttgcagcgactgacgcgcgaataccaagccctggaaagggaaggccgcgcccgctggacaccgaacgtacgaccgccctggccggacttccgcaacaatgccatcgccgccatcgagagcgtcttcgtctcgcgcagcgagaaacggcgcggacgtggtgccggccacgatgccacgatctatgcggtgggcgtcgacgaggacggcggcgagatcacctacgagcgcaaggcggtcgccaagttggaaaagagggaccttgagcgggtcaaggatcccgagcgaaaccgcgccctgatcacatcactggaagcctggatcgaggccggaaagcctagggacgtgccgccgctctcgcctaagggcgatccgatccgtaaggtcgccctgcgccgcggtcccaaagcaggaatgaagctcaacgagggccatgtggacaatgccaacatggtccgcgtcgacgtattcgctaaagagggtaggttttacttggtgcccatctacactcaccaggtgatgaataaggcaaagtggccaaccccaccgaacagggccatcaagccgaaagctcctgaaagcgaatggccgattatcgacgagagatttgagttttgttttagtctctaccccgattgctatatcgaaattgtcaaaggcaatggcgaattgatcgagggctattaccgatcaacagaccgggctaacggggcattcacagtatctacgcacaacttgcgcctgccactgatccgaggcattggtgcaagaacccttcactccttccgaaagttccaaatcgaccggctcgggcgcagacacgaaatcgtgcgggagacgagaacatggcatggcgtggcgtgcacgtgaccgagccggcccagctgtcgcttagggagcgccggctggtggtggcgcaggatgacggtgaggttgccttgccgctagaagaccttgcctggatggtgctcgacacgccacaggtgacggcctctgcggcgctgctgtcggcgtgcatggaagagggcgtggcgatcgtgctctccgatgccaagcacatgccggccggaatgctgttgccgtttcaccgccactacgcccaggccgaggtggcgcgcacccagatgagctcttccgagccgctcaagaagcgtctgtggagggcgatcgttcggcgcaagctggaaaaccaggctgccaatctcgaccgcggccagatcgacggcggcaacagcttgcgggaaatggcccgacgagtgaaatcgggcgatcctgacaatgtcgaggcgcgaggggcacgattctactggggccgcttgttcgacgacttccgccgccacgacgaggccgatgtgcgcaacaccatgctcaattacggctacgccgtgcttcgtgcggcgactgcacgtgccctggttgccgccggcctgctgccagcttttggtattcaccacgccggggcgctcaatgccttcaatcttgccgacgacctgctggaagtgatccggccgctggcagactggcgggtattgaatatggccgaccacggtcgcccagcagacgatgcccggctcggcaccgacgaacgccgccagctcgccgcgattgctaccgagaccctgattatcgacggcgagcaaatgacggtgctgcccgcgctcgatcgcgtgacggcatcgctggtgcgggctctgtcaggcgatggcgacaaggctctccgcctgccgcacttgtgagcagccaatgcgaaagcaggaagttcggttcatgtacgtgtttgtcttctttgacttgccggtgggaaccaaagccgagcgtcgcgacgcgacacgctttcgcgcgttcctccgcaaggatggttacgatatgatgcagtggtctgtgtatacacgcgtttgccgagggcaggatgcagtcgacaaacacatggagcgggcagcaaaaagccttcccggcaagggtagcatccgcgcactgcaagtcaccgagcgccaatttgcgcgcatgcgaatgctgctgggcacgcccggcaagcaggaacaaaccgggaccgatcagctggttttgctctgatcgatcccggtttatccgttatgccttaaggcgttgccagtctcctagcctacctcagggaagtcggtagggaaaccacggcacggcacggtattcctgccaaatgcttggcttcgcctgaaccaaaatggcggtaagcccctcaacgcctccgccgtccgttgcagtagattttacagcaccgccagagccgtgccagccagcgggcatcagggtacaagggtaggtcgtactgcgcctggcggggcgctctaaggcgctgcattcgcgagcattgcggcgaggtagaccccgcggccattgctgcgctggaacgacttccctgaggtaggctgggacgactgccggaggcggcgcttccgttgccgtggtttccctaccgacttccctgaggtaggctggagtgatccgccggggcttttccttgcccgccgtggtttccctaccgacttccctgaggtaggctggcccgagtcggagtc

SEQ ID NO: 335 - DNA, 23534 bp, synthetic construct
  source 1..23534: mol_type = other DNA
  misc_feature 1..23534: note = Synthetic
aaagaatttgccatgaagaaatttgagtgaatcttagaaacttatcagtgaataatttataaactaacgactctcttttcattcagataaaaaagatatttatgaatcgtggaataacccaaatcttctaatacagaagcataatgattcacttgatcggcatgtttaggttcttcttttccagttttataatcaataattattgcattattttcttttaacaacactctatccgggcggagagttgttccatccggaagaagtatctcactctcagtttttacagtccaatctgtattgaaccaatattcaatttcttttaatgacaataaatctatgatgttttgtttcaggatttcactctcctcttttgaaactaatccttgtagaataattttcgttatggaagaatcaatatcatcagtagtgatgatctctgcaagtaccctgtgaactaagattccataattaattttgcgagttttttcattgtcaaataattcccagaaagcctttgctttagggctgattgtaatctttgattgccaccgtgagtatggataagaagctaactttgtaagtattaaattctcttcattcattgaagaaatatctacataaccattctttataacaataccagtttcataactattctcctctggattaaagatccattcattagtattatcagagctaagaatgtttgctatcaacttgcttgcagaagataatttttcggattcctttgtttgtttgcagaagatgtatagcctgtcttcagggcgagtaaaggccacataaagaaggtttagattgtcaatataatttttaataatttcctgtgaatagaaatctttaaaataacttttctctaaaatctttgtagaatttactggaaatatcggtgattgattgaaaggctcctcattagaactaacccatagaacagagtttgattttggcttcaaatcccaatcggcaaggggaatcaggactataggaaattgcagaccctttgatttatgaatcgtcataatagttattgcatcttcgttttcaggaactaccagagagcatttatcactctcctgattctcttcccaccaatcaataaagctttgcagatctcctttattcttatccaaataatctaaaatcaaatcctggaaacgttgaatgtatgcatcaggcattttattcaagccaaatacctcaatgatctgttcagtcatttcatataatggaagtgtattgagataagacatatacattgcaaattctgagggaagttcttctttaaatacttgtttattttgatttatggaggaaaataattcatgcaaaacgggataaacatcattcaatatattggtataataataaaatatttcagcggcagcaatcctgtcatgacggtcattcagataacgataaatattaagaataaactgtacttgaggagccttatagagcaataaagaatcagaacttataacacgtgtatatccattatcaaacaagtatcgggcaatttcatttccttcagtatttcttcttactaatatagctatatcccgcatccggtagccatcttgttcacattgtttaatgatggcaagggtattttccagagctgtttctttccatttttgtgccgctgtttcttcagtttctttttgatcttcaaggaattgaatcttcacatatcccccttccagatttttctctgaagtatgctgatgcaagtcctcaatcgaatatgctttatgaaaccagtcatctgcaacaagattacattcttcagcaattatttttgatgccgttttaaagaactgattgttgaatcgaacgacataatccttgcttcggaaattagtattcaaactatattcactaattacttctttgaagtgagaaaggctatcagccacaccgtttaaaagcagtttcatattgcctccacgccagcgatagatggactgtttcgcatctccgacaataattgcattatatccattggcaagggaattatttattaaaggcaagagattattccattgaaaatcggaggtatcctgaaactcatcaatcaacaaatgcttgaaacgatttccaattttttcatacacaaatggtgtatcgttatctgcatttattacactcaataatttatttgtatctgacaagaagacgatattattctcgtcccgatattgctttaatttttctttcagatgagacaaaagtccataaatataaatgagtttgtgggtttccaatgcagaaatatatgcttcaaaatgattcgtataatagtcaatacaattcatcagaatctcttgaagtccctttctcccttctactccttcgacacattcaatgattctgtttcgtacagaagaagtctttgttgtccatttctcggtatcttcaaaagcatctataacacgctttccaggctcataatccagaggcttcacggggtaagtaattttattgaaataattagcaactcctgcttttccataagcaaaatctgtaacagtaaagccattaaactccatgacctgaaatgcttcttgtgcaaaagatttcatgttcttttcaaaatgttctttgatagctttaagctcattggcaagtgctttcagcgcatcatcatttacaaaatctatgcgatcattcaactcttccctgaataattctttagcaatcttttgaagatcaaaatcaatgttccaacctctgtcctcattgatttttactaataataatttactcaaccaatcagtaacattggcattaagacctacttccaaaagaaggtgatcagagatcgtattgatgacttgctgctggtctaattcaatatcaaatcgcaatgaaagcctcaattcataagccaaagctcgcactatcttctgaaagaatccatctatggtctgcacagcaaaagatgaataatcatgaaatatattttctaaaaccttttttgcatttgcaggaatatctgctgttagtccatctttcttcaagtcatttgccaggtgctcaagaccgccatccgacaaggcaatcagggcatccacaattcttgttttcatctccacggtagccttattggtgaaggtgatggcaagaatatttttataatctgagggatggctcaataccaatttcagatactcttttacaagcgtataagtttttccggaacccgcagatgatttataaatttttagcatttcaatggcgcaaaattactttattaagtgtatgttggcggtatttcctggtgtgtggagcacataaaaggtaagttggtgttatttcttgtattagggttgtatatttgtatatggtgattacgtttcagtgttcattagcgacatttattaaatagttggtagcatgcttcggtgggttcggctcatttttataaatgttggcagtaattgcttttgttaataagagggcaaaagtaggaattcgggattaactttacctaagttgcaagtataagtaaagttgaggtaaatccgattcatatctaaaacacaaatcaagagatctactataaaatgattttcctttactgttattatcatcacccttgcggttattatcatcacccttgcggttattatcatcacccttgcggttattatcatcacccttgcggttattatcatcacccttgcagttattatcatcacccttgcagttattatcatcacctttactataaatgtattcacctttaccataaatgtcttcccatttatcggaaaagtctttaccccaaccatcataacctttaattaaacagggtttgccactgcccgttgtattactatacaaataaaaagggtgatttgatcaatgggcaaggtaattgggcgagtatccataaatcatattctttaatagaatccttagttcacaattgttttcaatttttagaattcctattaattttgaccttataggataacaaggctggtaactacttcctcaccaacttcgtcattcatcattttaataactttcgccctgttataatgaagttcctgttttaagggcgaagaaagaacgcggacatataagattctatcacggatgaatacttcagatgtacgattggcaatggttttgcccatcaccttttcccaggaattgacgagcttcacctctttcaatttaccccgaagacgataggcattcaagaggtcttgaataacttctttcagagattgttcattgctgtttcgcataattataaagtatttggaaggcgcaaaattaatctattttcattaggaattaaaagttatagaaatactaaaactttatattttttatttcgtaaaacattaaaaaactactaccatgagttgcaatcttggaaaaaaagacagattaatcaggtttagtttcggagcctgtttcttaataatcggagtcttgttgcaatcatggtggggaagccttgctattgaacctttgctgacagttgtattttccttttcaccagtttatgcgatgtttggaatagatacttttgatacctgaacgattactttatattctgtaataaatggcaaattcaccagtaaaagtaaacctttcaaaagaattatatccccctaagccacccattaaatcaaagacaaaaggcgaattaaaattaaagaactgaaagtctaatcctacaccggtattataaacacttgagacgctggtagttgaagaagaattataaggataattataattatatcctgtagagatggtcttttggtataaaagtgaatttgcaaaataaacaaacaccctgtgatcaggggcttctttaatgctttgaagaagagtgaatcctgcacttacaaaagagttgttgtttttgtcatagtagggagctaaattaatctggaccccgaaactctgagggacataacgatatgaaattccaaagccggtagtaaatcctgcacctaaacctatgtaatgtttagatattggaaatccatttgaattgtcttgggcatgaacggtgagaatagaaaacagtaaagaaaacagggttaaaagaattggatttttcatgatattagtattgattatttattgtgaaatattttgaaatatatagaagtgatatgattcattgaaagaatattcttacagattcttctgaagaaagtcaagccacatctggtagagatgctgcctggtattcccaccataaattccatgattcttgttaggataaaagaaagtatcgaattgtttattggctttaatcattgcagtcacgaattccatagaattctggaagtgaacattgtcatctgccgtaccatgaatcagtaacatctttcctttgaatttgtcaacataaaagatgggtgagttttcatcataacctttaggattttcctgcggtgtctgcatatatctttcggtgtaaatgttatcataatatctccagttcgtgaccggagcaacgcagatgccggctttaaaataatcagcacctttggtcatacataatgccgtcataaatccaccataactccagccttgaatgcctatcctgttgccatccacatacggaagggtcttcaggaatttggcagcctcaatctgatcatcgctttctaattttcccatgttaagataagtacattttttgaatgcctctcctctgtttcccgtacctctgttatcaacagaaataatgatatatccaagctccgaaagcagttgatgccagaagtaatcacgaccaccccaggagtcattaacggtatttgctccaggaccaccataaacagtcatcaggacaggatattttttgtgcatattaaaatctttgggaggaatgatccaggcatttaattccatagaataggagatgggaatcttaatgaaatcttttggtttgatattatattcaagcagctttttcttcagtgtagaattatcttccaacgtcctgactactgcgccatcattagtgttaagagtaattatttcaggagtattggcatcagaatggaagttgataaagtatttgtagttggaagaaaaattagccctgtcactacctctctgattagttaattgtttcaaatcactgccgtctaaattattggaatagatatgtcgttccataggagtagggtcagcagcctgataataaactactttattggcttcatctacgccatagaaattggtgatgtctgcattcttcactgtgattttattctccaggtttccatccatcttatagagataaagctgatggtatccttccttctcgctcgaccagataaaatgctttttatctttaaggaaaaccatgttgtcagtgatctctatataggtcttgttctcttctgtcatcatggtttcggtagtacctgtttctgcattgcctaataacaaatccagtttattctgatggcgattcatcttataaatacaaagaatattcgggtcttgagtccacttgattcggggaatataaatatcagtatctttccctatatcaaatttgtttatcttggcagacttcatatcataagcataaatatcaaccaatgaatttgcttctcctgccttgggatacttatagacatattcttcaggataaagcgtaccgtatttagctatctgatactggcgaaccttgcgctcatcaaagcgataatatgccaggaaactgccatctttattccagaagaatgcaggcgcaaattcaaactcttcctcatacacccaatcgcaggaaccattgatgatttcattgattttgccatcaaatgtaatttgcttttctccaccagtctggaggtctttgacaaagagattgttatcccttgcgaatgccaccttattacccgatggagaaagagaggcatattgctgttttcccttgtcagacactggtgtcagggtcttttctttccggtccagaataaaataagtagcagtataggagcggcgataaataggagtaacatcggtcttgataatgattttcgtttcatcggcattgaactcataatcgccgatatttatcttctgacccaatcctttttcggtaactacggtatcaatcagtttacccgatttatattcatacctcaatattgcaccatcagaataggtagtataatgaagtccgtccttcatggattctataccactgacggtctcagctttgaaagtattatctttccagatatcgtttaaggtaatatcttttttatcaacttgggcaaagatagcagaactgatcaacaggaaagccagcaacgatttatttttcatcattcatattttaattatggctgcaaaattaagaataaaaaggagtagcgtttaatcgggttgttttctgtgccattttatgcctgttttattgctcttagtatcatccattaaattattccttttttacccttgttttaccctgtttcgttaacatttgaagggggtaaaagtctcgtttttcattttttgctggtattgaatatcagcgtattaggtgttttgggtagcattattgacactcgccaagtgtttattgacaatcatcaggtgtttcctgacactcgccaacagtttcctgacactcgccaactgtttcctgacactcgtcgacagtttattgacactcgtcaactgtttcctaacactcggaaacagtttgctgacactcaaaaactgtttactgacactcggaaactgtttactgacactcggaaactgtttgctgacactcaaaaactgttggagcacactcattatcctcttttcaggttgcatccgattcggaggagatttgctgttttgaggtcgaaatagattgtttatatcctatgattttcgagagcaaaatcacaggctctttttctggtttaatggggttggatcagaagaccgtattgaggtgatttttattaaagatttggtcatgggtgaaatccgttgttttgatgtttaattgaacttaaaataacccactcatcaacaggtttcacccatgactgaaaacagtatatcatagcgaaaaaaaatgttcatataggacattcacaaattagaaacattgactggaagtatatttggaatcggggatagtctaatagtaattgaagtagtgattgcggacgtataggctccatcgagcaacgggaaattgtcatcgagcaataacattttgacgtagggcaatgacatttcgtcgtagggctatgactttttcccatcgagattggttgatttcacgtagggctatgacttttttacgtagggctatggctttttcccatcgagataggtttatttgacgtagggctatggctttttggcattgagacggaacattttgtcatcgaggagattccttttttgactttatatagtgaatgatggataattgcaggtgaatctgatagtgagaaaactgaaactttcgttgtgttgaatgaatgttttattgtggagggtgaaagggatattgagaacgctggattttaggattggggaggataaatgaggaatgagattgaaggttcacacaaagggatcaaaggatttctagaaggaaaagaagaatggtgggaataggaacgctgatgacgctgaaaacagggaacaggtatgatttttagggggtatggaacgctgataagaatgattgcttatgataaggtatgatttttcttagccacagattcactgattaaaaagaaaaaaaatcgcagaaaaaaaataagagaaaaaagagagatacacagggatggaatgttaccacagatttctcggatttacacagattataacgggattaaaaatcccgagtgagtaggcacagcattgcaaattctatctaacgcctccgtatgttattgatatttaaagatttgctttaaccatattttataatttaaattttacaataatacatttcaaaaggctgtgttttaaaaatataaagtattctatacgggatgaaagcatttgaaaatgtttctcaccaatcattttttcaatcgttccatttggaacttccacagcccaaccataatgctgctcggactttttatgtaccattttgcaatgcggcctcataagaaatgtgaacagtgcaaatttacgaattctaccgttagaaaaacatttttaagactttttagtcgtacaggtaatgctgcagagcgagacgcatatcctgcggttctgggagtaggcacagcattgcaaatgctgcggagcaatacacatatccaacacgtctggagaacaggtatgatttttagggggattggaacgctgataaaaatgattgcttatgataaggtatgatttttcttagccacagattcactgattaaaaagaaaaaaaatcgcagaaaaaaaataagagaaaaaagagagatacacagggatggaatgttaccacagatttctcggatttacacagattataacgggattaaaaatcccgagtgagtaggcacagcattgcaaatgctgcggagcgagacacatatcctgcggctctgggcgagacgcatatcctgcggttctggctctgggacacgcatatcctgccgctctggtttacacagattataacgggattaaaaatcccgagtgagtaggcacagcattgcaaatgctgcggagcgagacacatatcctgcggctctggtctggctctgggacacgcatatcctgcggctctggtacgcctttgaaacaacgtgttgatggcatgagaaatcaaaactcgttttttttaaaaaagtaagccccaccgaagcggggctcaaggtctaaaccttcggcatatagccttattgtgataagaaatcaaagattgaatttaaatttctgggggcaaagataaatatcttttggtaaatccaaacttttatttgctacttttgcctccttaaataattaacactattagataatggctaaaatattagggcttgatttaggtacgaactccatcgggtgggctttgatagaggatggaaaaacaatcttgggtattggtgtaaggatatttcctgaaggtataaatagggattccaaaggaaaagaagtttccaaaaatgagagcagaagagagaaaaggcaattaaggagacaagcctatagaaggaaaatgcgaaaaatgattctggtaaaagaattgatgaaacatggtatgtttccagagattgaaaacattaaggatgtaattcaagatgtttatttacctgaaaatttaaaacattatttctcaactaatccttatgaacttcgggcaaaagcatataatggagagcaactttcattgttggatttaggtagagtattttatcagtttgcacaaagaagaggttataaagaagatttgctttcagatagcgatgaaaaagaatctaagaatcctgattataaattaaagaagacaatttatgaagaaacaaaagatataattgacgaaacaacacttggaaattatcttaactctttggactctcataaagaaagattacgcaacagatatactgtaagaagtatgtatcaaaaggagtttgatattatttgggataatcagaaaaaatattatcctgaaattcttacagatgatttgaaacaaaaaattggagatgctactgatggtattttattcttcaaacgtgatttgcgttcgcaaaaggatatgctcggtaaatgtacttttgaaccaacaaaaacaaggtgtgctttgagttcaataatttatgaacaatatagaatgtatcaatttattaactcaattaagataggagaaaagtccctttcaaaaatacaaaaggaagttgtaatagaactattcaatagtaaggacaaatttgactttgaagaaataaaaaagaagttgaaacttagtcaagaaaacttcaattacgagaataaacaaaaagttttaggtaatagaacaataagtggatttagaaaaatatttggtaaaaatgtatgggatgatttatcctttgatgaacaagaaaaaatttggcatattaaatatactgctaaagacagagaatggatagaaaagtatgctaaagataattggggttttgatgataaacagataaaagctttttgcatcttgcgccttgccaaagattattccaatttaagcaccaaggcaataagtaatattttaccctttttgaaaaaaggtaaaatgtaccatgaggcggttttgcttggaggtgttaagaatgcttttggcaatgaatggaataatttgaatgatgacaaaagagacttgattgaaacgactattgaagaaatatcaatcaatatggaaggcaaaagtaaagataatatttctgaatggttgaaagaggaatttcactttactgataagcaattaaaaaagttgtatcatcacagtaatataaaggaaacaaaagaacaaatggagtttctaccagaaccagaaaacattagaaatcctattgttcaacaagcattatatgaattaaaaaaattagtcaatgtaattattgaggagcacggaaagcctgatgaaataagggttgaattggcgagagatttaaaatcttcaaaaaatgaaagggataaaatcggattaaaaaattgggagaatgaaacagagaatgacaaaataaaagagcgattagatgagtataataaaccacatacaaggcactttattcaaaagctaaaactatttcaagaaattgaaaaggtcaagggtgttgcctgttgcccttatactggtgaaacgataaatatttcatctttgtttaatgatgggtatgttcaaatagaacatatcattcctttaagtgtttctttagatgatagctttgcaaacaagactttatgtcttgcagaagaaaataataagaaaggagatctaaccccttatcagttttatggtatggatgaaaaacattgggaagtagtcaaagagaatgctaagaaattattaccctatcataagtacaaaagatttgtttctgaaaagcctcctgttctcgatgactttatttcaagacaattgaatgatacaaggtatattagtaaatcagcaaaggagtatttgaaatacgtttgtaaaaatgttaccgtggcacaaggacaagttacatctatgttgaggcactggtggggcttggataatattttaaataaaacttataacatgcaaagtcttgctaacggggaatatttggctgcaattgacaaagacaataatattattgagattattaagtggactaaagaacataaaaaagatgaagaacgattagtaaaacttggaaaagtaatatcaggcaatgtgaataaaggtgttttattcccatacaaaacaagagacgaccatagacatcatgcaattgatgctttaactgtagcctgttccaaaacatcatatcttcaaaagatttctcaattatcaggtagaggttatgatgatgaaatgatcaaaaagctttccaactttgaagcaccttggaacagtttttatacagatgcaaacaatgcaattaacaacatccttatttcgtataaaaacaatgtgaaaatattaggcataacaaaaaagaaaataaggaaaattgttatcaataaggaaggtaaaaaggaaattaaaaagtatatcgggcaaggtatttctgcaagagggcaactgcatgatgcgagtgtttatgggaaatacaaaaacaaaaaaggagaagagttttatcacaaaagagaaaagttagaagcaataacaaaaaaagcacaagttgataaaattgctgattctacaataagtgaattaattaaagccgcaattaaaaagacaaatcctttgattgactttgaagctaaatcttatgatgttcccgcgaatgctttttttagaactgatgaaatgggaatcaaacaacctttagtttttttaccaaataaaaatggagagcctattcctataaagaaagttagattgaagtatgtttcaagtaatgctgtagagctaaaatcagtaagagaaatcaatcaatgggtcgagcctggaagcaatcaccacattattgtctatgaaaataatgaaggaattattaaagggaaagtaattcctttttgggatgcagtagaaagaaaaaagcaaaaattacctatattccaattgcctgaaaatggaaaagaaataattgcgacattgcaaataaatgacatgtttttactctgcatgaaagaagaagatattgattggaacaatcctgatttgaaaaccctttctgaaaatctttatagagtacaaaaactaacagctgaagcttataccttaagaaaagcagatgcaacttccattgaaaataaaacggaatatatacaattcaaatatagcacttggaaaaaatataacccaattaaggtaaaaatttctccaacaggtaaaatcaaaaaaagtttaattattgctcaaacaatccctatatttcgctaacccctttcatctctcgacagagttgaaacaattggttattacgaacaaggaatcgggggaagtaaagaaaagacctattgaggatttgggctttgtggtattggataatcagcaaattacgatgacgcaaagcgtgatgcaacagcttgctgaaaataatgttgcggtggttatttgtgatgataagcaccaccccgcgagtatgttgtttcatctggatacgaaccaggtgcaaaacgaacggttcagggcgcaggtggaggcgagcgagccgttgcggaaacaactttggcagcagacggtgaaggcgaaaattaataatcaggcaatgatgctgaaacggattgggcaggatcatgatgatttattgtatctggcaaggcaggtgaagagcggggatactacgaatgaggaggcgcaggcggcgaggaggtattggagtaaattgttcggtaatgacttccggcgcgaacgcttcgggatgcctccgaatccttctttgaattatggctatgcttacttgcgggctgccgtggcgagggctttgagtggcagtggtttgcttcctacgcttggcattcatcatcataataaatacaatgcctactgccttgcagatgatattatggagccttatcgtccttttgtggatttgctggtttatgagcaaaaacaaaagcatgatgactaccattatatcaacaaggacaggaagatggagttcctcgctttgcttgggagcgatgtgattattaatgataagaaccgcccgctgatggtggctttgtcggagactacttcttcgcttgcagcttgctttgaagggagggagactattgtcaaataccccatttttaaggtatagggaaatagggtataatggtatatggcgtgtacctatacctctattccttatacctttatacccctattccctatacccataattgtaacctttctatcttactttgggttaaaagcccctacatgaactttgaacgcttaaatgcttatagaataatgtggttaattgtctatttcgacttacctacggagactgcgaaggaccgtaagaattatgccaagtttcggaaacaacttagagaagatggtttcacgatgctacagttttctgtatatatccgtcattgccccagtgccgaaaatgccgatgttcaccagaagcgggtagagaaaatattgcctcctgcgggcaatgtgggtatcttgcgaataacagataaacaatatggaaatattgtgaacttctggggacgaaaggaacagcctctggaacaggcaccccagcaattggaattgttttgaaggggaaataggaacgcagataaaaatgattgcttatgaaaagatatgatttcaaaaaatcttattttgtcataaacaatcatttttatctgcgttcccattcccatcataaaataaaaaaacgggaaagaagagtatcacgctcatcaatcccgtttattttaaacgatataaaacccttgtaagttgttgaatattagaagaaatcactatcaactaatatcgtttatcaatctttgaaatcaaaccacaactatccataggcaaatataaaagtattgccaaatatcgtttatcaatctttgaaatcaaaccacaaccaattgtgttttcatccacttctatatttaatatcgtttatcaatctttgaaatcaaaccacaacctatgacaatagaaggcgaaaatttcaggcaatatcgtttatcaatctttgaaatcaaaccacaactaaggatttataggtcatcctatcctctggaatatcgtttatcaatctttgaaatcaaaccacaactaaatctcttggattaaactcggtataagaatatcgtttatcaatctttgaaatcaaaccacaactactgctccgcctgcaataatcagcagtgtaatatcgtttatcaatctttgaaatcaaaccacaactttattgagaatataataatcacctttcaaatatcgtttatcaatctttgaaatcaaaccacaactctcttcctacactgctccacgttatattaatatcgtttatcaatctttgaaatcaaaccacaactaagatagattccggcaaagctgccatagtaatatcgtttatcaatctttgaaatcaaaccacaactgtcaaagactatttcgccgtcttcgtattaatatcgtttatcaatctttgaaatcaaaccacaactaaaagaaagtgatggacatcctcctatttaatatcgtttatcaatctttgaaatcaaaccacaactacaggcatatcaccgttcatcttcagggaaatatcgtttatcaatctttgaaatcaaaccacaacaaatcatctttcggctgcaaaattaaccagttgttatatacctgaatttgtaaccaaatattttttctcatcaaaacaaagaaagaattatgtcaaagagcaatgcggcaaatgtactaaacacaaggataatggaaaacattacaaacaaaattcgttgttatttcttaataaaaaatttaattaaaatgatgtttgaaatacctgaaatgatagaaaaaaaccttttaggaaatgcgtgattttgataccttaaaggaaggctgaaaaagcctgcctttaaggaatgtgggaattatgtaagttatttatagaattatgtaactgatgactggaggaatggttgtaattttgcggcatgaaaaagaatatgaattatgaggatgagaagccctttgaaagtattgaggatgtagaggaggaggaatatctgccgagtgatggaaatatatatgctgctgaattgatagcggcatataagggtggtgataagggggctttcgtgaagctttgcgggatatacaggaaatggatgaagtcgaagaattatttttattatgacaggaatgatgggaaagcggaggaggcgacgggtgaccaactgttgataatttcgaataatatattggatgggaggtatgtggagcaaatgaagtttgaggggtatttgcgtaatgtggttaggaataatcataaaaaagatcctaaagaattaaagactgtggagtttaatgagaatactcaatatagtgatggagaggctaagtgggatgaggtggtttttgatgggggagatgcttttgaacttgacaggaatgagggtgatgatttggataatgagaggatgaaaggtggtcatgatttttatgagggggtggatccggatgaagcgaattctgtattaatgtttgctgcgatagccacattacctaaggatgacagggatattatagagatgcgggatttgcatggtatgtcttttaagttgataggaaggatacttaatttgagtgcaaacagtgtttcggggaggcgggataaaatcttgaaaaagattaaaaagataatggggaagaaaaaatagttttggaaagtggacggatttttaggggaaaagacattataggggtagaggggcgattaggtgggaattttaaattgtgaattataaattaaaagaatgaatgcgaatcaaattgatgtaataagaagagtgaacggtggggatactgttttgggcgataattcagggatttggattttgaatctggcaatgggtgcttacagggctataatgaccggtagagtggctttggttcagggatatgaaacgcttcagcgatctacactttctggtttgacgagtaataaggattattgctgtttgtttatgggtggcaagggaaatgtgctggtgagccagttgagagtttattatggaatgggcgctactcctgaccttgttatgttggaaaagataggatttagttttacggaattgacaaccggaaaccctgaacttatcttagagagaaatacttttgtgagtactacttttgattctgttgttgctgctatgataacggcaggacttcctgttactacacttatggggagtgcatattctagcgctattgcaagttatactactgctgttccaggatacagagatggtcaagctattactgttgctgccacagagcaaattgctattgaatgttcgatattgacggttacagatatgcctaaaatgaaggattttgctatgatttataaagaagaaaacccaatgttcgtaagtactttgaataatgcttataaaactagggggactgcgaaaagtaaggaaagcatgcatattccagttacggattttgaaacaggtattcctttgccaaatactaccattagcagaaaagcacctgatggtactattgagaaaataattaccggaccaaacgggataggagtattttattcacaggctactgatagttatgattttctttttcaacgacctggttataatgatttgaatattttaaataagggatttgtggcagggacattgatgaagtttgatgctgtaatgacaaagactgcacctgattcattaacaaaggattcaactccagcttcggtaaagcctgatgtagaaatacctaaggaagaaaaaacagatagaaatactaatgaagtagtgaagccaattacacctatatcggctgaattaccttcgacaacaaaagtaaatccgacaaaaccaccaacggtttaaaatatataagtaataaatttcaggatgcctccaaagaaaaatggaggcatttttattttattaaatatattttaaaacactaaattatttctatagataaattacctcaggtatagaatgctgaggtggtaaaataagaaagcccattggaaaaattccaatgagcttccttcttaatttaaatctgttagttattgcactactattttgctttgcaatagagtcgttccattctgaagaatcactgtatagacacctttatctacggttgaaagattcaattgatattgattctcgccgatgatggaagtgtaattcgatgcttgaataattcttcctgtcacatctatcaaacgaattaaataaacatcctcagtatctgttgtgaatgcaactgtcgcatgatcattggtcgggttcggatagatattgaaagcataatctatattatccgtttctccactttctaaccttgccaatgttgtaaaagtctgggttgcactgaagcctgaattgatgcttccacttgcattgcaattactctgaatctggacatcataatttgtattgatggctaattgtgagaaggtataatgcgaatttggagcaatggtataattcgtccaggcattcgcattgtgcttactgatccttatggtatatccatagacgcaggatggcggcacccatgtagcgaaagcgctggtagcagcgatgtttgaaatgcttaattgcgagggaagcgaacaagtagagtttaaaggataggagccaacagccgaacatccattggtattcgtaacggtaacagtatagataccaggattgcccggaagtaccgtcaatgattgagtattagccccggtattccaatgatatgtttggaatgaagcaaccgaaagtatagcatctccgccttcgcaataagtggttaatcctgttccaataattacaggatttggaagaggaaatacagtaaccgataaatgcgttgagcctgtgcaattacctgatgtaacggtaacaccataaagcccagtgctgttaacactgattgtcggtgttattgctcctgtgctccaagaataggtcgagtacgtattggttattcccaaggtgacaggattaccaatgcaagtagtagtaggtccggtgataacaggggtggttaatgttgttgtaacaacgatttgagaagcggttcccgtgcatccatttgcattggtagcagttactttataggtgcccgaattattgacattaattgaatgagttacggcaccggtgctccagatataggaagtcaatgcagtggatgtaagagcaattgtattgccattgcaaatgcttgaaggacctgtgatggttactgttggatttggattaacagtaacagatagagcgacagaattcccaatgcaaccattagcatcggtaacagttactgaataatttccgcttgttgaggcgttaatggatggggtgattgcattggtattccaaagataagatgaataggtgcctgtattaaatatcacagaacctccttgacagaatgttgttggaccattagcagtaatagttggggaaggatttggatttacagtaatatttgaagcggcattatttgaacatccatttccatcagtatagttataattataggaataattacctgctatattagtatagggatttgtaacactccatgtgccgcctgccggggaacctattaatgtaatgtttgatcctgcacagccgcttacattgcctgcacttactgttggaagcgcattaacagtaatattagaagttgcattgttcatacatccattgccatcggtaaaactatatgtgtatgaataactacctgcaataacatttgaataaggattagcaacattccatgtcccccctgccggcgaacctgacaaggcaattgttgatcctgaacatccactgacatcacccgcattgactgtcggaagagcattgactgtgacgatttgtgttgcattcccaacgcatccatttacatccgtaactgttactgaatagttgtcacttgatgatgctgaaatggaagaggttatgtcattcgtattccaaaggtaagaagaataggtgtccgtgctcaacatcacagaaccaccttgacagaaggtagtcggaccattagaagtgatggttggattaggatttgaattaacaacaacatcttgagaagctattcctgtgcagccattgccatctgtaacagttacagaataggttccacttgttgattctgtaatggattgagtgtttgcattggtattccagttatagaaaggatatgttcctgtgcttaatatcactgatccaccttgacagaaggtagtattgccattagcattgatacttggggtaggatttggattaacagtaaccgcttgagaagccatgccagtacaaccatttgcactggtaacagttacagaatagtttccatttgatgaagcagttatcatttctgtattttcattcgtattccagttataagatgtataaacacctgcatataaattgaccgaaccaccttcacagaatgtggtattaccatttgcagtaataacgggaggcactggaggattccaaatacaggcacagttggtactgaaggatgcattattatcaatgtcagcactccagttagcatctgaataggtgatatcatctacttgaatacattggagattcgggttatttaaagcattaaaagttgtgaaattaatgttgttgccattggctacattcaaactgatcagcgcgttattttcacattccaaatcaacaagaacgggattgtggcttacatccaaagtgctgatggtgttcaccgaacatagcaactctgtgattgcagggttttgactaatatctaaactatttaagttattaacgaaacaatacaattcattcaaagcagggttgtgactgacatctaaactattcaaagaacaaccatgagcatcaataacagaaagtgcactgttattactaacatccaaggttccgaaagcattgttgtagcaaagtaaggaattaagaacagggttattacttaaatcaaggcttgtcagattacaattccagcaatacaatcctgtgagggcggcgttattacttacatctaaacttccaagttgattataagaacaatacagagaagtaagggcagtattgctgctaacatttaaactggttatgttattatcatgacaaaccaatcctgtgagattcgtaaagacttcgatacctgtcaagtcagatactccaagactacttacatctatagttcccgtgaatgcaactgcttcacagtattgaatttctccatcaccattagtattaatatctaatcttcctatgagataggctttgaagatagggtcagggataaagattgttgaaatgcaggcacagttggtactgaatgttgctgtattatcaatatcggtgctccaattggcatcagaataagcaacattatctacttgtatgcaattaagattagggttattgtttgcattaaagttatcagtggtcatgataatattgttaccatttgctgcattcaaactgtttaagttattattggagcaaataaaataggttatatcggggttatgactcacatccaaactgctaatgttattactataacactgaaaagatgtgagtgcagtgttattactgacatttaaattggttaggttattatatccacaattcaattcaataagagcagtgttgttactcaaatctaaacgacttaaggaattatcgttacatcgcaaagtttgcaaaagaatgttttggctcaaatctaaactgcttatggaattttcccaacaactcaaaaataccaaaagagtgttgtgactcacatctaaattggttagagagaaattgttttggcaatcgaaataagtaaggttggtaaatgcttcaatacccgtataatctgaaatatcttgaaatgcaggtgccatttcattaacggcttccgcttcacaaatttctatttctccatcattattactatcaaagttggcaaggcagtaggctttaaagattgggtcgggaatattcacgatttgagaacaaggacatgtagtattaaaggatgaagtattatcaacataactattccaattagtagtagagtagggaatattatctacttgaatacaagaaagtgaaggattccctgttgcattgattgaatctaaagtagaattgcgcccgttagcgatatttaaacttagaagattattattctgacaatacaaaaaatagagagccgtgtcattgctcaagtctaaattccgtattgagttatcgtaacaatacaaaaaataaatcatcgtgttgttgctcacatttaagctcgtcaggctattatcgttacaaaacaaatctgcaaggtgagaattgtgtgatacgtctaaactcgtcaggctattatgatcacattgcagattcccaagtccggtattatggctaatatccaaactcgtcaggttattattgttacacctaaaatcaccaagagcagtattgtggctaacatccaaactgcttaattgattaccgtaacacaacaatgctgtcatattaatattgttgctgacatctaagctgcttagagaattattccaacaatacaaaaagataagatcagtgttgtggcttacatctaagcttgtcagaccatcattccaacattccaaataaccaagagcagtgttgtggctcacatctaaaccatttaaaggattataaccacaaagcaggtcataaagtgcagtgttgctactgacatctaaattcgacaggttattattattacaccacaaaatttcaagggcaggattgttactcaaatctaaaatcatcaggttattattataacaaattaaataatcaagatcagggcagttggtaagattcaaattgtttatcggattgtcgtagcaccacaaatttaccagagcagtgttatggctcacatctaaactgtttagagaattatcattacagtctaaagtttgaagtaattggcagttactcacatctaaactatttaagttattattgttacaaacaaaccaaacaagagccgtgcagtggctcacatccaaactgcttagaaaattatagtcgcaataaaaatattcgagggcagtattgttgctcacattcaaactacttatagtattattattgcaatacaaacctccaagaacagtattggtgctgacatctaaactggttaaagcattaccactgcaattcaaaaaggtaagtgc

SEQ ID NO: 336 - DNA, 5525 bp, synthetic construct
  misc_feature 1..5525: note = Synthetic
  source 1..5525: mol_type = other DNA
acccccaacctttagaaccggaatctaacgttctatccaattgaactatgggcgcagatataaatagatttgcatagtttaaatttattaaaagataagataaaaaaattgagattacctaaaaactatcaactacctctccttaactctatccgacattctatctcaagcttgtccgctgtaattttaatgtagggtgattgcctatgaacatagataataataaatttaacatattcaaatgtagagcgaaactctgtttcgctcaaatataaagcaaccaattaaattatataaacgaatcaggagattcgctctacaaaaaaatagccccaccgaagcagggctgataggtataaaaccttcggcatatagccttattgtgataagatttaaaagatgaataaaaatcttatggttataaacttaaaataaattctgattattatcaataaatttattaagttaaaaaaccaacaaaaatatggggttatttatgtcaaagattttaggtttagatttaggtacaaattctattggttggagcttggttgatgatgaaaaacagaaaattatagattctggtgttagaatttttcctgaaggggtgaatattgaaaaggggaaagaattttctaaaaatgctacacgtcgagagaaaagacaagggaggaaacaactatttagacgaaaattacgaaagttaaaactttctaaagaacttataaaacacaatatgtttcctatggttaccaatgtgaaagatgaattgaaccaacttaaacttaatggtgaactgaaatttttttttagtattgatccgtataaatgcagggcagaatcttttaatggtaataaactaactcttttagaaattggtcgaattttttatcactttgctcaacgcagaggttacaaggaaagccttaaaaattatgacgaagaaaaggggaaaatttacgaaggtaagcccaaagaattaaaaataggaataaaggaaacacaagagagaattaaaaactttggtactttaggcaactatttatacaacgaaaatccccacaaaacacgattgagaaatcgctacacaacccgcaaaatgtacattgatgaatttaatattatttgggaaaaccaaagaaaatattatccggatattttaacagaaaatctaaaatcaaaaattggggattctcagaaaggtattttgttttttcaaagacctttaagatctcaaaaacatttaataggtaaatgcacatttgaaccaaaaaaatcaaaatgttctacaagcacaattgaatttgaaaaatttagaatgtatcaatttataaacggaattgaatgtaacggtaaaaaattaaacactgagcagagaaaattaattaccgaaatatttaatagtaaatctaaattcaagtttagagaaataaagaaaaaattaaaatttacagaaggcagatttaattacaatgatgatgacaatattattggtaataatactataagtaactttagtaaaatatttggtaaagagaaatggaataaattaaactcacaagagcagtttgatatttggtttattaaaaataatgctgaagataaggaatggctaacaaattatgcaaaaacaaagtgggatttagctgaggataaaattgagaaactattaaaaattaatttatctaaaaactattctaacctaagtctaaaagcaataaacaatattttaccttatttagaaaagggctttatttatagtgatgccgttttactcggaggtttaaaatctgctttcggttccgatagatggaacagtttttcaagtgaggataaaaaaaacattgaatataaagtgtttaaggttggagaagaaagagaagacaaagtaccaataattgaaaaagtcaaggaattattaaagtcccaatttaatttggatgaaaaacaactagataaactttaccatcatagttttttaagtaaaataaatggactaaaagaaaaactgcccgaacccgagaacatacgtaatcccattgtgcagcaagctctttatgagttaagaaaattagtgaacgctattatagatgtacatggtaaaacggataaaataaaagttgaattagcaagagaccttaaatcttcaaaagataaaagatatgaggtaagacaagaaaacagaaagaatgaaaataggaacgatgaaattaaaaaaaggttggatgaatttagtattgaacattcaaggacaaatattcaaaaagtaatattgtgggatgaaagccaaaattactgcccttacacaggacaaaaaatcggttttgaagaattgtttaatgacggctatgttcaaatagagcatattattccttacagtatttctttaaatgacagtatgcaaaacaaaactttatgccttgcagacgagaataaaagaaaaggtaataaaacaccttatcaattttacggacacgatgaaaataaatggagtgaagtaaaaaacatggtatatgaacttattgttaaaaaaggaaattctcagttgtataaaaaaaattatagaaaatatcaaagatttataagcaaacaattacctgatgcagacgaatttatacaaaggcaacttaacgatacaagatatatttctaaatcagcaaaagaatatttgaaaaatatttgtgatgatgttgatgttacacagggtacggtaacttccttgcttcgtcatcactggggacttgataacattttaaatgatgtatatatcactaatggtttaactgacggagactactatgccgcagttaatgatgaagatattattgaaatattaaaatggaacgcagaaaataaagaaaaagatttagatcatcttaaaaaattgggcaaggtagtacagggtaaaataaaagacggaaaattatacccatataaaaacagagacgatcaccgtcatcacgcagttgatgctgtaactgttgcactaactaaaaaaagttacttacaacaaatttcaagaatgagtgcaagaaatagtaattatgaaaatattaaaacaaaaattagaattgataaaccttgggaagggttttggcaggatgcggataattcgataaagagtattttggtttcacataaaattaacaataaagttttaacaccggttaataaaaggttgtacgatgcaaaaggaaaagttagaaagattaatggaaaagttatttacggaaaaggtgatgctgttagaggtgctttacataaagaaactgtttacggaaaacatgttgatgcaaacggagaagaattttatcatgtacgtaaaccattagaaagtataacaacaaaaacactcatagataaaatagttgatgaaaatgtaagaaaaatcatgttacaaaaattaaaaaatgacggagttgatgtaaacaagaataaatttaatatacctaataattcattttttaagtatgacgataaaaacaataaaacacctttaattttccttccaaataaaaaaggtgaacatgtaccaattagaaaagtaagaataaaagaaaaaataggtaatgccgaaaaattaaaagaaataaatcaatatgtgaacccacgtaataaccaccacattataatttataaagacagcaaaggaaattacaaagaaaaagtagtaacactttgggaagcagttgaaaggataagacagggattaactttaataaacaaaaatcccgaacccgattgtgaatttattacgtctttaactcaaaatgaaatgtttttattaggattaacagaagaagaaataaaggacaataaaaacaatgttacttttttaagtcaatatttacataaagttcaaaaaatagcaggtggtgattatttttttgaaatatgttttaaaaaacatttagattcaagaatggataaagaagccaaagttgattataaatatgttaaaggatttggtgatggtaaaacaggttgggttaaattaaacccggtaaaagtaaaagttaatatttcagggaaatttatttttaataatgattaaacgtactttgtttttcagcagtgcttgtcacttaaacataaaagacaaacaattaataattacaaataaagagacaggtgagttaaatcaaactcctattgaagatattggatttattgttttagacaatcaagcaattacatttacacaaagtgtaatacaagaactttctgaaaataacagctctgttgttttttgtaataaaaaacaccatccttcttcattactatttaatttggatacacatcaaattcaaacagaaattttttcaaatcagataaaagcaagtgaacccttaaaaaaacaactttggcaatatacaataaaagcaaagattagaaatcaagcacttcttttgaaaactaataaaaaagaagcaaaaccactcgaatatttttataaaaaagtaagaagcggagaccctgataattacgaggcacaagcagcacgtatttattggaaaaatcttttcaatggtaactttaaaagagaaagatttggtgaagatgctaattcagctttaaattatggttatgcaattttacgggctgctgttgcacgctcactttccggttcaggtttattaccaactttgggtattcaccataaaaacagatataattcattttgtcttgctgatgatataatggaaccttacagaccgtttgtggatatgattgtgtatgataatttaaaagaaattttaaatgtagaagaattaaaccaagagattaaaagaaaattattgaatgttttagcaatggatatttttataaataataagaaaagtcctctaatggttggtctagcacaaacaactgcttctttggcaaagtgttttaatggagcagctaaaaaaataaaataccctgaattgatttaaaaaatatcactttatgagttttgaaagattaaatgcgtacagaattatgtggttgtttgtattttttgatttgccgacagaaacaaaaatggataggaagaattacactaaatttagaaaatgcttgcttaaggacggttttacaatgatgcaatattcggtttatattagaaactgtgcaagtaaagaaagtacaaacgtacaccttaaaagagtagaaaaaaatatacctcgaaaaggcaatatcagtattatggaagttacggataagcaatacggaaatataaaaaccttttggggcagagaaactatacctcagaaaccatcatcccctcaacttgaattcttttaaaacgttcaatgaagcatttattttatacaacaaagcacgttttttaattcgatattatactataaatttttgtaattaaagtaattacattattatataatatctataaatcatcttttaaatcaaaccacaacattgaagcagcattccaggctgtaattgcaaatatctataaatcatcttttaaatcaaaccacaacggaagagaaaagagagccgcagaccttgttaatatc

SEQ ID NO: 337 - DNA, 23402 bp, synthetic construct
  misc_feature 1..23402: note = Synthetic
  source 1..23402: mol_type = other DNA
cctcatcccagccactgatcatgctggaaggcaacatcaaatccggcgccgccgcctattctgccgccctcggtggcggcagtgtgctggggccgatccttggtggcgcactggtcagcacggcctcctggaggctgatcttttggctcaatgttgccctggcggtggcgtccatcctcctgagaaccttcgcctccccctctcgggattccactgcgccccgccccagcgacggcgccccgaaaaagctgttctcgtggcaggtctttagcaatcgagacgtggtgatttccatgggcgccgcggcgctgggcaatgcatgcctcatcggtctagctgcgtacgccacaactttcatcatcgacggcctggggtactccgcgatcatggccggggtgattttgctgccactgtcggtgggcgccttgctgggcgcggtgctttccagccgcctgcgggaggctgggcctttcgcgttgatgattggggcacttgttctcatgggcatcggcctcgcgctcatgtcccccgtgaccgaccactcgccagggtgggtgctcgctccgggtggtgtactcgcggggttgggcctgggtttattgacgtcagcgacctcgcgcggcgcggttcaggccacgccacgacaatggacgggggcggcctccggcgcggtatccatgatgcggcagcttggcacgtttttgggtgtttttgtgtgggggttgtttatcgccggcgcggtgacggcaggcgatctgcgctcgatcttgttatcagctgcagcgtccgtgctcgtggtcgcgctgctgatcacggccattcaattgaaaacttctcccaataattgagtctgccgttgggttctgctttgatcagttcgcatgggacgtcactccgctcattcaaccccttcccacccagcgcaggttgaagccagccacgggcacagccacggcggctacgagagcccaaattgggccgaacttcgggccacctaccgctcgcccctccactggtttgtggatcagactcgcgcgcggcaggtgctcagcatcgccctactcctggctgcgctcgcgaccgccatgagcgtggcgatccattggcccggcggcagcaaaccggaggtctcacaggagttcacgtccttttcaggcatgacgggcgacctcacagaggggacggtcaaggagctccgctccgcggcatgccaggatccgaacctggggatggcgctgcggaccatccctcccgccccaaccggggcgactatgtgccagcaggcggtggtctcgctacagtcgggggccgaccagggtaagttcgcactacttgaagtgcaccccgaggttccgggcaatccgtcactgcaggctggtgacgggatctacctcaactccagctccgattcctccagcccgggcctctatggcttcattgatttccagcgcagcgttcccttggcatggtggctggtcgccgccctcctgctcgtccttttagtgggcgcatggcgcggcgctcgatcgatcctggggctggccatcaccctggcgatcatcgtgttcttcctcgccccggcactcgtctctggcggctcgcccgtgcctctcgctgtgaccagctgcaccgcggtcttgttcttcgtcctcttcctggtccacgggctgaattggaaaacggcctccgctatcggcggcacggtgctcgccctcgcgctggccaccatcgtctcgcaggtcgcggtcgattcaaccggcatccgcgggctcggggacgaaaacaacctccacatcctgcgctacctgccccagctaaacatcaatgggctactcctcgcgggcatgatcgtcggtgcactcggtgtgctcaacgatctgtccatcgcgcaggcctccacagtcaacgagctctatcacctcaacccccaggctggctggcgccacctcttccgctccggaatgcgggtcggccaggatcacatcgcctcgctggtctacaccctcgtgctgagctacaccggcgtggccctgccatccatcatgctgctcagcgtttccggtcggccgctggaacagatcctcacctcggatctgatggccacggagctggttcgcaccatcacgggcaccatcacgctgatcctcgcggtcccgctcaccaccgggattgcggcgctgaccgcagccccgcggggcgcacgttcggcgtcgacctagtcttcgtctttgggggtggcgtccctcgtcgtggacctccacacctccggctccacccagggcgtttctacggtcgggaccagcgcagccatggccgaggaatgggagtagccacagatttgcagcgcatccacgatgatggagcgacattgcccaatgatgacggcgccgctcagcccggtccccttcgccaagatcgggtcggccgcagcgcccgccagctgcaaattgcgaacaatctccgggatctcaatggcctcctgccgggttccccgcgtgccgccggtggcatacagcgcacccaagtgccccaactggttggacagatcacggatgaggtcgatcatcccctccggggcttctccctcatcctcgatcatcacttctgcacggcgagccaagacgcgcgcattgcgcatgaggttatccaccggcgtgagaatgcgcgccatggagttcgcgtgccgcttcgcagtccagtaaatcggcgagagactcaccagctccgaaccgcccttcgccgcgctgagcattgcattcacattggtctgggtcccccgcgcctcccgcagggcctctccgatcacggcaccgttgcgggcctccatccctttggcgacgtcatccagcaccaatgacaccttcgacatcagcgtgctcacctcccggcgcgcaggccgcaggggcgagttcggcaccaccgtcagcacgagaatgccgatcagcccgccgatcagcgcatcgatcgcgcgcgtccacacaccctgggaccccggggccatgatggtggtcagcagcactgcggagctcgccgcctgcatggagaccatcaccgcgccatctacgaatgtgcccaccagaatggccaggaacaccaccagagccagctggagcgtgccgctaccgataaagcggaccaccaggtcacccgtcgccactcccaacgtggcaccgagggtcagttcgaaaccgcgccggatgcgcttgccgccggagacccccagggaaatcaccgccgcgatcggagcgaagaaggcctgccggtgatcgaagattgccgtggcgacccaccaggacagcgccgcggcgagcgcgctctggaaggcaaaaatgagtgtttcccgcacccgctgaatcccgcgcagcggagccaccttcttcagcgcccgcttcgccgattgcacccccgacgatccggcggtgctcaaccgcgagtgttcaccagattctgccatggtttccatattgccccatgactcaaatcaggtccgcccacacccctcgatggtccgtgccgtcgaccttgacggtccccgcatcctcgcacgtcagcgtggtcagaatgtgatcgaggcgcagtgtgggcgccgcgctgggccaggttggggccccggtcaggccgccgccgcagtcgtggagtgctcgaccgtcaacgcgggtccctgccagagcccggaactgtggatgccaccaggtggcgttgaagtcaccggccatgatcagcggcgccagcttatgtggatccccgtcacccgcggggctctccaggaattgcttcagcccgcggagctcacggtcccagccgcccacatccccggcgaccggagccagggtgtgcacgcccacgatccgcgcgccagcgaccgaagcctcgggcatttggaattcggtgatcccttcgtgatcgcggccgcggacgggagccctactcaggatttggacgccacccgctccctcgccaggctcaaccggccccgcccggtggtaaccggagtgtgcctcaacatcggcgacttcctctggagtggtctccgccaagatgacggcatcggggttcagctcggagatagtctgagagatcgcccgcgcgttattcgtggtccagagggtattcaggctgaggatgcgcactgtggcgtctggaactgtggcgtccttccctggcggaccgaacggcgagggaatgcgcggcgccacgagcgtgatcagggcgagcgcgaggcccgtggagaggaatgtgaggagcgggcgccgacggccactcacgtgggccaggagccctacgagggcggcggggagtgcgcacgcggcgagccaactgaaagcctgcaggggtggaatgccccgaacggggatgggaaaagcggcgctgaccagccatagcgcggaggctacggcgatgatggccagcgccgctgggcgacccaacaatgcaacacgcccggtccctgccgggcgatcgggactgtcagtccttggtgatgccgatggcatccgcggcggtgggatcgcagtcgttcaggaggttgaggcagcggatgtactcgtcgtcctcaccgatggccttggcagcgacggcgagggaaccgatcgcgcgcagcacacccttgtttggggcgtggtcccacggcacagggccggtgcccttccacccattgctgcgaagcgcatccaaaccgcggtggtagccggtgcgagcgcaggcgtaggcattgaccggctcgttgttctccaggtggcggacggcaagcgcggcccaggcaccggagtccttggggttagcggtggcaatgcgacccagggattccatgtcggagccggcatcatcggccgtgacggcggacttcaattcttcgggcaagcggacctcgggatgttctgccccgaagaggtcccggcccgtgcgtaattgctcactcataactcaatgttaacgccggatttgccgtggcagaaggctgttctgcaaattgcacggcgaaatccgtggcggggtttacttggtgacggacttcccggcggagtgcagatcctggcaggcctcgaccacgcgggcggccatggactcctcggccttcttcaggtaggagcgaggatcgtaggtcttcttgttgccgacctcgccgtcgatcttcagcacgccgtcgtagttggagaacatgtgcgcagcaaccgggcgggtgaacgcgtactgggtatccgtgtccacgttcatcttgatcacgccgtagcgcagagcttcctcgatcttctccttctcggaaccggatccgccgtggaagacgaagtcgaagggctgggagccttcggacaggccgagcttcttggacgccaccttttggcccatgtccaggatctccgggcgcagcttcacattgcccggcttgtacactccgtggacgttgccgaaggttgcggccagcaggtagcggccgttttcgccggttcccagtgcgtcgagggtcttctcgaagtcctcttcggtggtgtagaggttggcgcctgcctttgcctgcacgccgtcttcctcgccgccgaccacgccgatttccacttccaggatgatgttggctgccttggtatctgccagcaggcccttggcgatctccaggttctcatcgatcggaatcgcggagccgtcccacatgtgggactggaacagcgggttctcgccggcttccaccagtttgcgggaggtctccatcagcgggcgaacgaacccgtcgagcttttctttctggcagtgatccgtgtgcaaggccacgttcacgccgtaatacttggctgcctcatgcgcgaaagatgccagcgcagtggcgccagaaaccatgttcttgacgttcaggccggaaccgaactcggacccgccagtggaaaactgaatgatgccatcggattccgcatccgcgaagcccttcagagctgcattgatcgtctcggacgaggtgcagttgatggcggggaaagcgtagccgccctccttcgccttatcgagcatgtcctggtatgcggcgggggttgcgattggcacgaaagcctcctggttgtatcggtgacgggccacgcggcaggcgtgccccgtttcgcgttccccctgattatgccttccacagcgaaaagatggtgggatttctcccctggtttcgggggcttgctgggaattattccgcaattcttgagctgctcttaggaactgccaccccggcgccgttccctcccacctacaccttcggcaacggggactatttgccgtgagaggaatgtgtccgaggctcggcgagccgcgctgcggcctccatgagcatccacccggacagttgcacggaaagatcccgctccgcgatgtctgaactgctgacggctccggcaatggtggcgccaaccaggccgccggactgcggcaagatcgcatcggcggtccagtcgctggagaagacgggcaggccgtcaacctccaagcggtggcgccacacgctgtcggcggtgttcatgaccatgcgacgggcctggcgcttcgtctccgcagaggtggcaccaacatccggcagttccttagccaccagggccaggtaacgaatcaggattccattgaacaagccgccatcgcctccgcgggtgttccaggcaagcaccccgtcccggttgcatccgtgggtttccacggcatcaacgaggcctgccacgcgggtgatgttctgcatccctacctcggagacttcgccgggctgtacgcccgcctcggcgcgctgagcaatggcgagctcggtgcaggcccccagcatcacgccttggcaatagctgtagagcgcggtggcgggctcaggtccgtgcatcctcatgcgcaggccatccatgaccaggccatgttcattgatcagggtgtcaaagacccactcgatgagtgtttccgccagttccaaccgcccggtacgtgcggccatgatggccgcaggaccgttcgtggggacgttatagaaggtctcgttggtgcgccacggcagcacgccggtgagggaatccaccccttccacgatgttggtctccagctcggcaagccccttgatggtgccgaccttatccagcttctcagctcgaccgagtgccagggcgagccaggccttgtcgtcgaagtacttgttcttcgtcagcgcccggaggttgcggaccttcatgccattgatggttcgccgcaggttccggatgcgggtattggattcgcggcgcagggcggcgtccacctggcaatcgatgtagtgagcctgccaccagtagtgccagcggatgaagaacttgtcgcgcgacgttgggggccaggcgatcacgccgaggttggtgagcggcaggccccagacccggctggcgtgccgttcggtaatggcttgctcagccagctctgcgcggtgctcccagacttcaatcacaggtcaatcttgcacgttaagcccaagttgcgccacgtttttggcgcagacactcgcgacgttttccagaatttgcgaccaccgctacgcaccccacgctttccgccacgatcaccacgcgtcgccaagatcagcatgctgccggatccacgcgtgcatcgtgatccccgcagccacgccagcgttgatcgatcgggtcgacccgaactgggcgatggacacggtcttcacggcaccgtccatcgcctcttgggtcacgcccggcccctcctgcccgaacagcaacaggcaccgctccggcagctccgcggtctccagcggcaccgagcccggagtgttatccaccgccacgacctgcaggtcatgctctcgtgcgtactccagcacccccgccacgtcagcgtggtgcagcaggtgctggtagcggtccgtcaccatcgctccgcgccggttccagcgccgccgccccacgatgtgcaccgtgtccacggcgaaggcgttcgcggtgcgcaccacggtgccgatgttggaatcgttctcgaaattctcaatcgccacatgcagcgcgtgccgccgggtatcaatatcagcaatgatggcggactgcttccagtagcggtacgcatcgaccacgttgcgggtatccccgtggtccagcagctccgggtcgaagtgctccgccgtgggccgaggttgccctggatgctcctgctcccatggccccacgccgcgcgggtgctggaaccattctgtcgggccgggtttgtcggtcatgccgttactttcgcaggccatcgaccagcagcatttgcgcgatgatgtaggtcgccatgaccgcaccatccagggcaccgtcgatcaccttggccacggcgggcgcgctgggtgccagcgcgttgcgcagtaaggtgagccgggtcaggatcagcccatcgctgatgacaaacagattcccgccgtgactgatgtgcgggcgctcggcgtcacccatcgccgaggtcgtcgccaagatcgtcccgtaccccagcgccgcagggagcgccttcgggactcgggccgcggtgagtgccgcgccgccagcgaccgctgccgcccggattctggacgccaccgcgtcagctctcgccccgcgcgtccgaagcaggtggatgtacgccgcgtggttcagcgcgaacgcggccgcgccctgattcaggttcttggcccgcacctgcggatcagcgctgcgggagtcctcattcatcagtttgaggtcgcccagccatccggcgatcagcccggcagccagaaccaggttgtcggcttctgccgtccgcgtgccagggcggatcgttcggccgcctagcaccttcttccaggcgggcccgcggggcttaaggcggcgctggcgagcgacggtggcgtctggaaagagaacatcagccaccagcaacggcatcaataccggcttggtcagcttcgtgagcgcggtggagcgggtcgtggcagcgacgaccaaggcggcaccggcggcgaggtatacgatgcgggcggggtgggtgcgggtgacggattcctcgaaggcatccatgccctgattggtgcgggtgaggaaggtgtcgatcagagtattgcggcgggtcaacgtgagctccttaggcgaggtcgaggtccgcgaggccgagcaggctgcggtactccaacccctcggcttcgatgacgtccttggctcccgtcgcgcggtcgacgacggtggccacgcccacgacgttcgcgccagcctcgcgggcggcggcgacggcggtcagcggggagttaccggtggtggtcgtatcctcgacgatgaggacgttcttgccctcgatgtccgggccctcgatgcggcgctgcatgccgtgcttcttggcctccttgcgaaccacgaaggcatcgatgccgtcaccggcgtgcatgatcgcggtggcgacggggtctgcgcccagggtcagcccgccgacattggtgtactcccaatcggcggtgagttcacgcagcaactggccaatcagggggctggcctcccggtgcagggtagcccggcgcaggtcaacgtagtaatcggcctccttgccgctggagagggtgaccttgccgtgcacgacggcgagctgcttgaccagctcggcgaggcgctgctttgaggtcttgtctacttcgtgcgtagaaggcgaagtcatgaggtgaatacttccttgttttgaggggggggagctctacggcaaatgattcggatctcttaaaggatcttaaaagagaggccttgccatagcctgagccacccttggttggtttgctacacgggcgaatccttggccgcgaatacggtttcagagtctaacgaagcaggagaaaactccgattgtttgcagccattaagaacttaggaccccaacaatgtggtttgaccaccgttttaaggaaagagtgcttatactcctctaacaaccccatgaccacgacgaaaacatcgacccacgaagcgaaataccccccacctattgactccgagcaatccgttcgctacagtctcttactgagaacagatcctcagtaagtgtcgccatgttagcgacattgattgctccatcgggtactcgcttcagcgggtgcccgatttttcttgctatccaagaggagctttacgtgcctactcactcactcaagcgctatcgcgttggattcgatgtcggatcccgttcactaggaattgcagccatcgagattgatgaaaatgggatgccggccaacattctcaacgccatgtccttccttcatgatgcgggattggatcctgattcaaacaaaacggcattgaccaggaaaaatgtctcaggtgtagcgcgacgaacgcgccgtatgtatcgagctcgcaagaagcggctggaggcattggaccggttcctatccagccatgactaccccttggaagacttagccaacactgaagatatggaatgttggcaagctcgcgcctcattgacctcagcaaagctcacggacgagaccgaatttaagcgcgctttttcactggcactgcgtcacatcgcacgccaccgtggttggcgaaacccttactccacgactcggtcgatgcactctcaacaacttgagccttccccatcacttctaaagatccgcgaagagttcgcgctcctttgctcgactcccctaaaggcggacgcaacgttggctgaaatggtctgccagcttccggatgcccgtgtgaaactacggggagaaggagggcttttctccgagcggcttcatcagaaggacttagcacttgagcttcacaaggtagccagaggccaaggcttggaacctgctttcatctgtaaagcaatcgataaagtattcgatgcgaagtcgcccaagggatcagcatcggatcgagttggaaaagatgatcttgaccgcagccagccccgagcatggcgcgctgctcgagagttccaggaataccggattatagctctgcttgcaaatgtgcgcgttcgagaaaaggaagatggttctaaaggcatccttcgaccactaacgctggctgaacgccaaaaagtcttcgaattcctcaacaccttcactgaaaaaatcccacccacctggggagaagtagcaagcctcttaaacattgaccgaggagacttaaaaggaactgcgaccagcaccgatgatggtgaacgagtctccagcgccccgccggtaaatgacaccgaacgcacaatggcgaactcaaagatcaaggagatccgcaactactggaaagatgctaatcaagcatctaaagatgcgctgatccgcgaattctccaatgtggaactccccgaggatgattctcctgaggcaattgccgcatctacgctcctccgaaaccttcctgaggggtcgcttgagaacctggaatccattcgactgtccgatggccgatctgcgtactctctcaagaccttgcgcaagctaacggattacatgctcaataatgaagcagaccttaccgatgcgcgcatggcaattttcaacgtcgacaaagactggaagccagctgcagcaccaatcggagaaccgactgggaatcctgcggtcgaccgagtgctaaaacaggtcaatcggtggctgaacatggcagagagccgttggggtctaccagaatctatcaatatcgaaacacttcgagatggattcaagagcgagcgcttggctcgagaaattgaacgcgatcaaaatcagcgagcaaagaagaacctcaccgttgtggacgcaatgaggaccaaactgaacatcgaggggcgcccacgtcggtcagaagccttacgcttccagtccatccaaaggcaaaatggtcaatgtgcctattgtggcagtccaattgatttcaagactgcggaactggaccacattgtccctcgagctggggtgggttccacaaacgcgcgatacaacctgctagcaacgtgtggtcgatgcaatcgcgcaaaaggcaaattgccgtttgcggtctgggcgaaaaagacagagattctgaatgtttcccttgaaggcgctcttcaacgggtgcagcagtggaccacagatccgggcctcaacgcgtccaatatgaaacgattccaacaagaggttatcttccggctcaaacgagtctccgaggatgaggaaatcgatgctcgcagcaaagaagctgtgtcctggatggcagttgaacttcagcaccgcttgcttggttactacggcaggtccaaagagcgcggctcctcaccggtgaagatccacgtcttccgtggagaagtaaccgcgagcgcccgtcgcgcagcaggaatcgagaagtcattccgcatgatcggcggtaaagcaggaaagaaccggttggaccggcgacatcacgctatcgatgctgcggtcatcgcgatgatgcaggggacggtcgctcaagtgttgaccgagcgaaactcacttcgatcccaacaacactattctggaaaaccggacgcagaattcggagcttggagtgagtacaccggtcgaagggttcaagaccaagtcgtctaccgctcttgggttcaaaaaatgaaagccctcgtcccactgctgcaacaggcaatagattcagaccatatacccgtcgtggagaacatccgcttgaagttgggaaatggattagctcacgaggaaacggtgcatccgttgacacgagtcaaactaggtgacccgattgcccctgacgcggtggatcgcgcctcgacccctgcactgtggacagcgctaacacgcgagcctgacttcgattggaaagaaggacttcaagaaaatcccaatcggaagattcaggtgaatggcactcaatacaccgcaaccgatgaaattgagctttttggcgtaaaggctggcgctataaaggtgagaaacggctactcagagttgggcagtgctttccaccacgcacgactctacaaaatccgaggtagtaaaaaggtttcttacgccatgatgagggtctatacggtggatctactacggtaccgccaccaggacctgtttacctgtgaactcgacccaaacacaatgtctgcacgccaggcggaaccaaagctacgggccgccttccgcgcgggaacagcagaatatgttacgtggtttgtcgttggcgatgagctgaagctgaacacgcccaacatcgccacgggacaggtctcgacgttccttgaggaattcggcgaggtgacacattggaggattcgaggtctctatagcaactccaaattgcgtctaaagccttcgcagcttgcaagtgaaggcataagtgaaacaaccagtgcggattcgaggaaagtcatcgactccccaggctggcttccagccgtcaataaggtttttggtgaagggaaccctatccttatccgccgagacgcccacggtagaccccggctagagagcgaatccggactgcccatctcaatagtgattggctgatcatgagctggcgagtcattgatttgacgactttcgaaggaaagttgatctatcagcgcggccatctaaaagtgacacggcatgattcgacagaatcagccctggttaacctcaaacaagttggggtaatcctttgtggttcgcatgtcagcctgagcggtggtttgctcctcaaactcagtgaattggggatctctttgcttgtcactgattggaagggagtgcctgtgggcgccctgcaaagttggtcaaatcacacacgcgtgggagctcgccagatcgcccagtcgcagctttctcttcctcgggcaaaaagcgcctgggcgagcatcgttaaggctaaagtaatgggccaggcacaagttcaaaaggcgatcggtaacccagcagcagcacagaagcttcttactcttgctcgctctgtgcgttcaggggacccggctaatatcgagggccatgctgcccgagtacattggcaaaactttgttcgggacattcccttcactcgcaactttcagtcatctgatccattgaactcgtgcctcaattacggctatacgattttgcgtggttattgcattcgttcaattcttcagtcaggattgtggccggcattgggagttttccaccatggtcgctcgaacgcattcaatttggccgatgacttaattgagccctttcgcccagtcgttgatcatatagtctcacagttcccaaccgaagccacactaaccgacccgagcaccaaacgagctttagctggagttgctgaaacaatcttcttgtcagatgggtcagttgtctcgactgctatgaccgaaatggcgagatgtttcggcaaatacgttgagggcgaccttcagagatttaccgcaccaatttggagcgggccccgtgccatcgaaggcccataaggacggcggcatgtggtgcctcgtgatgttcgatctccccgttcagtcgaaggagcaacgtcgtgaggcaaccgcctttcggaattcgctcctcgatgatggcttcagcatggttcagttcagtgtgtacgtccaatacctccctttgggggtaaatctgtctcgcattgccaacactttgaagtcaagacttcccgacaacggcgaagtgcgagttctccccgtgaccgataagcaatggtctgaggccttcagattttccaacggcagccagcaagcagacagcgaaacgccccagcaacttcaaattttctagcctaaggaactgaaaaacgccttctcagaggcccttttcggggcttgagaaagcgtatcagggattatgagaacagatccccagcagtctttgaagaaagacccgtccctaagaaagcgtatcagggattatgagaacagatccccagctgcaggctgctgtggaggagaagcagcgaaagcgtatcagggattatgagaacagatccccagcaggccctcgaatcctatgtcgatgacaaaaagcgtatcagggattatgagaacagatccccagccggtttatccgctcggcacagtccaccaaaagcgtatcagggattatgagaacagatccccagcccctcgactagtaggtctgtgtttgcctaaagcgtatcagggattatgagaacagatccccagctctcgtcggtggtctgatcgtcgtccggaaagcgtatcagggattatgagaacagatccccagcgacttacctcgcgagctttgacgactccaaagcgtatcagggattatgagaacagatccccagcttcgtgaggcgcacgggtgtgtcgtagtaaagcgtatcagggattatgagaacagatccccagctagttcgttgagcagttcgggtacgtcgaaagcgtatcagggattatgagaacagatccccagctaccggctgcgtgaagcaggagtatcccaaagcgtatcagggattatgagaacagatccccagccctcggtggtgatgtgcccagtagtcacaaagcgtatcagggattatgagaacagatccccagcatggagtctccatcacgtggggacgatcaaagcgtatcagggattatgagaacagatccccagctcgacgtccagtggatgcacgatcgcacaaagcgtatcagggattatgagaacagatccccagcctcaggttcccgatacgacatacgacccaaagcgtatcagggattatgagaacagatccccagccgtggggctgtttctggagcgttcctggaaagcgtatcagggattatgagaacagatccccagcgtgaggtcagtgttggtcagagggtggaaaagcgtatcagggattatgagaacagatccccagcacgcggcccgccgcgtggtccaggccgcaaagcgtatcagggattatgagaacagatccccagcacttacggtgcatgatggaatcgttgcgaaagcgtatcagggattatgagaacagatccccagccggtctctcgtcaacttgggcacgctgaaaagcgtatcagggattatgagaacagatccccagctttctttgcttagataattgaaaagcataaagcgtatcagggattatgagaacagatccccagcgtgaggtcagtgttggtcagagggtggaaaagcgtatcagggattatgagaacagatccccagcctggtttgggttggatgatggggcgccgaaagcgtatcagggattatgagaacagatccccagcatacggcggctactcgttttggtgatggaaagcgtatcagggattatgagaacagatccccagcctggtcctacggtgttgaccccgggcacaaagcgtatcagggattatgagaacagatccccagcaccaccgtgttgaaaatcagggagttggaaagcgtatcagggattatgagaacagatccccagccaggcacaaatgtgaaggcggtgcagcgaaagcgtatcagggattatgagaacagatccccagcccaacaaagctaaagcgtacttccgaacaaagcgtatcagggattatgagaacagatccccagcgcactacccacatgcgcagtgttccatcaaagcgtatcagggattatgagaacagatccccagcgcacctctaatcgcctgtcaccgctttcaaagcgtatcagggattatgagaacagatccccagctgcggtttcagctttcgcgctctcccgaaaagcgtatcagggattatgagaacagatccgctatgaacgattgctttcaccaagcaatgagcataggtgcaacccatttgattcaactgcagcaaatgcaccggaagacacgaccgcacccctcacttacgctaaacctatgaacgaagatccctcagccccaccgaagcggatcattctgatgttctgcgccatgctcgctggcgctgcgctttacgcactcatcttcgcgcccgccatgtccgacaagggcttcgtcccggagctgaaggagcgcttcatccactccttccttccatgggtagttgtggcctcagtcctctgcggcattacccttgctgccgcccgatttcagcgaaagtccaagagccaacaagaaaagaaccaacaagggtaggtagggcgaagaaatcccgcccatctgcgcaaaccagaccgcgattagtccctgcgcttttccaggtcggtcaccacctcaccatcgacttcctcgatgtgttccaccggctcgatcggctccggtgccgcatgccgagcatccggcgcacggtgccgcccactcccccggcgagaactccgccgattcaccgccggcgccgtcaagcccgtatcgcccagttccggctcatcatcgtcgaagatcgtcgtctcgccgtccaggtccgtccgaatcaccttcggccgcccgttccagtgcccgctcgtgtgctgcggatcagtgcccacggccgggatccgctcgctgtcctccccaacgagctcatcgccaacccgagagcgctcgaatccacccaggtcgccctcgatgcgcccgctcgcccgcgaggggaattccacgggttccgccgggcgttccacatccgggcgcgccggtggttcctcttcttcattttcggacgccaccgcctcttcatcctgccctccatcgcgaacgggctgaatgtaggctggccgctccgacccggggcgatcgtcttcgtgcccgaagttcggttcctggatgagggatgcgagtccactcagcgcccccgtcccggcgaaatcatcgccagggcgattgtccttttcgctgttggaaccctcattgtccgagccccgacggtcatcgtcctcgccggccatggtggcggcaagcgcctgctgcatttcctcgccgatctgggtggtctgcaccgactggcagtccaagaatagtggccgagtctgatcggccgaatccatgatgaggctgtccatggtgaaggacggcggcaggaccatcgcagcgtcggcgaggctcaccacgtggggcagcacgctgtcccacaccgaatgctccagcttgcggttgacacgcagcaccacccagtcgtcgaaccacagcacgtctggcgcgacctgggacagcgccaccagcgcgtattccacacgtgaatccagcatgcggtccagagcgcgcacatccgtcgtgtacgcgaagtacgggcgctggtccagcggctcggagcgccgcatcccctggggcacgccctcgcgctgggaatagtgcacgctcaccgggctggaatcgtcacggcgaagagcaatgcaggtgccctcacccacgtcggcgatgtgaaaggggtgtccgctgtgaaaggcgctcaccatatcgcgggcgggcaatcgccgtcgacgttcagcgtcaccggacccgctggcggagttctcggactcccggcgatcggtggcgtctcccccttttcccttcgcccaacgaccgaaaagatccaggtcccggccacgtggtccgctcagggcggcgaggaatgactgtggccagtcggcggtgaggtcccggtcctcgcgggtgaactcgccttcgtgcttagtggcccatgccttgcggcggcgccgctcccccatcaacgcggactcgatgttggacgagtcgtttgtgtgcgcagccggagtcaccgctgccgcatccgctgcaggggtgccaacgtcgcgagctggggtatcgtgctcgtccggctccggtgtgctctcccttgtctcagatgtggcgggaggaatctccggctgtaccggctcttccggggtgggcaacgggtgccactcggactccccgtccatgccctcatctgcggtgggaaccgcgttcgattccacggtggaatctgcgtgggtctcgtcaggtgtgcggacctgggcagcctgacggcccgcgctcgtgctggggcgcgaaggcgcgctagaggatggcttttcgctctggcgccacagccaaaaggccaagcccagcagcagaagtccaattattagtggaaccacagaacagtcaccttgccccgccattgccggcgggggattttactcgttggcggcagcgtaatcgtcggagtccatcagttcgccggcctccgtgaccttgacttcgtacagccagccctcgccatagggatcttcgttcagcaggcccgcgttgtcctccagctcctcgttgatggcgacgatttcgccggtcacgggtgcgtagatatcagagacggacttggtggactccacctctccgaaagcctcaccggcctcgacctcggtgcccacctcggggagctccacgaaaacgatgtcgcccagagcttcggcggccacgtgggtgattcccacgcggacggtctggccctcgctgggagaggtggtgttaatccactcgtgctcctcggagtacaggtaatcggttggcagtgcggtcatcgtctattcctccataagactgtcgatcaacagcagactttaccctagttcagggcatcttcatctgaaatgtggccagcagaaccgtcccccacggagacgttgtaatcccaccggccacggtgaatttttttgagttgtttagcgcgctcagcggcggttggagactactgctcgcgcttatagaacggcagcgccacgacacggtaggggaagcgcttgccgcggatgtcgacctccacggtggcaccctctgctgcagcgccggaatccaccgccgtcttagttgcgtacgccatcgccacggggtggcccagcgtgggcgacagcgcgcccgacgtcacggagccgatcgcggcatcggaggctgcctcgtcgccgctaccggcgaacacctcgtaaccaccgcgagcggcacggcgcccctcgcccaccaagccgatcagcgtctgcttggtgccttcctccttggctgccacgatggcctcccggcccacgaactcctccttggacttcgtggctgccagcacgccgaggccggcatccacgggagtcagctgttccgacagctcgttgccgtacaggggcatgccagcctccaggcgcagagtgtcgcggcaggccaggccacagggcaggccctccagctcgcgggctttggccagggccgcgttccacactgcctctgcgccatcgttgggcacgatgatttcgaatccgtcctcgccggtgtaaccggtccgggcgatgagtgcccggtgcccggccaccacgccctggaacgcggcgtagtagcccaccccgtcgatagcggcatccaccgtctcgccagcgccggaggcttcgggagcagcggtgacatcctcgacaatggtgcgcatgacctcggcggcgcgcggcccttgcacggccaccatggatgtgctttccgattcattgttgacagtggcgtcaaatcccttggatcggcgctgcaactcctctgctacccggggcgcattgcccgcgttgggaaccacgaggaactcttcctcgcccaggcgataagtaatcaggtcgtcgatgatcccaccctgctcggtgcagatcatggagtacttcgccttgcccaccttgaggatggacaagcgggaaatgagagcgtgatccaggaattcggccgcctgcgggccggtcacgcgaacctcacccatgtgggaaaggtcgaacacgcccaccgcgcggcgcaccgcgtggtgctcatccagctcggacgtgtacttcagcggcatatcccagccgccgaagtcggtgaagcgggcacccaggtcctcgtgcgcggcgtgcaatgccgtgtgcttgggggtggcgctatgtggggaatcagtcatgtgaatcaaatcctccgggaagtgttgttcggtgttccgtggggcccgctcagtcgatcgcgaagtcttcgatcggcgggcaggtgcacacgaggttgcggtcgccgtaggcattatcgatgcggcgcaccggcgggaagtacttcgtcaggcgtaggcgacccaccgggaacgccgcctgttcacgggtgaagtggcctccgctgacggcttcctcaaagtccccgcggacaacggagtagctggtgtacggagcgtggcgcagcacggaatcttcggcgctgaccttgccgtcgatgacctccacgatttcctggtggatggtgatcatggcctcgacgaaacggtccagctcccccttgtcttcagactcggtgggctccaccatcagcgttccgggaacggggaaggccagggtgggcgcgtggaagccgaagtccatcaatcgcttggtcacgtcctcggcggtgatgccagactgcttggtcagctcccgcaggtccaggatgcattcgtgagcgaccaggccgttctcgccggtgtacagcgtgggaaagtattcgcgcagctggtgggagatgtagttggcattcaccatggccatgcgggaagcctcggtgagcccgtcgtcgcccatcatggcgatgtaagcccaggtgatcggcagcacgccggcagaaccgtacttcgccgcggagaccggctggccgccggcctcggagagcgcgccggaatcctccacgttgagagtggcatcggagggcaggaatgggatcaggtgctcgcccacgcagatggggcccacgcccgggccgccaccgccgtgcgggatggtgaaggtcttgtgcaggttgaggtgggagacatcgccgccgaactcacccggctgtgccaggccgaccagcgcgttcaagttggcaccgtcgatgtacacctgaccgccagccgcgtgaaccttctcgcataccgtccgcacatgctcctcgaacacgccgtgggtggaggggtaggtgatcatgatgcccgcgacctcggaaccgtgcttctccagctttgcatccaggtcatccagcaggatcgagccgtcctcagcggccttcacggccacgaccttcagcccggccaacgccgcggatgcggcgttggtcccgtgcgcggaggtaggaatcaagaccttgtcgcgctgttcctcaccgcgggactggtggtagcggtggatcgccagcagcccagcgaattcgccctgggagcccgcattgggctgcacagagaccttcgcgtagcccgtgatcttggccagccgctcctccaggtccgcaatgagctccagccatccgcgcgcctggtcctccggtacgtgcgggtggatgcccgcgaatcctggccaggtgattggttccatggagatcgcgctgttcagcttcatcgtgcaggacccgagcggaatcatcgtccggtccagagccaggtcacgatcagccagcatgcgcaggtagcgcatcatctgggtctcggaggtgatcgaggtgaagatcgggtgggtcaggatcgcgtcgtcacgcaggatgcccaggtcccccagtgggccgtcttccgcaccgaagtcttcggtgttcacccgcgcagaagactcgccctcatgggtagagacgccaacgagtgcaccgatcagctcctcaatgtcggcatccgtggtggactcaccgacagagatgcctacgaagtcctcgctgaccttgcggatgttgaagcctgcctgaagagcggcctgaacagcggcgtccgcccctccctgcgaggacacatcgacggtgaccgtgtcgaagaacgtgtcgtgcgcgagcgtgaggccctccttggccagtgccaccgccaacgcgaccgcacggccgtggacggcggtggcgatctcgcggaggccctgcggtccgtgccacacggcgtagaacccggccatcactgccaagagagcctgtgcggtgcagatgttactggtggccttgtcgcggcgaatgtgctgttcgcgggtctgcagagcgagccgataggcgggcatcccgtcctcgtccttggatacgcccacgatgcgacccggcatcttgcgctccaaggattcgcggcaggacatgaacgccgcgtgcgggccgccgaagaacagtggcacgccgaagcgctgcgcggagccaacggcgatgtccgcgccctgcgagcccggggacgccaccaagacctgagccagcaggtcgcaatccacggtgaccaggccgccaacggccttcacccggtcgatgtcttccttcaggtctcgcacgcgaccggtggtgccggggttggagaagaccacgccgacgaggccctcgcggtccagcgcctctgcatcctcgcccgccagatccaggacctcgaccgggatgcccgcagcctctgcacgcgccaaggtgacggtgatggattgctggtgcagcgccgaatccagcagcaccgcgccgcccttcttcgcggccttagtgttcacgcgggccatcatctgcacggcctctgcaacggcagtggcctcatccagcagggaggcacctgccacaggcaagccggtcagatcttgcacggccgtctggaagttcagcagggcctcgaggcgcccctgggagatttccggctggtagggggtgtaggcggtgtaccagcccgggttttccaccacgttgcggcgg

SEQ ID NO: 338 - DNA, 23339 bp, synthetic construct
  source 1..23339: mol_type = other DNA
  misc_feature 1..23339: note = Synthetic
gacgcggtcattagccggaataatgatgtcctgccgagggcacggctccggcaacttcgggctcttcgcggaaaaacggctatccccagtggaagtggttgaggcttcggaggtcatttatgcagttccttcgagtggacttaaacagtgcatgattttgtatacacaatcttaaagtgtaaggctcatcactttcagcgctttcgtggaatttgcctcactcgcgttacaactgcacatccccataggcgcgttcgtcctcaattggctccagatgcgaggagatatgcacacctgggaaacgctcccgcagctcatcttccatcgcggtaagcacatcgtgaccgcgctccacgctccacgcgcccggcaccagcacatggaactcaatgaacttctgatgccccgactcgcgagtgcggatttcgtggacgtcgatgccacgactccggtcacggtgcgaggccaaaatctcatccaccgccacgcggtcgtcgccctccatggccttgtccatcaggccgttaccggaatcgcgcagcagcttgtagccggtgaccaggatgtttacggccacggccagcgcgataatcgggtcgagccaccacaggccggtaacccacaccagcgccacacctacgagcactccggcggaggtccacacgtcggtcatcagatgcttgccgtcggcggtcagcgccagggagttgtgctggcgcccggccttaagcagaatcagcgccaccgcaccattgatcaccgaggcaattacggtcacgacgaggccctggccaatctgctcaatcggctgcgggttcaccaaccgctcgatggagacataaataatggccgccgccgccacgaagatcatggcaccttccagcccggccgagaagtactctgccttggaatggccgaactcatgatcacggtccgcgggccgcgcgataaccttgagcacaataattgcgacaactgccgcaaccagattgacaatcgactccgtcgcgtcggaaagcaggcccaccgatccggtcagagtgtagccccaaaacttcagcgcgatggtgacgaccgccgcccccactgaaagccaaccaaaacgagataagtcctgcatatgcgggcactttacccgcctttccggagttactaccagttctatgagcaccgatttccagttcaatttgcagaacatttctgcaggcctgccgttcgcgtcgcaactcgcctcgcttgccgacgccgtgcgcgaccacgacgtagtagtccaggccccaccgggcaccggcaagaccactttggttccgccggcagtagccaacaccctgggcggccgcattgtggtcacggctccccggcgtgtggcggtgcgctcggcagcgcggcggttggcacagctgtcgggcacgaagctcggtggggaagttggttactcggtgcgtggcgacacaaaagtttcccgcgccacccgcgtggagtttgtcactcccggtgtgctgctgcgtcgactgctgcgcgacggcgacgtggatgccagcgcggtgctcatcgacgaggtgcacgagcgcggcttggataccgatttagtgctggcgatggtgcgcgacttgcgggatatccgcgatgacctgcgccttgtcgctatgtcggcaacggtggacgcgccgaagttcgcgaccctgctcggtggctctgccccggctcccatcgtggctgcggaggcggcaatccacccgttggacatccgctacgcaccctttccgcaacggctggatgcgcgcggtgtgaccgacgacttcctgcagcacgtggcagcgcaggccaggaaactggtggaggaagccgccggtgatgtgctggttttcctccccgggatccgcgaggtggaacgctgcgcaggctatatcgccgacgcctcagatgcgacagtgctaacgctgcatggccagcagagctccgaagagcaggaccgcgtgttccgtcgacaagcggacggtaggcgcgtgattgtgtccaccgcgattgcggaatcatccgtgaccgtgccgggcgtgcgcgccgttgtcgacgcctgcctcgcgcgcggaccgcgactcgacatcgcgcgtggcttctccggcctggtcaccagctcgtgtgcgcagtcctccgcaaaccagcgcgcgggccgtgcgggacgtgagggtccgggcatcgtggtgcgctgcgtctctcagtcggagttcgcgtccctcccagcctggcccgcgccggaaatcgaggtcgccgacctgacacaggcactcctcgacgccgccgcgtggggcacgcctgggatgcagggactgaagcttctcgacgccccaccaccccaccacgcggaggtcgcaaaccgcattctggctggcctgggcgctgttgatgaggccggtgacatcacggaactcggccgcaccctggctaccctgccggtgcatccgcgcatgggacgcgcgctgctgaccgccacggccatgatgccgcagcacgcggacgcggtcgcacgcgcggtggagaaactcaccgacgcccgcggcttggccaagcaggtgcgccgcattgagctggatactgaggcccccgccaacctgctgccctcggacatccccgcgctggtcacggccctggcctggccggatttcatcgggcgacgccgcagtgcgaactccgacgaatacctctttaccggcggcaccgctgcggaactcacccgtggttctgacctgcgcggccacgaatggatcgcggccgccgacatctcgcggctctcccatgggcgcgcgctgattcgcgacggcgaggcgattgacctggaaatcgccatgctcgccgccggccacctcgcccgcacggagaccacggcgcgcgtcgaacagggccgtgttcgcgcccgcgagcgcgacctgctcggcgccatcgaactgtcatcccgccaggtctccccgacgcccgagcagtgcattgccgccaactccgcctggcttgccgacgcgcttaccgacgcctcccccagcctcgaccgcgacaccgagcagctccgccgccgcatggcctttctccacgctcatcgcggtgccccatggccggatgtctcccccgcagggctcgcggctcaggccgagctcctttttgccggcgagctggaccgtccgaccccacccaagctagatgccgagcacctccgccgcctgctgccctggccggaggcctcggacttcgaccggctggtgcccgaacgcctggaggtcccctccggttcgaagattcgcctggagtacccggaggaccccacggaccctgaggcgcagattgtcctggccgtgaagttgcaggagtgcttcggcctggcggagaccccgcaggtattggaaaagccggtgacaatgcatttgctgtcaccggctcagcgaccactcgcggtcactcaggacttggaaagcttctggaatggcgcctacgcacaggttcgctccgagatgcggggccgttaccccaagcacccgtggccggagaacccgtgggaggagcaggctactgcgaggacgaagcgtcgtcgttaagcaagcccgtcgttaagcagctgcctgtgcccgcacgcgactgggcttgcgccagaggtagattgcgtagcccaggcaggtgaagaagagcacgccccccatgattccctgcatgttgccgtagaaccactgccccacattggcagcgtggccgaagtcattgcccacgaacaccttgtacggtgcccaccagtgggcgatcatgaacaggacaccgacaataatgtgcccaatctcgcggacgaagagcaccagcggcacgaagaccatgacgatcgaccagtggtggctgaccgcgtatggcccggcgaagctgaccgccagcgcaacgaaaccaagggctgcgacatcatagccgttgcggtggtagatccacgccacgaaagcagcagcgatggcaccgatgaggaagaaaccgtagatgccaatatcgagcgcggtaccctccaccccggcgcgggcgagcagaccactgaacgcctggttggcctcataggccggggcgccaccgcggttgccggcgaagaactcatcggtccagaagtagatggactctttaaaacgcacggcgaaaccaatagcgacggtcaccaggaaccagcagaagctcttggccacggccgcaaagtcacgacgcatgaggaacaccagcgcatatgccgcgggggtgatcttaatacccgccgcgatacccacgcccagtccacgcagtttcttgggcaaaaagcccagcacatcggagaccaccagcagcgcgaggaagacgttgatctgcccgaagagcacgttggcgcgcagcgggtcgagcagcatcacaacaccgagcacgcaggtagccatcagcttcggacgctcagagccgagacgagtgaagaccatccacagcatcgcccacaccgccgccagcgtggcgaacgtccagatgatctgcagggtcaccggccccgcccaggtcagcgggtaaaacagcagcgccgcaaacggtgggtagatgaagcggaaacccgatctggtgggaaactctggtgagtagagatcctggtctcgtcgtagtgcccagccggcgtcttggaagacctcgaggtccatcatgtaggcagttgccgcaagatagatgaagtcgatgacaacgaccagcgacaccagcccaaatacaattgccaagatccgtctctgcatgacggaaagcgtcgagagtctgtccatgagcatgattcgacactaccgcacagttcttcctactcaggccttagagtgggaggtatgttcgtggaaaactatcgcaaggttcgctccgagatcgacgacgcttgccgacgagctgggcgccagccctccgaggtccgcctgctgcccgtcagcaagactgtgcctgtcgacgccctggtggaatcctggccggagctcgcagcagccggctgcgctggcctggcggaaaaccgcgtccaggaagcggtggccaaggcggaggcattccgggaggccttcggcgacaaggcaccacatatggccatcattggtccactgcagacgaataaggccggccacttggtcagttgtgctgatgagtttcaggctctggaccgcccgaaggtggccggagcactgcagcgtcgcttggccgattccgagcgcacgctcgatgtcttgattcaggtcaatgcctcccgcgagccgcagaagtcgggtctggcgccgagccacgcggcggagtttgtccgcatgtttggccccgatggcgaatacccgaacctgcgtctgcgcgggtttatgaccatcgcggcccagaatgatccgaatgtgcgcgagaccttcgcggagctgcgggagctgcgggacagtctgctcggggatttgcgggacggtgtcagcctcaacgaactgtcaatgggtatgtccggcgactaccgcgaagccatcgccgagggggcgaccaccgtgcgtgtgggacgcgccatcttcggtgagcgctcctatcagaaataaaggtcgcgaaatagaggtaatctcaatgccatgagttctgatgtctccccgtgctcccgtcgtcgtttcctcctgggaactgccgccactgcagctggcgcactcgtagccgcttgtgcaccaaagtctgcggtggagaaggttgacgctgccgacattccggttggcggcggtgtggtgatcggcaattacgtcgtcacgcagccggaggaaggcaagttcgccgctttctccagctcctgcccgcaccagaatggtcgtatcactgaggtcagcaatggtgtgatgatttgcccgaaccacaactcccactttgatattgctactggtgaggttgtttctggcccctcgcgtaagcccgctggtcaggcatcgctttcagccgaaggcactgagctgattgtgggccagaagtaggtttatcttctagcgccgcggcttcaaccccgccacggcacacgcgcccgcgatgaaggacagcgccaccagccacggaatcagccctgcccactcgaagtggctgaacaccatgccggagacccaaccgacaatcgatgagcccgcgtagtagctgaacaggtacatcgatgacgcctcggcgcggtcgcgctgcgccaccagccccacgccggacgaggacagcgagtgcgccacgaagaacgatgccgtgaatacaagcacgcccacaatcagtgcgggcagccacggcagcagcgccagccccaggcccacgcacgcggccagagtcgcaatggcgatgaggcgacggcggctcaccgtcttcgcccacacgcccgcgcgtgccgacgaccacgtgcccgacaggtagagaataaatacgaaccctgccagtgccggggagagcccgaacttatcgcccagtcggaagcccaggtagttgtacagagagacaaacgaccccataaacaggaacgccagggcgcacagcgcgagaatgcgcgggtcgcgcaagtgccgcgctatggcctgcccctcccctgcaaacgacagctgcttcggctggaacctacgctgttgcggcaggaagtaccaggtcagaatggcgaaaacaaacgccaccgtcgccgagaccgcaatcgccacccgccaggaggcgaactccagcacaatggacggaataatacggccgagcagaccaccgaccgtcgtgcccgagatatacagccccatcacgcgactgacatggtcggcgtggacttcctcactgacataagccatagccactgcgggaacaccggcaatgacaatgccctgcagcaggcgcagagcaatcatcgaaccgatgcccggcgcgattgacaccacgagccccaacagcgttgccacaaatgcgctgatgacaatcacgcgtctgcgtccaaagcgttccgacaaaatggacaccgggataatcgcgcaggccaagccaccggtggtggcggataccgtcagcgcggcggtggcggggtcgaccgatagctcgtcggaaagcgtgggcagcagcgcctgcgttgcgtagagcgcttggaacgatgccaggccggcgaaaagcacagcgataagcgcgaggcggaatccaggatcttctggccgtagtccttcgatctgttcggggttttcgttagcgctagtcacttgtcctacgttagccctccctccaaacccctcgctggatacccggatctgaaaaacctttttaattcgcgcgcgatatcgcgttcgttttattagtttcgtaggcatgactacttctcctgcacagccgcaaagtcgcaaccacgaccgcgagtacgacatcgtcgtctacggtgccacgggtttcgtgggccgcttgattgtggactatctggctaaacacgccggtcagacgaaggtggcgctcgcaggtaggaatgctgaaaagcttgccgatgtcgcggagaatgcaggcgtatcggactggccggtcattgttgcggatgccgccgaccagcaggcggtggcaaagctcgcggccagcacgaaggtggtgttgaccgttgtggggccgtacgcgaagtacggtcgcaccctggtggccgagtgtgccaaggcaggtactcactacgtcgacctgtgtggcgaagtgctgttcgtccacgactccattgcaaacaaccacgaggtagcgcagcagaccggagcgaagattattcactcctgcggcttcgactcaattccctccgatgtcgctgtccgtgagctccacgaggcggcccacaccaagctcggtgagacaaccctgctgttcaagcatgtcaagggtggtgtctccggcggcactatcgattcagtccgcgttcagattgaacaggccaagaaggatcccaagctgcgtcgcatcatcgccgatcagtacgcgctggctgagccgggacccgaccagggtaagttcggcgtcgacctgcgtccggcgcgcttccgccgccactggcgagcccccttcttcatgtcgcctttcaacacccgcattgttcagcgctcggcgatgctggcggattacggtgattccttccgctaccgcgagctactcaatgtcggccgcggtccgaaggctttcgtgcgcgcaaatattttcgcggctgtctgcaggttggcgctggcggcgatggcatttgggccgacggccaagctcattgataaaaaactaccgaagccgggcgagggcccgagcgctgaagcacaggccgaaggccgcttcaccatcgaggcctacaccgtcgatacctccggcattcactggcgttccaaggtgtcccttgaggaagacccagggtacgcaggcaccgcgattatgatttccagcgccgccctcgcgctcgtccacgacgatctgccggacaccaccggcgtgctcactcctactgtcgcgcttggcgatgccctgtcccgccgtctccgcgctggcggcatgaccattgaggcggtgcaggctcgatgattggtggcctgaccggtgcttttgcgaatctcacccgcggactgaagctgccgactgtaggtggtggccgcgcgttagtgaccggcgcttcctccggcatcggctgggcatgcgcggaggcactggtcaaggccggtttcgaggtcgttggcacgtcccgcagaggcgccgatgcgccgcaccccgagggcgtgcagatggtggtgctcgacatgtccagcgctgacgatatcgccgctgtggtcgctcacgggccttacgacgtcgtcgttgccaatgccggcgagagtcagtcgggcgctttcgaggagctaccccgcgaggcacttgagcgtctcttccaagtcaatgttctaggacaggtggagctgttacagcagctgctgcccggcatgcgcgaggctggtcgtggccgaattgtgctggtgggctcgatgctcggcgggttgccgctgtcctaccgttcttcctacgtggcgacgaaggccgctatccgcggctttgggctttcgttgcggggtgaagtcgcgcagttcggtattggggttacggttgtcgagccgggcgccatcaacacggggatttcctcacgtcggacgacgtatggcgatgagggttctgtttacgctgccgatgtccaccgcatgctgacaaagttgaacgccaatgaggaacgtggcattcccgcttctgagattgctgaggtggttatgcgcgaggtggctgccgagcgacctttagccctggtggcgcgggggtcgtcggcaagcgtagcagtgcccttcatgcggcggatcccgacgcaagcgatgttgaccatcatgcgccgagtgcacgggctgcggtgagtaagtgtgctattcggcgatagcgcgcacttcgacggcctgcgcgcacgcctctgaggcttcgtgggccaggttgatggcctcgtgttcatctgcaacttcgacgatccaaaaagccgacgggaacgtcatcgcgttgtagtacggcaaatcgctgtgcgaaccatccggcagcaccgtcatggcatcctctggtggaaccagccctccggacataacccagtgaccttcgtcctgcagcttctgattgaagcgtccaatccgttcaaaggcagcgtgcatttcctcgtcagagtcatacgcgttgatatctctgcggccatggaccgtgaaaaagtactgcacaccaagctcctgagtttcgttttgctaagtgtaacagattcggcgtggttgaaaatgggcatcaccaaagatgtgcgacttaacaggggtaacccccaaaaaaacctaacccaagtactttgttacccttaagcaactcaggttaatgctgttcgttgcaacgagactcggtctcccccatcgacatcataatctttcaaacccatgttcctccgggctctgtgatagactctcgactgagaaccaatcctcagtaaggaccgacccgttagcggttccgattgctccttagggcccttcggggccctaattttttggagttttacatgcgctacgtggttggtatcgatgttggtttgttctctgtcgggtttgcggcactagagattgatgacgcgggaaatccaatcaggattctaaattccatgtcccatattcacgactcggggctggatccgaacaatcagaagactgcccaaacgcgtaaagcagtgtctggtgtggcgcgacgtacacgccgcctgtatgccactcgcaaaaaacgtctggcgacgttggactcttttctcacgaataatggcttcccaattgtgaaccttgaaaatgaggctgacaaaatcgcttgggaagcccgaacaaaactcgccaatcaaaagattgatgatgaaggcgaaaagtacaagcttttctcaatcgccatccgtcatatcgctcgtcaccgtggctggagaaatccgtatgttccggctgaacggcttaatgctctgcgcagcccatctgatgggttccgggcattggagagtaaagcacgagaaatagctaagggaccgattccttctaatccgactctggcccaactggttactgcactgccaaatggtgcgacgcaactgcgtggcgaaggcggcttcctatcagagcgcctgaaccaacaggattttgctaatgagattttgaaaattggctccacccaagagttcacttccgaattcatggcgaaagtggtttcccaagttttttacgcgaaaagcccgaagggatcagctgaaaaatttgtcggcaaagatgagctcgacccatcgcagccacgcgcatggcgcgccacacttgcttttaatgaataccgaaccatcagtcttttagcgaacgtccgaattgctgactccgcctctcccacaaaagctcaacgcgctctaaccgtagaggaacgcaagaaggtctttggcttcctcaatacttggaataaacggacttccccaacctggactgatgtcgctgaagtacttggcattgatcgcggctgcctaaaaggcactgctacctcgaatgacgatggtgagcgagtatcagcagctccccctattaaccacactcatcaaatcatgtggaactgccaagtgaagtctctgcgagagttttggcgcaaaggcagcgatgcgatgcgcagcaaactaatccacgagctgtccaatgtagagacaacgtccgaagaatctcctgaggcgattgctgcagcgacagcgatacgctcactttctccagaggagatggaaaaacttgaatcaatcaaacttcctcatgggcgctctgcgtactcagtgcggactttggaaaaactctctcactacttactgaataacgaagctgacttacatgcagcgcgtcaggcgctttttgacatctctgatagctggcaccctgccgctcctccagttgctgaaccaacaggaaacccatctgtagacagaacactcagtgcaattaaccgctggctactgcttgcagagaagcgttggggcatacctgtatcaattaacattgagactgctcgacatggatttaagtccgaaaatgtcgcacgagaaatcgaccgtggtatcgaacgccgtgcaaaacgtaaccgtgcagtccaagaaaacatcgccaaggtactgggcattgagggcaaggtacgccgtggcgaccaacttcgataccaggcaatccagcgtcaaaatggacagtgtgcttactgtggtgcgccaatcactttcaagaatgcggagatggatcatgtcgttccccgtgccggcgcaggttcaactaactcacggaataacctgctagctgcatgccataagtgcaatctcagtaaaggaaagttaccttttgcagtttgggcaagcaaagaactatctggcccaaatgtgagcctccaaggtgctattgaccgagtgaatcagtggccaaccgatagcggtcttactactagggaaatgaaggatttccaaggatccgtaatcaagaatttgaagcggacttcggaagacgagaaaattgatgcccgcagtatcgaatcggttgcatggatggccgtcgaactcaggcatcgtctaattggctacttcgagcaaatggactttgcacctaaaatccgtgtctttagcggtgccgtgactgcatctgctcgcaaagcatctggcatcgaaaagcgcataaaaatgctgggcggaagtcacggtaagaatcgtttagaccggcgtcaccatgcgttggacgcgacagtaatttcgctgatgtcgtacaccgtggcacagacattgctggaacgtcacaacttgcgttgggaagagtctattactcgtacccctgattccgactatggaacttggaaagagtacaaggggcggaaccaacagaacaggtacctgtttgaacaatggactcatcgaatgcgtttgaccgtacctctactccaggatgctctggatgataaccgcatttcagttaccgaaaatctccgcctacgccttgggaatagtcaggcgcacgaggctggcattggaaaacttatttctgcgcgggttggagactctctatccactgaattaattgatagagcatcgacacctgcactctggtgtgcccttacacgttcagaggactttgactggaaagacggattaccggaaaacccgacgagggagatcagagtcaatgggaaacacttaacagccgaggatgaaatcactttcttcggtgttaaagctggtgcaattgctattcgtggtggctatgcagaactcggcgcctctttccaccatgcgcgtttgtatcgtattacgaacggaaagcagcaagcgtactgcatgcagcgcgtatacactgtggatcttgcccgtcaccagggtgaagatctattttcagtcgaactaccgcctcaatccatttctgtacgccagtgcgaaccaaaacttcgtaaggcattgagagaggggacagccgaatacatcacctggtttgtcgtcggcgatgagcttcacgtgaactctagtaaagttgctacgggtcaagccgccactttcctcgcggaatatggggacatacggtcatggcgaattaggggatttgactcaaatgcaaagctaaagctaaagccaacattgttttctgccgaaggacttcctccaaatatttcagcagattgcaaaaaagtcattgaccgtcctggctggcggccagcagtcaacaaattgtttggtctcggctccgtaaccattgtccgtcgggacgcgcatggtcgaccgcgattcgaaagtacgggtcatctccccacttgcgttcaagtggagtcactatgacatggcgtgtactcgacttcacatcattcaatggccgacttagttacacccgcgggcacatcaaagctgagtaccatgatggacattgtaagactgttagcctcgccgagactgcggtgattacaattgccaacaatgtagatatttcgtctggactgcttggtgtactgggcgagaagagcattccagtcatcatcactgattggcgaaagattcctatcgcaacatccaccgggtggtcgacacatacccgtgtcggggcacgtcaaattgcacaggccagtctaagcctccctagacgtaaacaggcatgggccagtctcgtgcgcgcgaaggttcacagtcaagcacaaacgcttcaggcgctcggctttcccgcagcctcgaatgacttgcacaagcttgctttagaagtaaggtcaggcgatccggcgaatgtcgaggcacaggcagctcgttactattggagtcacttctacgatgaatcttttcatagaaatcaagatgggattgatttcgttaacatcgcactcaattatgggtacaccatcctaagaggtcactgcattcgagctgtcacagaagccggactctggcctgccttaggtgtttttcatcattcaagatcaaatggttttaatctagctgatgatttgattgaaccatttaggccagtaatcgactactccgtcgcacaactacctcctgactccgagattgaaaatcccgccgtccgaacagcactggtttcagcctctgctgctcagttccataaagatggacgaagcgtaaccacaatgttaagcgcaacagcccaacagttcggacggtacgcagagggagaaatcaagcagttccgtgcggagtcatggtctggccccttccgggaatcatcatgacgcgcgaggacaaacgcatgtggtgcatcgtcatgtttgatcttccagttaagacggaaattgaacgaaaagaagctacaaagtttcggaatttcctcctagacaacggttttagtcgagttcaatacagcgtgtacgtgcaataccttccattaggcgcacaactagccaaaattgccagggacatcaagcaaaggttacccaacgcaggcgaagttcgaatcgttccgttgacagacaaacaatggtcaaatgcgttccgtttttgtaagggaacgccccaaaagatggaggaaacaccacaacagcttgaaattttttagaaaaaatcccctgatagacctgttcaaaaggtatttttctgcctctcggaagtctatcaggggaaatgagaaccaatccccagctgcaccgtcacaggaatcgtgcagggatgaagtctatcaggggaaatgagaaccaatccccagcgacagtgaggtgtggtggcacatgcagagaagtctatcaggggaaatgagaaccaatccccagctacacggaggacgcgcagattgagatcagaagtctatcaggggaaatgagaaccaatccccagcatgaagaactcgtcggggacgttttcttgaagtctatcaggggaaatgagaaccaatccccagcataatcgacgcaacaacaccgatgattggaagtctatcaggggaaatgagaaccaatccccagcgtagcgtgccatgctgtgtcctcccttggaagtctatcaggggaaatgagaaccaatccccagccagattacgcgcgcgtggtggcggatgtgaagtctatcaggggaaatgagaaccaatccccagcccggctgggcgagtaggagctggcgcgggaagtctatcaggggaaatgagaaccaatccccagcaagatgaacgagcagcgcggcagcttcggaagtctatcaggggaaatgagaaccaatccccagcataccgccgttgagatcgtcacaccggggaagtctatcaggggaaatgagaaccaatccccagcccgcgcgagcggggatgccccttccaaccaagactggatcaccaacaaaactaatcggtctccactaacctctccacaacttccgctagtcctatccggcaatcaaaacaacaagtgacacgaatggtggaacacttctgttaacgcgatgaaatgaggcattcccagccacctgagtaaaaacagtcaacctgcgaagtaaaccaattcctccgactgaaatacatcgcgcgcatgagtcacctagagccctcatgatgaaagacactcgcaggcactacataggtttttgcgtgcgtgctttgcgggcaactcctgtttcgcagtggcagctcgctgtgccctgatctccgctacctgctgcttgcgggtattgaaccccatgcgccacggggcagctaggcctgactcgggggcatgtgggttatcgcgccaagatttgccctcgttgtaggcctgcgcgccctcacggtatgcggcagattgctcggcaaagattgggtacggctgttcagcagcctgtctggcctgcgcaccgacagctttcattttcgcgcgcagttccttgattttgtcctgaatctttttgttgtagcgttcctgctgctctgcaatatcgacgagtgcctgctgctcggtgatggggtcgaacgagtcttggcctgccttgtcgtaggcttccttagcgcgcgaggtgcgctcccaaccacgcaaagagggattgtaaacgcaccagtcttcctggccgtcgtctttgtagatactgccgttgtgatcccagtacttcgtcatgcgcttacccttctgagtgtttacgcgggtctgactacgccgttaggcacagggaacccgaaggcgacagaacctacactaacctctccggagcttccgccaggcccaatcaataatcacgaagccaacaagcgtcacaccgaacagtggtgcaactaccgagtaggcaatcaacagcgccacaacagccgctgcaacacccgggcgaatatctcgccagcgcgttggcgccgggaacctgcccggacgaccacctcggccgcgtccaaaccacatgacgtacccgcgcacaatcatcgccagcagagcaacaccgatcagcgccaggaccagctgattcacccacccgaacaggatgcccatgtgcgcgttaatcagccattcggtcagcttcgccggcagcggccagtccgcaaaatggatccgatcgaccatcgctccggtcgacccgtcaacggtgacggtctcaatgcccatccgccattcctcgcgggcttccttggccatccacaccgtgccagcttccggtggtgtcagttcgactttcccggacagtccctcggcacgcgcgaggttcataacactatccgcctctgaccagtcataattcgctggcgcagtcgcagtcacagctggtttcggcgcgtaccagtccatcgtctcgcgcagcttagcaatacccgttccagccacccacgaccacgtcaggccggtgacggtcaggaacaaaagtccaacgctgaccgccacaccaacattcgcgtgacgacgcatatgatgtgccctcttacttgttccctgtgtccgcttgcggcgcgagcgatcccaccagagccaaaggccaccgatagccagtgcacccatccaagatgctgccgtctcagagtagaggcgaccaaagttgctatcaatccagagcctgcggtgcccttccgaaatccacgcccgcagcggcagcgccgccgaggagccgtactgcaccaggtctcccttgatgctcaagtcgcctgggtcgacgaacaccgcatgtcggtaggactccgacttcaactgctcatcgttgaacataactcgcgttgtctgtcccggcttttccgggatctgcactgcggtcaccggcagctcaggatgcacgagctgcgcgacctcaacctgcttttccagaggctgtgcgggaaggcctgatgttgcagttagttcttcgtggtaaaccaccttttctatgctcggggcgagggcatacgccacgcctgtgacagctgcaataacgagtagcggcgcaacgaggatgcctgcaacgacatggattcggtgcagtaatgctcgtggcccaccatttttctgagtctgtgcgacggggtttgcggctggcgttccagcggcatcgcctgtggctattgaagtcatgctctattagtcggacgaaccgcctcacttgttccccagcaagctcacttttattaacttccaggggtaaccatttggccacgcgccccgttgtcggccacatcgtgcgcaactattcgtcgtaaagcccgcgtacccttgaagacatggcttatccagacgtgtaccgcgccaatgacaaccgctatgagacgatgccatacaaccgctcaggcgacacggggctaaagcttccagccattacgctgggactttggcataactttggtgatgaccgtccgctcgagacgcagcgtgaaatcctgcgcaccgcgtttgaccacggcgtcacgcactttgatctcgccaacaattacggcccaccacagggctctgcggaggcgaatttcggtcgcatcatggccaaggatttcgctccctaccgcgatgaaatgatcatttcctcgaaggccggttggtacatgcaggatggtccctacggcttcggcggctcgcggaaatacctcgtggccagctgcgatgcctcgctgaagcgcatgggcctggattatgtagacattttctaccaccaccgccccgacccggatacgcctatcgaagaaaccatcgccgccctcgacttcctcgtccgctcgggtcgcgcactctacgtcggcgtcagctcctactcccccgagctcactcgccgtgcgcagaaaatcgcccgtgagctggacactccgctgactattcaccagccgagctactccatgttcaaccgctggatcgaggacgagctgctggcaacctgcgccgacgaaggcatgggcgtcatcgccttttccgcgcttgcgcaggggcttctcaccgaccgctacttggatggcgtgccggagtcctcgcgtctcggggcgcacaagatgaactcggggttcctcaacgacgacacgctcaccgccatccgcgagctcaacgccattgcttcacgacgaggccagtccctggcacagatggccatctcgtgggtgctccgccgtgacgaagtgacctcagccctgatcggtgcatcctcggtgaagcagctgaagaacagcctcggcgccctggacgctgcaccgtttagcgatgaagaactcgcggaaatcgacaagtgggccgtcgaccgcgggattaatcagtggcagggcgctacggagtctgtgtagggagctcatcgagcgccggcagcacatattcaatcagctcatcaatctgctcttccgcatcccgtttggaggtgcggaagttgatgctgacgtggttgatgccgagctgtcgctgggattgcagcagttcaatgagcttgttgcgtccaagtcggtacccaaagtggccgccctgtgcgggtgcatcggggtcttcatgcaggtcaatccacagtgattccaggaatggcttgaacacgccctcgccacactcctgcgccaccgcttcctgccagttggcgatgtttttcttctgcatctccaggcccttgtggtacatgaaccaaccgtcggtatgcgcggccttccactccaggctctgctgacaggagccggtggccaacagcggaactcggcgggccagcggcttgggcaccacatcggatccgcccatcttgccctcggaccaccggataggccggtagctggtgctgagggccttttcatagacctcgatatgctcgcggaaacgctcaccccgcttgcctttgtcctggttaaaggcgggaaactcctcgggtcggtccccagtggcaacgccgaagaggaaacgaccgtcggaaagcctgtccagcgtggcagcgcgcttagccatcaccaacggatgctggaaaggcacgacgactgcaccggtgccgagcgcgatgtcggtggtgtgtgcggcgatgtagctgaggtacatccaggggtcgtagacctggccgacgtcgccgaatgtttccacgcgcagcgggatgtcgcgtgcccacaccgccgcgatgcctgcgcgttcgactttctgaatcagccgaatctggttgctcagcgcgtccttgggctcggcttcggcgtcctgctcgatgggcagactcagccctaccgtgagtcggcccggcgcgaatgtacgctggtaaccgggtagttcgtcgatgggcttgtccgaaagatcaaacagcgagctcatggtgctccacggtagtacagctcgaggtgcggcactcgtcgttaagctgggagcatgcttgaggatgtcatcatcgtcggtggcggccaagctgccctcgctaccgcctattacttgcacaaacacggcattgatccgctcattctggacaatcagcccgctcccggcggctcctggcgcaatgtctggccctcactgacgctcttttccaccccggacttttccaaccttccgggcatccagatgcccaattatgacggtttcccgcccgcttcccacgtgattgactacctcagctcctacgaaaagcgctacgaactgcgcgttcagcgcccggtcgccgtcacgcacgtctcccatgacggcaccttccacctcaccagcgatgccggtgacctcgaatcccgccagctcatcgccgccaccggcaaccggcccttcgtcccgcactaccccggcacgaccgccgcaaaacagtggcattcggccaactacccaggtcccgagccattcgaaagctcccgcgttgccgttgtcggcgcggcgaactccggcgcacaaattgcctctgaactggtactttccaacatcgacaccacctggttcacccgccacgaaccacgctggatgcccaacgacgtcgacggccgcgtcctgttcaaacgctaccgccagggcgccaccgacagcatcggcgacatcgtcgtcctaccgcccgtccgcaaagcccgcgactccggcgcactcacctggacgcccatgttctcctcgcttgacgacgtccacgcggaccacctcatctggtgcaccggtttccgcccagcgctcggccctttccgcagcatcgactctgacctcatcgagttcgtcggctacggcgactgggttggccccggtgccgccacgattatgggcgttggccccttcgctaagcgcgcggccgagcgggtggctgcccgtctgtcagcatgacctgcatcaacagcatgtccaaccatcgcccgttcttcgtccccacctgcggcagtagcccaacacgctgaaagccatactttttgtgcagcgcaatcgacccctcgttactgccttctatcgccgcagccaagacgtgctttcccgcctcgcgagcagcatcgatggtcgcgcttaacagtgcgcctccatccatgcgatgcgatcctccgcactgacagtgtcatcattccagatggcgacggtgttgattacggcttcgttgtagatctccgcgattgccgcggcatcgtcccgcgttgcgtgccggatgatcatggttttactccccgctgtctgcgctgtttctgcgctgtttatctgcgctctgcttttatgaaagcgagattaccaagctttcgttttcgaacgggtgttttatttatgtttttggaccagggcctagcgtacgccctgcaaatgcccagctaaacggtgcctttatagtcggctaaccatcttcgaaaactcctcaaaattctctttcatttctctttacaagccagaaaagcgcctgtaagatagcaagtaagttcgaaagaaaaccgacaaccattggagcaccagggggatccaatgaagtccgaacaagtacccgaaccatattgggctcacgaaaatcctgaagatgagctctcagcactcgcgcgggctaccaaccgcgcccaacttgagttaattaaagcctgctgccctgcaggtgatgatgacgttgaaaaccatgccgctcgcatcagcattcggctgggaatcacccgcagtgaagcactgcgtatctgtgacattggcctgttgctggagaaaatgccacagttggcggaatacgcccgggaaagctgcgcattatccatgcggcaactcggcatcattgcacatggcgtagtcggcatcgagcctgatcaaatacccgatgcagagaagaagattctggcattggttacgccacggaagcgtcgtcaagcaatgattggtcctcgcacgctcaccaccaaaattggtgatattgctgcggacttggatgaccgtgctcgcgccgacggcacaattcccaccatcaccgacacggaatcggtgactctggtggaacgtcccgacagctactcccaaatcattctcacactgcggccggaccgcgcctatttcgccatgtgcgcaattgaaacggtcttccgcgcgaatgaggaaatgacgcaggcggatgcatttgtggaactcatccaccagcgcaccaatgcggaagttgtgctcaatgttttccgcgagccccacagtgatgacgcctggctggacggtgccggctggctaggcgcgctggtcacggaggagtggatgcaaaaggtgacgcatgtccgcctctcagcagacagcgccaccaatggttaccgcccaactccagcgcaggtcgcccgcgtccacggtcgcgatggaacatgtcgcttccccggctgcgaagtcccagcgtacaagtgcgatattgaccatatcgcgccgtacaaccaggaagaccccgaagccggtggtcccaccgacacgcagaatctgcactgcctatgcaggaagcaccacaacctgaaaacccacaagctctgggatatcaccgcttatgaggacggctcagaggtgtggtcctctgccgacggcgttaccgcggcgaccgtcccggccggaccattagccgggttcggccgacagacttttgacaaacgcgctacccagaagacgaaagcacgccatgaccactacatgaagtggtggctgtcattcgcggctgtgccagatctggtctttgatgatggggaggattaacccagcggaccaccgcagttcggccatgcgccagcaccctgggaggcaagcacgcgctcgccaatctcaatctgctgctccttagtggcctggtcagccgtcggtgcgtactggtcaccgccgtggccgctccaggtctgctgcgagaactgcagtccgccgtagtagccgttaccggtattggtctgccaatttccgccggactcacaagccgcaacctgatcccaggcgctaactgatgcagcgttagcggccgcggtcggggcagcaatcatgcctgctgccacagcggcggatgcgatgaacttaccggaaaaacgcataaaaagagaacactcctaaagggttgacttttctcttgggcgaccaacctacgcgcaccctcccccgtcctgtcaacccgtatcctggaaagcatgtccgtggcagatgtcgtccgcaagaccgagagaaggatcaacgcgctggccgccaagcgttccaaaaacgctggttgggaaccggaaatcatcggtttcaccgggtacggaaatgcagagcgcgtgcgcgtattcggccgtgtcctcctgaaggatccggccaaaaaacgagacgaagaacgaaacaaaaaacgcggattttggcagttctttaccgtcgaactcgcggactttcccgtcaccatcactgccggcgaccgcacggtggaaaccaccacggatagcaacggctatatcgaggtactaatcaggaatcacggcctggaacccggctggcacgaaatcaccatcaacgacactcctgcagaggtcctcatcctctccccggagaccaaatacggcatcgtctccgatattgatgacaccgttttggtcactatgctgccgcgcgcc

SEQ ID NO: 339 - DNA, 23336 bp, synthetic construct
  source 1..23336: mol_type = other DNA
  misc_feature 1..23336: note = Synthetic
gattcttctcctcgacgagcctttgtctaatctcgacgcagcgctacggcaacaattgcgcttagaacttaaaaagctacaagccgaatttggcattaccactatttatgtcacgcatgaccaagaagaagcactcagtatgtccgatcgtatcgcggtgtttaatcatgggaaaatagaacagatcggaacccctacagaaatctatgaacgctcagccaccgagtttgtgtgcaattttgttggcgcgtcttctgccctaacagaggtcatactgactgccctcaataaccaaggagcagcacttcgcccccaagcaagcagctatattagaggggagaaaatcgcatttgttcccttccaccacgcgctccccttgcgcgggagggtcgtcgcacagcactatcaagggataacctctaccgccattgttagtatgcacgaggatccgcaatgccagctcagcgttatttatgctaatgaccagcagagttaccctcaggttggtcaggaatgtacggtgttcatcaatccggctgatgttttgcaatttgactccgtcgccagtgcggaaacagatactgaggtggcatagatgaagaaaaaactcagtctgtgcctcattgcccttgtcttggcatgggcaattctcactttccttatctggccgcaagctaatctgctgttttccatattcttccccgatgggcatttttctttcgacgcggtggaaaagctcataaaatcacaacgcgctactagatccttgataaatagtgtgttgcttgcgctcttcctttcagtcagcaacaatctcgtaggtattttcattgtgcttgtcaccaggtattttcgtatctatggtgcacaattattatggctaggtttcgccacgacattcatctatggcggtgtagtgctcgctgctggatacaagttcatttatggcgccaagggcattgccacacaactcttatccagttttattccgggactagacccgcattggttccaaggattctgggctgtcgcttttacgatgacactcgccactaccaccaatcacctcctctttgtctcggcagcattaagaaaaatagataatcaaaccattgaggcggctcggaatatgggagcgtcgcatttgctcattctgcgtcgcattgtcttaccgacgctcgcccccaccctttttgcggtcactatccttactttcctcaccggtcttggagcactgtccgcgccacaaatcctgggtggacgcgaatttcagacgataacgcccctggttctcgcgttttccatgagtcaatcctctagacaactggctgcacttttagcattgagtctcggactgatcaccattgggctcctggttgtgtttaatcacctggaaaagtcgggaatgtatttctctgtttctaaggtatccatgcgactacaaaaacagaaaatcgacaatcccattgcaaacaatttaattcatctactcgcttacttcctgtggctcctctacatccttcccattgcgctaatcgtcatattctcctttatgtcaccagcagccattgccgacgggaaactcaatttcagcgccctgagcttagagaattacatacgcgtctttactcacgacaatgcgctacggcctttcgtcgtcagtgttggctatggtgtattggctgccctcatcgctaccgtgctcatgctttttgttgcgcatatagtgagcaaatatcacaccgcacttgcaaaaatactggagtatgcactacatatcccttggctattaccagcgacaatgctcgcattaggtttgattatgagttacgatcaccccactgcacaattaggtggcatggtgcttactggaaccccaatcatattgctcattgcctatgtaatcgtgaaaatcccattcacgctacgcctgctcaaggcggcattcagctcgctcaattcctcatgcgaagaagctgccactctgctgggcgcgaatccgttgtatatattccgacgtattacattgcccgcaatctttccggcgactgcagctgttaccgcattaaatatcacgagtttgcttgatgattacgatatggcagtctttttggctcacccacgctatcagcccttagggcttatcatccaagccaataccactggtgccgtaggtcctgaagctcatgccaatactcttgtttactcggtcttgctcatgatcatttctactgtcaccatgtatgtagtgtatggacgtgcacattcggaaaggtacacacgatgattccaccacataatcgcattactatggctgatgttgctcgtgaggcaggggtatctcgttcttcggtttcgcgtgtgtttttgggacagaaaaaagtgtctgcagaaaatcgtcggaaagtgctggaagttgccgagcgcctgggttatgttcctaatgttattgctagtgaattagcctctcatcaatctcgtaccgtcggtttgctcctgcgcgatgctgccaatcctgcctatgggctgctttttaccgaactacagcgacaagctcaagctgcagggatcaatgtggtttcgatgactatttctattgatcgccatgagcagcagcatattgctagtctgaatcatttattaggtatgcaagtcgctggtcttattgttgccacaggtagtgttcccagtgagaaattggtgccgtttcataatcgactccccattattcgtgctggtcgcccagagccgacaggaaaaatacacgcagtttcctatgatgaagttgatgctggtactcgcctagcacatcatgttgcacaccacggacatcgtcatgttgcggtgatatgcacagcaccaacagcgtcttatcctgagtgggtacgagccagcagcatgataaccgccttagcggaacataatgttcaggtcacccaaatccacgccgatcacgatgataatgggcataatcacctggcacaatgtcttgacactccacgcaatgacacacccattactgcaattatgtgtccctctgatgtccgccaactcgaggtcatccgttgggccaaggcacgcggtttcgccattcccgacgacctctccataaccggttgcgatggtattatgccggggattgacttgttaggaatctccacctaccgcattgatgttgcaggagttgccacgagagtaatcgaacacattactaacctaatctcagcgcaggcgccacctgccaccatcatcaatgaaaccctaccaggcacactcatacctgggcataccgtcgcacagccactactgaccaatcacgcttaaggattttcatgtcttttacctctgcagaacacccagcgccagaacatttcctggtccatttcagtgacactcactttctggcaccacacaccacaacattgcatggtgtcgcacgctattatgatcacctcgcacagctgttggagagtgtggcggaatatgccattgcgcctgaggctctcattttctctggcgatttgactgatcatggcgaggagcatgcttatgcctcactgcgtgcactggtcgagcctgtggcgcaacgaatgggcgcgcgcgttatttggattatgggcaatcatgatgaccggacaaacttccgtcatatgcttctcgacgaacaacccagcaatccactagcgccctgcgatagtgtgcactggcttggcgggttacgcattattgcactcgacacttcagtccctggtcagcactatggcgagcttagcgacgcgcaactagagtggttagccaccgagcttcgtagcacagcaccagaaggcactattttggccatgcatcacccaccaattccatgtatccaagcacaagctcggtcagtggaactccgaggacagcataggctgaaagaagtgatttacggtagtgatattcgcagtattttagctggtcatgtccactattcaacttttgctacttttgccgatattccggtatctgtttctatgggaacctgctatacccaggatttactcacgccaaagcgtggcacgcgtggacgagatgcaggacaaggaatgcattttgttcatgtttatcccgacaccattatgcatagcgtcgtccagcagcccggcggagaaacagtaggcagattcgttcctggtgatgccacgcaatagctgattacacgccgattacgctactgtgggttttggtgcaggctgtatatccttgagcaggaaagcgaaaacagccaggacggcagtaacgatacttcctgtgtgcataatgaacaccacattttcagcgtcgaaaacatacccgaagaaataagacgccaatgagaaacaataaatgaggaaaatatatgccggaatgcgtatttcacggttatcttccgtagtggttattttcatgaagcgattgaaatacacattctgcaccccattaccaatgcctagcaataatccaccaaggcataatccgagccacgaccagggcaaaaagataccgccgattcctaaagcagtcagtagcgcacctaaagccaaacctgattgggttcgtagtctaattgagcacaattcaagcgcaagtggtccaagtaccagtccggtacttattgcggtaccaattgcaccaaacaccattgtccccatgtcacgcatattgagaacataaagcactactcccacattcacgactgaaccgaaaaatacagtgcacaatggtgttatcaggcgattcctcaggcgtgtgtcaccaagtagttccacaagaccggaaagaaaattatgcttcttctgctgttgtgtttcagttttattagccgtcactccaggaaaaatatccgaccagcgtattgcacatagtgcagcgctaaggaaagcgatagcagccaccaatgccaccactgcggaaaatcccacatgaaataggaacccagtacaggcgggaccggtcacaaagcctagatttctcattgtggttatcacactattgacctggtcaaaacgctttccctcgaaagaatccgcgatgatcaccataatgacagcccacaagagtgcccccaacaatcccattaatcctgagctgaaaatgagcatatgcggagcgtcgaaaagcgtagctgataacgccatgacactgccttcacagagaaacactgcgaaaataattgcacgacgatgtgctatgcgaacaaggagtcgagaacttaatggacctgccatgagagcgccgatagttactacgagaaatagagttaccgacattcgggcatctattgcagagatttttagcagcacagcagtagcgaatatctcatccaccaggctactcaataaaagagcaacagccaggaccattgcttttcccgatatttttacattgcgcgcaatcatgaatttttattatccgctacagtcacactcgcagcaaaggccgctgctagagctttgccattgcgctgaatatcagcgtcatatttttcttgttcctcgcgataccaggtttcatcacctccggaaagcgatgcccaataaccagcagtacgtggtgaagcctcagggtggaattgcactgcagtgatagaaccgagtcggaaactttgcagcggacaagcagcactagatgctaagagcgtggcacctgcaggcaacacagttaccgcatcgtggtgcgagagtggcaggtgggctttagcgtcgagggcacccaaaataggatctgcctgaccagctgaggtcaaaacaatttcgcgcacgccctcttcggcatgagtgcgactattcaccaccacttcaccaccaaagcagtcagcaatgatttggtgccctaaacaaatgcccatgaccgggacattctgagccaaagcctggcgcagcaggcgatgaagatcaggcaaccacggggactgctgagcgtcgagagcatccatagtgccaccaaggataaggagcgcctcaccacattctcctaattgtggaactggctgttcatagagcgcaatgagttgtatttcctgcccagcctcctgcaaccaagtctggaatctgtcgagggtgactttcggatccggttgcatgactgtgatcatttttactcccaaagctaaaacaagactaagatatctgtcattaaatagttatgatgtaaacactatagcaagcacaacactacaacacccaccagcactaaaacagcaaatgctggcacataccaacaagtacagacagccgcgcaaacaccctgcaagaaaaggaacccatatggccgagctactcaccaccatcaacgacaccatctggtcaaccccactcgttatgctcttccttgccgccgggatattcttcaccctaagaaccggactcatacaggtactcggcttacccgacttcttccgacaaatccgacgcgaaaaagcatcacaagacggactctccccattccaaacacttatggtatccatggcagctcgcgtcgggattggcaacatagccggagtcgccaccgccatcgccttcggcggaccaggtgcagtattctggatgtgggtcatgggattccttggcgccgccacctcctttatcgaatgcaccctcgcacaaatctacaaagaacgcgaccccgaaacagggcaataccgaggcggacctgccttctacatcgaaaaagcctacgcccacaccaaagccgcacccatcctcaagatccttgccctcgtcgtggcagcaatccacgccatagccaccatattcttcctcccatccatgcaagccaatggcatcgccaatgcagtcaccaccgtctggcacctcgacgcccgcctgatcgggttaatcctcgcactactactggcagtgattgtcgtcggcggtatacaacgcatcgcccaattcgccagtttcatcgtccccttcatggcaagcacctacatcatcatcgcactcatcatcatgctcagccacgccacacgcataccagaagtatgtgagctcattttcaagtccgccttcggcaaagaagaaatcttcgccggcatcacaggctccgcctttgcctggggaatccgacgcggcgtatattccaacgaagccggacaaggaaacggcgccatgttcgcaggctccgccgaagtcagccaccccgtcaaacaaggctttgtccaagccgtatcagtttacgtcgacacgctactcgtatgctccgccacagccttcatcatcatctccaccgatatgttcaacgtatacagctccaccgacgcatccggcaacaccccactgctctaccacggcgcactcggcgacaacacccccgcaggaccaaactacgtccaagccgggctcgacaccttcatcgccggcacaggacctgcattcgtcgccatcgccatctgtttcttcggattcaccagtgccgttgcctgctactaccttgccgaaacaaacctgtcattcttgctgcgaagtggggttaagcggcgaggttatggcactcagcttcctcgggtcgctgccccgttctcccaacgcatatcgttctcccgacgcatagcccaaggcacgattatcgccgccatgttcatcggagccaccagcacacccggcgccgcctggctactaggcgacatcggcatgggcagtctcgcctggttcaacctcatcatcattgttgcactacacagggtagttatcaccgccctcaaagactatcgactccaacgcgcccaaggactcgacccacaattccaccccaagaaactagggatcaagaacgcagagttttgggtggggtggaggggttataagaggcggttttgagcgcgcagcagttcagcttgtaactcctcatcaaccgcgtatatgtacaacccatgtacgccacgtgtcagaagaacgttgagctggttttgcagcagttcatcgtgcagctctacctttgaaccatcagaaatagtacgtttcttcgtaacgttttggttatggctcgcgtccctgtcaaaaactacttttccatctcgaaatttcacggagggtccaatgatgacgcctgcgtagttcaggtcaaatccctgaatagtgaagattgatcccacttcattgatggttttcttcttttctgcccaggaacgacctctattttcaactttctctttatatgaaaactcaacttggtagttccatggcatagcccagtctccgataacaacgtcccaggttttcgaacctgaaccatcgtcttcttttttcttatttgcgttatatggccaatcgtaggttgctaaaagccgagaaataccattttccacttcagagttatcggtagcctttaaacgaatcgcctcgtgcaagtcgtttggacttgagaaaatcttaatttgatatttgtcatcagatggaatattcccgataacaccgcgacgaccgaaatcctctatccattggcaagccggaccgtcagagtcaatgcgcatctgccccttaagtgtaatagtctcatgcttatcaagccaagctttattctgttcatcccaatactggttaccagctaatgcttgcgctggatcaaaaatcgcaacgacgatacgggcgcgttgcataatatccttcagttggttttcgccacggtaggattgttttccttgagtccaaaggagatgcgcttcatcgatcaatacgacatcgacgggttcatcatgtggatcatgctcattaatgaattttgttggtttcattacgcgtgggttcttagcatcttctattaagagcctacgagcaatggtctgataaacctgcaattgttcatcatggttaaccaacaagtatgaatttagattctgatagtcaaacacatcagtttccctatcagagcccccttgaaaaagatcgtaaaagagactactcaagaggacagtttttcctgttcctgcagctccttgcaccagaataagttgttgagcatctttattcataccatcagatcgaatgatatcatatatttttctttagcttcgatctgctcatcagttagtttatgaaaaggtgatgctttaaaagtgcagattctcgaataattgcttcatcaggaaacagccttttgttatgttcgcgcagctttccccaaatttgagaaaagaccgtatcaaactcctactgtgtaaagtaaagcttctgggggtttcctctgccattttgaactatagaaaaattatccttaccaacactcgataggtagtgtattaatttattttcaatatccagagttaaagatttattgaatagatcgtgtgcgatcaccaacatcaaagtttctccgtcttgaaacccaatccagatttgatgccgacgaagaatagagcttcaccgatatctttaccattactctgttgtggcagacgagagtcatctttgatatgttgctttgtcctatcgtagatactgttcgtttccccaatgtacaccttatacattggcttctcttctgttcctaaatttcgatagattatatagacggtggggtaatctgaaaataatttcgatttcagtaaggtaccatccttaagagattgcagaccctcaacagtgtatggaacttcctcaagataagctttatatttcccaacgattttcatgagaaatcacctcaaaactattctgctaatgtatagaaatcaatatatcaacactcctagctttttctcagtaaagaatttaccctcaatccaaatagatatctttaatgtgatagattttcccagatgaaggctatatacttaaagagttttcccagcaggatggttaaaacacgattatacaaatcaaaagttgcacaaggaaaatatctctactaaaatgtgtaggtgagaatagatcctcagtaaggatcgcctcgatagcgatcattggaatgctccatcgcaacttgcgatttatataacatagttttcgaccatccaatgggtggtcgattttattttggagtcactatgttatctacacttccttccccatcccacaaacgctaccgcgttggaatcgacgtcggtctacactccattggattcgcagcaatcgaaattgacgagcatgatatgcccatcagcatcctcaatgccatgtctctgattcatgacgcaggcttggatcctgattctcagaaaacagctcaaacacgtcgaatggtatctggtgttgcacgccgaacgagaagactttaccgacaacgtaaacgccgcctcaaagaacttgacgaatttttacttcagaatggctacccagtgccagatctggattcatcgccagaaaaaattggttggaaagcacgtgcagcacttgcagaagcaaaaattaccgacacagatgaactaaagcttgctttatcccacgcggcacgccacattgcaaggcaccgtggttggcgaaacccatacaccagcgtgaaaagcatgatgagcgaaaccagctcccattccgatggatatgccgccattgaaaagaaattcagagaaattgttggtctaaaggaaaaccaagaaactccagaaacattggctcttatggtgatgggattgccacaaggaacaattaagcttcgcggtgaagacggtttattttctgaacgcctgcagcagaaagattttgttcaggaactactacttatcggccgtacccaggaacttgagaagactttcctcaatgatctgatcgagaaagttttttacgccaaaagccccaagggatccgcagaaggacgtgttggcaaggacgaactggatccatctcaatacaaagcctggcgtgctacccgagcattccaggaatatcgcattatctccttactagcgaatatccgtatccaagaacgtaatggcacatctctaggagaaaaacgtcctctgagtgtggcagaacgccaaaaagcctttcattttcttaacacctggacaaagcaaaactttcccacctgggctgacgtatcagaattactgggaattgatcgtggcgatctccgtggaacagcatcatcgaacgacgacggtgaacgtgttacttctgctccaccgatcaataatgttgaacaaacaatgagcaatacttccattaaagaatttaaaactttctggaagtcagctaataatgcttctaaggatgcactcatccgtgaactctctaatgtagaggctccgtcagaagatagtccggaagcaatcgcagcttcctcgctaattcgttccatgccaccggaatctttagaaaagttggaaagtttacatcttccagatggacgttccgcttattcagaaaagaccttgcagaggcttagtacttatatgcttaataatgtcgctgatcttcatgcagcgcgtagggcagaatttggtgtggatgatgactgggcgcccgctgccgcccccattgggcagccaaccggtaaccctgcagttgaccgtgtgctcaaggcaacaaaccgttggctgatgatggctgaacatcgttggggtacccctgtatccatcaatgtggaaagtatgcgcgatgggttcaagagtgagaaatccgctcgagagatatcccgtggtcaagaaaatagggcaaagaggaacaaagatgtcatccaatccatgatgactactctgaatatagaaggacgccctgatcgtcatactgtcatgaaatatcaggccatccagcgtcaaaatgggcaatgtgcttattgtggttccacaattaccatgcaaaacgcagaattagatcatattgttccacgggcaggtgtcggttccaccaactcgcgtatcaacctccttgcagcgtgtgctaactgtaaccgttctaaagggaaactgccttttgccgtgtgggcaaagaaaactgacaaaaccggtgtgagcgtagaaagtgccattgatcgggtgaagcagtggcctacggacgctggtctcaatactcgcgaaatgaatgattttaagcaacaggttatcttccgtttgaagcgtgtctctgaggatgaggagattgacgcacggagtaaagaatctgtttcttggatggccaacgaactgcgtcaccgtgtatctcatcatttcggatcagaagtgactgtacgagtatttcgtggttctgttaccgctgcagcgcgtagggcttccggcgttgaggataaaattcgtcttatcggtggacgttctgggaaaaatcgattggatcgacgtcaccatgccattgatgctgctgttattgcccttatgcaggcgacggttgcgcaaattttaacggagcgagatagtctgaggtcggagcaaaagctcacgaaacgcccagacactacttatggtgattggcgagaatataccggtaaaaccatcgcggataaaaccgtgttcaaaacctggttgaagcgtatgaacgtactagtgcctcaactccaaatagctcttgatgaagaccgtattcctgtttcggaaaacttgcgtttacgtttaggtaatgggcaggcccacaaggaaactatccaacctctgaatactgttaccctgggttcagctatctcgatggatcaaattgaccgtgctttctctcctgcattatggactgcattaacgcgttgccctgattttgattggaaagaaggacttcctgagaatctcgaacgtcagatccaagtaaatggcacacactatagcgctcaagatgagatcaaactcttcagtaaaaaagcaggggcactcgctcttaatggtggttttgttgagctaggttcttctttccatcatgcacgtctgtaccgcatcacaggaggcaagaaagatgtctacgccatgctgcgtgtgtataccgttgatctggcacgttataaaaaccaggatcttttccaggtagagctccctcctcaaacaatttctgtaagacaagcagaaccgaaactgcgtaaagcacttcgtgagggtaaagcagaatacctaacatggtttgttgttgacgatgaacttatgctcgatacagctaagattgctacggaaaaggtaatcacgctcttggataaatttggcgatatacgccgatggcgtattcgaggttttgaatcagctactcaactatgccttagacctgcacagctctccgcagagggactttctaaagatgcacttccagatttgaaagaaattattggatcccctgacgggggaaaaacacatggttggagatctgcaattaataaaatatttggcgaagctgatccagtgattatccgtagagatgttcacggtagggttcgtgtgtcttcttctagaggtcttccagttacttaccgtatgaagtagtcatacttaccccatggagtagttatgtcttggcgtgtgatcgatgcatcacagttgaaaggaaagctgagttatagacggggacagcttatggtgtgcccagatgagcgcgaacctactgctattcctctagctgaaattcagatggttcttggtggtatccattgttcagtcagtggtgggctgatgctaaaactgggtgaactgggtattccactcatgtttctagattggaggcatattcctcagtctggtgcttttggctggtcatcgcatacacgagttggcgccagacaaattgctcaggcaggtctttcgttacctaagaagaagagtgcgtggtctgctcttatccgagcaaaggtgcaaaaccaggctcttgcgctgcgggcaactggttccataaaagaagcagattttcttgatgttttagctaaaaaagttcgttctggtgatcctgacaatattgaggggcaggctgcgagattctattggagacatttggaattatctgctggttttatacgggagcagctttctagtgatccatataattcagcccttaattacgggtacactattctacgtggtgttgggatacgggcagtatatagtgcaggattatggccagctttaggtgtgtttcatcatggccgttcaaatgctttcaacttggtggatgatcttatcgaaccattcagacctgtcgtagatctggtggtgaagaatttagatctgggagaagacttttcaggttctgatattaaacgcacagtggcgcatagtattaagcagcaattttctgatgatggttcggccgttgatacttgtctgaatgatctttcacgtaattttggtctttatgtggaaggtgatgtttctagtctttctgtacctaagtggattgggcgtgtcactcatgggtaggccaaggcgggaggatggtatgtggtgtttggtgatgtttgatcttcctgtgaagacagcagttgaacgcagagaggctactaggttccgtaatagtttgttggatgatgggttcagtatggttcagtacagtgtgtatgttcagtacctccctttaggggtgaacctctctaaaattgcgcgtaatctcaagagtcgccttccggtacatggcgaggtacggattgttccgctcactgataaacagtggagtgaggcttttcgtttttctaacgggactgtcgaaaaatcagaagaaaccccagaacaactgcagattttttagcttacagaaagaagaaaatacctcctagagaggcattttcagccctctaggaagtatatcagctggaatgagaatagatccccagcttacttccccgttccctcatctacctcagaagtatatcagctggaatgagaatagatccccagcgaagttaaatgggacggacacgagggcagaagtatatcagctggaatgagaatagatccccagcaccttctaccgtgtaggaaacttggtgagaagtatatcagctggaatgagaatagatccccagcgggaagatgaaatacctgagctccaagagaagtatatcagctggaatgagaatagatccccagcgctggcagaatcaataatcgcgcgtttgagaagtatatcagctggaatgagaatagatccccagctcattccaagtaatgctgcttttcagtagaagtatatcagctggaatgagaatagatccccagcatgggctgtagatggaattgataattttgaagtatatcagctggaatgagaatagatccccagccgctcaaaggttgcaaaatcaatcttgcgaagtatatcagctggaatgagaatagatccccagctcatcgaactcttcgttgtcatcgtcgtgaagtatatcagctggaatgagaatagatccccagctggatgctgaaaacggtgcagaagaagggaagtatatcagctggaatgagaatagatccccagcgttgccccaatcatcgtaattgctttgagaagtatatcagctggaatgagaatagatccccagcaagcatcccgacggcatttcccgcctcggaagtatatcagctggaatgagaatagatccccagccagtcgatggcgggggaacgcatggtaagaagtatatcagctggaatgagaatagatccccagctatggtgttgtctagcacattgaacaaagaagtatatcagctggaatgagaatagatccccagcagaaagtcaagagcgagaatgattaagagaagtatatcagctggaatgagaatagatccccagcacctcaacaagatttcgagctatctcgtgaagtatatcagctggaatgagaatagatccccagctgaggcgaggtgcctagtcacgatggtggaagtatatcagctggaatgggaatagacctccagccgtttttatgatcatgctaaacagaaatgaaatgcatcaactaacaaaaaggctatagtacaatactcaacagagcattcttaaaaacttctctcacaagaaaccagtgaactcatgtgacgtaagcactacctcacagttaacctcatactgtatgattgttaatacatatacaaaaaatcaatcctatcctggctacaactctagtgagattgtggagatgttctacatgatcgcaacactggcacttcaagtagttcagattgcacttcactttctgagcaagcggaagtagtcagaaacccagccctgaatagaccaattactcagggctgggttccctcccagaattctagcaccatcacagaaaggaatcaccatgcgatacctatccatcattgcaggattgtccaccgtcatctacgggatagtcaaaggcattaacccatctttaaccgccacgcttgcactggcagttggcattaacgcaggtatagtgcttcagagtgaggcggcgaaatgaatccgcaaataatcgataccgataccggaaaattgttgtgggttacgtcgcaatgcgcagaacactgcggttgctccaatggcacctttagctcatacgtgtcacgcagtatagcccctgagcctgtggggcattttaaccgtgagcgactgtgggacgcagaggcagtcaaagaatggcacgcctcccgtcctggacgtggggtaaggcgcagtcagggttaggctgccacgtcgagcaatatgagtatctgatcaaatacaaaacgtgaaaaccatcttgaatatctacaagtatattgaagaaaagcgcagatgatagcaggtaatctccctaaatacgccaattattcggggagattacacccccacattctataggagaatacgatgaaaatctttacctatgcagcagaaataatctgcatactggcaatcattgctctacacctcagtccttggttggtagttcttattactatccccctctgttttggtctgggatacgacacacgaaagcgagtagagcgccatgttagcagtaactgacgtgacaccgggagatattctttaactcccttcagtgtgcagagtatgtgggggttacgcgaaaatcgtggataacctaccatcacaggggcgtacccctgagtctgctagtcattttacgccaacatttgtagcgtgtggaagaaataaaaactggctcacccagcgccccggtcgtggtaggtggggatactcagccccaaagtatgtgaagtgtcgagaatcacttcacgtagcagaatgctgttgagcgaaacgtcgctctgcaatccgctacccaaactgatactagacgacatttagctagtgatattttatcatcgcgaacatgagcaagaaaaccttaaaccctggtcatgtgtgtggtcgctcttatgttctgcccgattctttagaggatatggacgggccaacgaacggcgtcgttaagctgcctaactatttggattggcataccgatgatggttttgatctagatgaagaagaaatgattgataccatgtatcgcactgtcctaagggaagcgcttaaagtggaggatctcagatacctcaatcacaccttactgcgtaaaatatggagatctatcaggataccccctgttttgtgagaactctacgaaaccaaatttccagagctgagagaactacgcaaacaaagcagagacgctaaaatagcgctctaacagtagtaatatgatggttcatgacgctgtagcagggaaaatgctattgccaattgtacgcactgatgattatcatctggctaagcactcgcaaaaggtgaaagaaaagcccccagctacaccaactagctgggtacacccctcttaacaataccgaaaggagatactaaatgaaattcacactactaggtgcaagcgctgggcttatcatgctgcttgcgggagcaagcgcgtttttccttcccgcatacctcatattaggtatagccatcgacaaaggtctaaaaccagaaggctaaacaatctagcgttttatgccttcgacgttttgctaagcaccccccaaaaaagaaaatcccgaaccaccgttttaggaacgatgtctcgagacttcacaaaagtgcgcccggagggattcgaacccccaaccttctgatccgtagtcagatgctctatccgttgagccacgggcgcgcattgcagacactgcattgcttgttgctgtgcaacgagttataaagttacaccgataggcagcaaataggcaaattacctagtcagcgaccttaaagcagtcccatacacagcaaaacaagcaccaatacggaatcactccaccggcgtaccccggttaaagtcctttggatctgggccaatgcgtcccgctatagccgaatcatcagtcgcgccagcagctccagcaccgttttccctcgttaccctgtcaagtgcagagatggccgccatctgggcgtcgtcgagcacgaagtctgtgacggcgaagttttccgctatgcgccctgcgttggaggagcgcggcaggacgatgtcgccacgttgaatatgccagcggattatcacctgagctgcggttttgccgtgcgcctcagcgatacttgcgatgtccgcattgtccagcaccttaccctggcccagcggtgaccatgcctgggtgtgaatcccgcgcgcctgattctccgcacgcagcgtatcctgagcaaaaccggggtgcacctcaatctggttcaccacgggcgtttcccccacggcgatgagttcgtcgagtgcctctgggtagaagttgcacacgccgatggaagtggttttgccggcttcgcgcagctggatcatggattcccacgcctgcacgtacttgccgtatccgggacatggccagtgcaggaggtacaggtcaacacgctccaagcctagtttctccagggataattccattgcttcctgagcttttgcctggtctgagttccagagtttcgtggtcacaaagagatcctcacgcgcgacgattccctcagcgattgcctgcgcaatggcctggccaacctcttgttcattgccgtagatagcggcggtgtctatgtgccgataaccggttttgatggcggcgagtgtggcttcataggcgacctcacctgggagttgccaggttccgaagccgagttgcgggattgtggtgccgtccagcagagcgatagtagcgttgccagcggagctagcgtttccggcgttttcaatgttttcggcgtttttatcggttgcagtcattcttccatttgtacgccttttatccattttttgctggacgacgccaggtttccgcagctcagcgttcctaataagacgtttcctgtcacccaataaggacagttttaatacctcatcgctggattattagcgatttaataggacatatacttcatcaatcttttcattatctttcaggaatctaataagcaccccgtgcttagcattagtcagcatgcgcacctattttcacataaccgtagctgatgcagcagctgagaagattgccgtcgttggcacggatagtgcagcttttgagcagacaagcgtagcagatggtcagaacccaggcataaaaatcagcactcttgattctgtggatagtgccacagagcaagtactcaatggaactatcgacgcagctgtggtcaaaatagaacgcggctacgatttgattgcacgcaatcatcctggcacactcaccattaactttgccaaccagagcgtagagaaaatagaccgcgacaatacactcaccagcctcggtatctcaccacaaaactttgagcaatcgctgacgcgatcacaggtgaatatacacactttcggacaagatgaagagcaatcagagtcagaaatccaatctattaccaccgtactcattgccacaggagttatgtgttatctcatcttcctcttcgctggtaatatcggcggacgcgtaacagaagaaaaagcatctcatgtcgtagaaatcatcttggcaactatccgcccacaggatcttcttataggcaaaatcattgctgacacgatcgttggctgtgcagcatcaggaattattctcgccgctagcactatcgcgctacgcataagcggcatcatgagctccactgtccaagccatatagccatatacctattcttatatttgctttcctaatttccaacttttattcccaattttccctatttagccctcacatccccacgtagaaacactttttgcaacttaacccttacccaaaggcagtcaattcattggtgatacttattcacgttttcccgtgagaccactaccagtaccatagccccattaaactactatcgtttcgttgcccgggcaatataaaagcctaaaaggcggattcgacgacggagaatatccgccatccgtgctgtgacctcacccatgggtcatgcgacgcaattattactgaagcgggccaagtactgagcagctcaatcagttcttcgcacaatctcaatgaaaggtggttggtaggctcatcgagcaagaggatatcgtggtctccttgtaaaagaatccccaattctagccgcttcctctggcccacactaagttcacaagcagccatatctacgttttctagaagccccaaagaagtaagcctcggtgccgcatcaggggtggaggagtcgtatatctcacgggcagtccttttatcctggcaatataggtcttcatgtcccagatagccaatgctaacttcgttacctttaaggatagaaccctgagtgggctttaatttcccagatatgatttccaacagagtagtttttccactgccgttcggacctgtaactattattttgtcatccgaagcaatgtcaagtgtgatagcccttttcgatcgtttattcacttttactgatcgcaattgagccaatagcgcggaggacggcactggggttttagttggagcaatagacatcactagagattgtggaggctcaggaatagacgatcgattaatctggttaagacgctcccgagcagcgcgtactcggcgtgatatttgtgattgcacacgatctcctcgtgcaccgtacgcttttttgttgttgtcactcattgcgcgatgatggtttatctgatgcgccttcactgcgacagtgtgcttaagtctgcgaatttcttcttgctcattagcgtagcgttctttccatcgattaatctcatcgtctttctgcttcaaataatcgcggtacgctcccctatagagatactgagaggaaaagctcttatcaagatcacatattccagttggcaccttctccaagaattcccgatcatgagaaacgaaaatgactataccctcccaatttttaatttcatcttgcaagaagatccgtgattgttcatcgagataattagacggttcatcgagaagaagaatctccggccgagaaaccatagtaagtgccatagcaagtctgcgacgctctcccgcggaaagctcatcgacacgctgccgacgcgatagcgactctaaacccaatccatataaatatcgttcaattcgttgcggagcagaccaaacatcttgaacctctgccctttgtaaggcattactatacttctcaagagaacccgaatcccctgcgaccagctcacgcgatgcttgattgagctcctcttcgatttcatacaaaggtgcaagacacgctgcaatctcatcagagaccagggagtcccctctgagtaaatctttttcctgaggcacaaacgctggtttagacgaggaatcaaccaacccagacgtgggggatatttccccagcaagtagcgataacaaagttgacttacctgcaccattttccccaatcacgccaagttttgttccccagccaagagtcattgacagttcctgaaataaagtacgttcccccacccgataggagaccgattcacaagccagagtcacaccttttgccatatagtacactgtaccatttgagtagtatcgtaaactcgtaaacatggaggacacagtcaaaaagcaacgcgaacgaatcatagattccgcatatacccttgctttaagggaaggcattagcgcccttagtgttcgcaaggcagccaaggaggcatccatcggggcaagtacacttcgttattactttccctcacaagatgatttgcgtgttgcagtggtggatagatatctcgaaaaaaacctatcggatatccatattcttgactcgtcacgaagtgccagcgatcggctagttgagtgcttgcagcaatttctccctacttcttcaatgaaagagtcttcctccctcccctggcccagaacagacgggacaacggcaccggatgccgatccagaattaaccaaccaaattttaggaatggccacggatcacacgcatagacgtattgcccattggcttagtatcttaaaaaaagaagcagcgctggccccagaccagccaaccacccccacagttggccttctttgtgctttagttaacggactttctatagatttaaattcccaattcccatcaatcagtcacactgaagccgtggaaatcatacgaaatgtagttgacaagcttgttctcatctagaaaccagactccaaaagctctgaatcccactagtttcttcaatagcttcgataatgaagctataaggtagtcgtattttcggtgagttaagaggaaaatatgcccataacaccatcatcacccctggttaatagcgtcaaataagctatcgaataaccccaccataaacatgctgtgttctaccaaaattgacatcgaacataacaacgaacaccccgttcttcatgtcgggggaggtttttacaatttaagacatgacaaccacagacatcattaaccaagtcaaagagataatttccacagtcacaccagaagaacgacaacacttgattgaacagctggagcagttgtttcacgagccagagtatggtgagattctgtcacaatgtccacgctgcgagtgtgattccgttgtgcgcaaaggcacatcaaagggcgggcaacgctatttgtgtaaagggtgccagcgcacctttggacactccacaaacaaagttctcaaaacctccaaactgtctttagagacatggaggaagttcgctgaatgttttatcgacggtgtaagtgttcgtcgtagtgccgaacgctgcggggttgctgttgccactgctttctttatgcggcaccgtgttcttgagctggttgagaaaaatgctaaaaaagttacggtgaacaggggaaacttagcttatatcgatgaaacgtttttccctattaactataagggggcagctgtgcctgatggtgttaaagctaaaaagcgcggcgggttaaggaaggggaaaagtcagtcaaggttgttggtttgtgtggttatgggcgtgacatctacgggaagtattttccatcaaattgctggatacagtagtatttctaaaaataccgcccgcctagc

SEQ ID NO: 340 - DNA, 23315 bp, synthetic construct
  misc_feature 1..23315: note = Synthetic
  source 1..23315: mol_type = other DNA
gtccgcagaagcgatgacgagcgcgtgggagacgcggtgggcgccatggataaggtcaagggagcgctccagcagcgtgcggccggcgagctctacaaaggccttcggcgtggaaaaacccagcctggtaccggagccagcggcggcgatcaatgccagagtgcgcacggaaattacagctcgtcgtccagggcgtccaagtccacagggccatcgccgtcgccggccaggtcgtcctcggactgggctgcgcgcttggcttcgaaggcggcgcgatggcgggcgatggtctgctgcatctcctccaacagggcgtccgtcttcttgtcatccacgccctcggccagggcgagctcgcccaccaggatctggcgggccttcgccagcatgcgcttctcaccggcggacaggccacggtcctggtcacggcgccacaggtcgcgaaccacctcggccaccttgttcacgtcgccggaggtcaggcgctcctggttggccttgtaacggcgagaccagttgccggcctcctccacgtccgtttcacgcaggacggaaaagaccttcagcaggccctcctcgcccaccacgtcgcgcacaccgaccttctctgcgttcttcgccggaaccttgacagacagatcaccctgattgatgcgcaagatgaggtagtcgacggtttcgcccttgaactcgcgctgctcgattccttcaatcaccgcagcaccgtggtgagggtaaacaaccgtatctccgaccttgaagtccattaaaaggcgcccctaagtaacactcgacagaacatgaatgccccagattataccgcacgggcaccacgggccgaccatcacccaaataaggggcagggcggcggagagcgcgacctataactatgtaaaaagacctcaagaggctagtctagaaggcagacgtttatgaactttcgcctcagatggaggatccacatcgtgaagaccctgaagtcgactgccgtgcgcggcgccctgactttcgtagctgcaggttccgcactggcattgaccgcctgcggtgctggccagatctctcagactgccaaccaggttgctgccgtcaacggaacgtccgccgaagatggacacaccaccgtccgcgacgtctccgtggtgatcgcccctgacaacaccgcggccgtgaagttcaccgccggaaacatcgagaacaaccaccaggttcacaccctgaagtccgtgaaggtggacggcaagcccgtcaccctgaccggcgacaagaacatcgaggctggctgctccctgatcgcctcctaccaggaggaagtcaacgcactgaagaagggcgccaccaagtcctgcaacacctacgtggtcacccagctggccgacgcatccggtgtgttcgtgggcggcaactccaccgtcaccttcaccttcgatcacgctgagctggaaacccccgcctccgtggtggcctacaccccagctgccggtgagttcaaccgcggcgagaacggcctgaccgagaacaacggcggcaccccagccgacccacagaccccgaagggcatcctgaagcccaacgacgagcactcccctgctcacagccactaatttcctggcgacgtggagtgtaggtcccttcgtctaaggtataggccatggccaagggatctaaaacacgttcggtgttccactgcaccagctgtgggcaccaactcagcaaatggatggggcgctgcccctcctgtggcgaatggggcacgctggaggaaaagcagaccctgactagctcagggggatcctctggtggggcgtcacgcagcttggtaccgaccagccccgcccagccggtcacacagatcgaccccaccaccgccacccacaagcccaccggcatcgcggagttagaccgcgtgctgggcggtggcatcgtccccggctcggccatcctcctggccggcgaacccggcgtgggcaaatccaccctcctgctggaggtagcggcctggtgggcccgctccggccacacggtcctgatcatcactgcggaagaatccgtgggacaggtgcgccaccgcgccgaacgcaccggcgcgctagaagagaagctgtacctagccagcgaaaacgacctggagcgggcactcggccacatcgacgcgctgcagccggagctcatcatcatcgactccctccaaaccatgcacgcgcccggcgcggaaggtgtggccggaggcgtgacccaaacgcgggccgtggccagcacgctcaccaccctggcgaaaacctccggcaccccgctcatcaccattggccacgtcaccaaagagggaaacgtggcaggaccgcgcaccgtggagcacctcgtggacgtagtgctgcacttcgagggcgacaagcactcctccatgcgcttcctgcgcggcatcaaaaaccgcttcggcgccaccgacgaggtgggctgcttcgagcagaccgcgcacggcatccgggaggtcacggaccccagcgggctattcctccaccaccgcacggagtccgtgcccggtaccgccatcacggtcgccatggacgggcgccgcgcgatggtgggtgaagtgcagaccctcgcggtggagacggacattagaaacccgaagcgctacgtcaccggcatggagaccgggcgcgtgagcatgaacctggccgtcctcgcggagcgctgtgggctgaagctcacggacaaggaggtctacgccgcaacagtcggtgggatgaagatcgccgagccgtccgcggacctggccatcgccctggcactggcctccaccagcaagaaagccccactcccccaggggctcattgccctgggagaagtggggctgggaggcgaggtgcgccgcgtgccgcagctcacgcagcgcctggcggaagccgcccgcctggggttcacccacgcgatcgtacccgaggggtgcatgtacgatgcgccgaaggtcatgcagatcaaggaggtgaaaagcctagggcaggctgtggcgtactgcttgggttagcctgccttatgccaagttgaaggtggccggctccgagacgttgtcgcccacgtgcgcgtacagcaggaagccacccggccccacggcagtgcggttatcgcagtggcccggcgccgacgtggtgcgcgaccacgcacccaattcataattcacttcttcaccggctttgatgtctacggtgccgcgaacttcggcgtcgttacaatctaaatcgccccacacccgctgataattatccagggtgaatacctcgaacatcagtttgtgggcgtcgaaatcaacgctgcaatcgcccttcgtggggtttttgatattcacgaagaaattcggctgctgatccgcgccgaacgtcggcgccccgggggttgcggtgaccttcaggtccgcgatggtgcagacgtccttctgcttctcgcccttctcgtccttagtggaggactcagtcttcgacggctcgctggacttcttgtccgtctggtgaggaggctcggcgggactggtggcgtcaatggaccgggaggtcgcgacctcggactgggccacactctgatccttgtcacccccgctcagggagctaatcagccaccacagcaacaggatcacaactaacagcaccactcccgcagcaatacggcggcgcatgtagatttcgcgcgggagtggtcttttcggagggttctggttacgggggctcacagttggtgagtctaatgcggcggctcacctatgttcgggagcaacacccgcgaactagagctcgcggcagtccaccccgtcgatcgccacgccgtagctcaagaccggctccacgcgccccgtcttcaggtcgtagtgcgtgcccaccacgcccagccggccgtcgcgcacggcgtcccgcaccaccatggagcgggacaccagctggcccacgctctcggccacgtggtagcgctcgtaggcctcgcgggtggtgtgcccgtccgccttcgccttcagcacggagatcgcgaccttctccaccaggaggttctggaaccccgacgggatcttcccctccgtcagcgcccggtccgtggcggcgatcgcaccacagtattggtggcccatcaccacgatcagcggcacctgcagggcatccaccgcgaactcaatggacgccaggatcgataagccgctcaagtgccctgcgttgcgcaccacgaacatgtcccccagcccctggtcgaacacgatctccaccggcacgcgcgaatccgagcacgccagcaccgccgcgtgcggcgcctgcccctcctccgtcaggatgcggcggcggctctcgtccaggttcgggtgctgcagctgcgcgtccacgaagcgctggttgccgtccatgagggcggcccatgcgtgctgaggggtgtcgtactgtgccgtattcataattatcattctgccattaacatgggtgcgcgtgactactgcagaagcgcccgagcaccgtgaccttgccgccgatctcaattcctggttcggcacgcatgcccgcccgctgccgtggcgcatgccgtccaccaccccgtgggcggtgctggtcagcgaggtgatgtcccagcaaacccccgtcgcgcgcgtggcgccgctgtgggaggcctggatggaccgctggcccacccccgccgatctggcgcgggctgagcgggcggacgtgctgcggatgtgggcgaacctgggctaccctcgtcgtgcgttgcgtttgcgggagtgcgctgtgggcgtcgtcaataatttcgacgcccagcttcccacccacgtcagcgacctgctcacgctgcccggcgtgggggcctacactgcccgggcggtggccgcgttcgcgctggagcaggcggtgcccgtggtggatacgaatgtgcggcgggtgtataagcggctggtcaggggcgagtttttgcaagggtcggcgaaggcgcgggacctggcggatgtggcggcgctgctgccgtatttggatgaggatccggcggtgcggaagcaggcgccggagttgtatgaggagcgttccgatccggcgtataaggaggccgcgctgacgatgtgcgtggcgttgatggagctgggagctttggtgtgcacggccaccaaccctgcgtgcgaccagtgccccgtgcgggagcactgccggtgggtggccctcggcaagccggagcccagcgaggaggagcaggccgcggcgacccagcgggtgcagaagttcgcgggcacggaccggcaggtgcggggcaaagtgatggcgctgttgcggagcgcggggcccgagggcgtggaccgggaagcgatcaatgacgtgtggccgaagaaggtgcaattgtggcgcgcggtggattctttagtggccgatgggttagcgatagaagaaaataattcattttccctcccgcgctaaatacttaccctaaactaattccacatgacacattcacgaagagttgtagcatcgctacttgcaagtattggttttgtttctgcatccctgaccagcgttggaatggctgctgcggcgcctggttctgcgtctgattctgcccctgattctgccctcggctctgtctatgatgccggcgagaaggttcacggcagcgcggaatcctccctgcggggagccgcttccctgggaagcctggaggatctgcccggatccagcattccgaacgaccccaacggtttctataacttcctctcccgcgacgtggagggcgagccaggccagatcatcgacacccagccgggcgtgctggccttcggactgccgggcgtggacctgtccgctggcaacaccaccaccatcgcctacgtctcccgggactccaagggcaaccccacccccgtcaccggcaccatcgtgaccaacaagctcccctggaccgggccgggcgagcgccccaccctggtgatcgctccgggcacccagggcaccgcggaccagtgtgcgcccagccgcctgatgcgcaccggctttgagtacgagaccctgcccgtggtggctgcgctgtccaagggttggaacgtggccatgacggacctgcgcggcctgggtacgccgaagatccagcacacgtacatgaaccgtgtggagcaggcgcaggccaccctggacatggcgcgcgcggccgcgaacacgggcctgggtggcatcacgaagacctcccctgtggcgacgtacgggtacagccagggtggcggcgcgtccgccgccgccttggagctcgcgccgaagtacgcgccggaggtgccgttgaagggtggctacgccggtggtgtgccggccgacctggcgatgactgctaacgccatcgacaatggtgcgctggctgccgcgatgggctacaccatcaacggcttcctggagtccgacccggagatccgcacctacctggaggagcacttgaacgagcgcggatggcacctgctgaagcagacctccgacgagtgcatctgggattccttggctcgccacgcctacggcgacagccgcacgctgacgaaggacggccgctcgatcgcggagctgctgaaggacgagcctattgcggagatcgtgcgccgccagcagatcggctctgagactccgaatgtgccggtgtacatcggccacggcacgaatgatgacacgatccctgtggcgcagggccgcacgctggcccgcacgtggtgcgaggcgggaacgcctgtgtactacaaggagtacaacattccgaaggtggctccgctggcggaccacgctattcctctgctgccgcagatctcccctgcggtgaactggttggatcagatcttccgaggtcaggactacccaaccagctcctgtgcagacatcccgcagtagggtttactgcaggatttactgctgatcgtcccagttatcctctgggacggtcacctcagcggcctcgaccacgtcctcttgggcacggtcggcctcggtgacctcaatctcttctggcagtggcttgggcttggacccgaagacgaacttcgcgtcctcgcccttggactcgccatcccagttctccacatccacggtgacaatctcgccagcgccgatctctccgaacaggatcttctcggacagctggtcctcaatctcacgctgaatggtgcggcgcagggggcgcgcacccagcactggatcgaagccgcgcttggccagcaggttcttcgcctgctcggacagctcgatgcccatgtccttgtccgccagcgccttggtgacgcggcgcagcagcaggtccaccatctccacgatctgctcgcgggtgagctggtggaacaccacgatgtcatcgatacggtttaagaactccgggcggaagtgcttcttcagctcatcatgaaccttgcccttcatccgctcgtactgggtttcctcatccgcctcgccagagccggagaagcccatgcccacggccttggagatgtccctggtgcccaggttggaggtgaagatcagaacggtgttcttgaagtccaccatgcggccctgaccatcggtcaggcggccgtcctccagcacttgcagcagggtgttgtagatctccgtgtgggccttctcgatctcgtcgaacagtaccacggagaatggcttgcggcggaccttctcggtcagctggccaccctcgtcgtagccgacgtatcccggaggggcaccgaacaggcgggaggcggtgaacttgtcgtggaactcgcccatgtcgatctggatcagggcatcgtcctcgccgaacaggaactccgccagggccttggacagctccgtcttacccacaccggaggggccggcgaagatgaaggagccggaggggcgcttcgggtccttcaggccggcgcgggtgcgccggatcgcgcgggacacggccttgaccgcgtcctcctggccgatgatgcgctggtgcagctcgtcctccatgcgcagcaggcgggaggtttcctcctcggtgagcttgaagaccgggatgccggtccaggtgcccatcacctcggcgatctgctcctcgcccacctcggcgatgtcatccagctcgccggcgcgccaggacttttccttctcctcgcgctgctcggtcaggacacgctcgtcgtcgcgcagggacgctgctttttcgaagtcctgctcatcgatcgcggcttccttcttgcggcgcacggcggtgatcttgtcgtcgatctcctggatcgccggtggggcggtcatgcgcttgatgcgcatgcgggcgccggcctcgtcgatcaggtccacggccttatccggcaggaagcggtccgtgatgtagcggtccgccaggttcgcagcagctgccagggcgccgtccgtgatggacacgcggtggtgcgcctcgtagcggtcgcgcaggcccttcaagatctcgatggtgagctccaccgaaggctccggcacctgcaccggctggaaacggcgctccagcgctgcgtccttctcgatgtgcttgcggtactcatccagggtggtggcaccgatggtctgaagctcgccacgggccagctttggcttcaggatggaggcggcgtcgatcgctccctcggcggcacccgcacccaccagggtgtggatctcgtcgatgaacaggatgatgtcgccacgctggttgatttccttcagcaccttcttcaggcgctcctcgaagtcaccgcggtaacgggaccccgccaccagggaacccaagtccaggctgtacaggtgcttgtccttcagggtctccggcaccttgccgttcacaatcgccagggccaggccctccaccactgcggtcttacccacgccgggctcgccgatcaggactgggttgttcttcgtgcggcgggacaggacctgcatcacgcgctcgatctggtcctcgcggcccaccacggggtccagcttgccttcgcgcgcagcctgggtgaggttccggccgaactgatccagaaccagggagttggacttctgccccatcttcgagctcggagcatccccaatattcgggcttccacccacacccgcggcggcgggttcgccaccgttggcgtcggccttaccctcctcgccctcgtaaccagacaggagttggatgacctgctgacgcacgcgggacaggtccgcacccagcttcaccagcacttgcgcggccacgccctcaccctcgcggatcaggcccagcaggatgtgctcggtgccgatgtacttgtggcccagctgcagggcttcacgcagggcaagttccaggaccttcttcgcgcgcggggtgaaggggatgtagccggtgggcgggttgccgccggagccgatgatctccttcacctcggtacgcacagcatccatggaaatgcccatggattcgagggctttcgctgcaacgccctcaccttcctgaatcaggcccagcaggatgtgctcggtgccgatgtagttgtgattcagggcgcgcgcttcttcctgcgcgagcacgatcacgcgacgagcgcggtcggtaaacctctcaaacatgtgcgtccccttttctaaattggccacagagagcgggttgtattcgtgctgcccactgtagcgccgtcgccagacatcgttggcactttggacgttcgagtgccacgtttatgccctttgtgccgacgcccagctctggattggggcacatctctgcaggtcagggggttgtcttggtggagtttggtgcagtgttcgcctgtagcgaacggggtggttggggatggtttgtggggtgttgatgtggcgttgacgtggccgatttgcacaagcgttaaataccccttatacttagtctcgagaatgaatcctcagtaaggatcgcctcgttagcgatcttggaatgctccatcgaccacccacgggtggtcgattttttgtgtcttagcgccccactgtaactaccgcagtgtaatgtcagggtcgacataatgtttcccttttaaaaacacagttgttcgcaggagtgatacgtgaacgccgtccagagcaccaagccaaaaaactatcgagtgggcatcgacgtaggcctcaggtctatcggctttgcagctattgaagtagatgagcagggctcccctctgcagatcctgaatgcgatgtctctcattcacgatgccggcttggatcctgattctcagaagacagcgcaaacccgcttgatggtctccggtgttgctcgccgtacccgccgcctttaccggcaaaggaagcgccgcctgaaggagctggacgaattcctcgccaagaatggctatcccctccccgacctcacaacctcggaagaaaaaattggctggaaatcccgcgctgatctggctacggcaaagatcgaggaccccgaagagctaaagctcgctctctcccatgctgcacggcacattgcccgccaccgcggttggcgtaatccctacaccaccgtcaaaagcatgatgaataaggcgggagagcactccgatggattcctggcggtagaggaaaccttccgtgaactcattggcgagcaaaagcatgcgggccagtctttaactttggcccaaatggttatggcacttcccaacggaaccacgaagatgcgtggcactggcggcttgctgtccgaacggctgcagcaaaaggacttcgtgaaggagatgctgctcatcggcgaggttcaaggactggacgaggagtttcttgagaagctcattgagaggattttttatgcgaaaagtccaaagggttctgccgccggccgggttggaaaggatctgttggatcctcaggaattccgcgcgtggcgcgctacccgtgcgttccaggagtacaggatcatttcgcttctcgcgaatgtgcgtattcaggaacgggtgggcaccagcctcggagagattcggccactcagcgttgaggagcgccagagggtctttaccctcctcaacacgtggacagatagccctttgcctacgtgggcgaacgtagcggaggagcttggcgtagaccgaggcgatctccgcggcactgcatcgtccaatgatgacggcgaacgcgtatcagcgaatccccctgttaaccaggttgaggtagttatgtgctctacagtcatcaaggaattcaaaaagttctgggaaacagccaacaacccctccaaggatgcactcattcgggagctgtccaatgttgaagctccgtcagaagatagccctgaggccattgctgcatccagtcttgtaaggtctcttccgccgaaatcactggaaaagttggaaagcctgaagctccctgatggccgtgccgcatattcggtaaagaccttggaaaagctgcgggactacatgttaaacaacgtggctgatctttacactgcacgccagtcgctgttcgatcttccgaacgactgggctcccccggcggaacctatcggagcgcctactggaaaccccgcagttgatcgcgttctgaaagctaccaaccgatggctcttgcttgccgagaagcgctggggagctcctctctccatcaatatcgagagcctccgcgatggcttcaagagtgaaagcgctgcgcgcgaaatccaaagagagcaggagacgcgggctaagaataatcaggccattgttcagaccatgatgcagaagcttggggtggacggccgccccagccgcaacgatgtgttgcgttaccagtccatccagcgccaaaacggtcagtgtgcatattgtggcaccaccatcaccatgaaaacgtcagagatggatcatattgttccgcgcgctggagtaggttcgacgaactcccgctacaatctcctcgcggtctgtgcgaactgtaaccgttcgaaaggaaagctgccgttcgccgtgtgggcgaagaagtcaaacaatcctcaagtctctctggaagctgcaatcgagcgggttcgtcattggccgacagatgctgggatgcgtcaaaagcaaatgaacgacttcaagcagcaggtgatcttccggctcaagcgagtgtccgaagatgaggaaatcgatgcacgcagtaaagaatccgtctcctggatggctaacgagctgcggcatagggtttcgcatcattaccaggaagctgtgaaggttcgtgtgttccgtgggtctgtaaccgcgggcgctcgcagggcatctggcattgaagataggctcaagctgattggcggccgttcaggtaagaaccgtctggaccgccgccaccacgctgtggatgccgccgtcatcgctttgatgcaagcgactgtcgcacaggtattggcagaacgggacagcctgcgctcggaatacaggaccactcgtcaggtggatacgacgtatggtcattggcgcgactacacaggtaagaccattgccgaccagcgtactttcaaggtgtggacccagcgcatgctcacactagtagatctcctccagactgcgattgatgaggatagaatccccgtcacggaaaatatccggcttaagttgggcaacggtcttgcacacgaggagaccatcaagccactaaagaaggtgctgctgaagagtgagctatcgatggaggatatcgatcgtgctgccacgccggctctctgggctgcgctcacgcggctcccggatttcgactggaagaaggggctgcctgagaatccagaccgcgaaatctccgtcaatggaacacatattggccctaatgaccacatcgagctgttcggtgtgaaggctgccgccttggcactgaatggcggctatgtggaactcggtgcgtctttccaccatgcccggttgtaccggatcaagggcgcgaagcaggattcttacgcgatgatgcgcgtgtacaccaatgatctgcttcgctaccggcacgaggatcttttctcggtggagcttccaccgcacaccatgtccatgaggcaagctgagcccaagcttcgcacagctctccgtgcgggaaaggcagagtatgtgacctggttcgtggtgggagacgagctcatctttgatacggaaaagctcgcaacgggacagatttccagatacctcaaagaatttggacctacgaagcactggcgaatccgaggacttaacaccgatattcaattgcgactaaggcctgcccaactctcagccgaaggccttacctcggagacttcaagcgatagtaaaaaaattatcgataaccccggatggagacctacagtaaataagatctttagtgcaggaaatgtaacattgatcaggcgagatattcatgggcgagtccgcataaccgaccataatggacttccgacgtcagtgaagatcagttaacgatgtcctggcgcgtcattgatgcctctgaacttgatggccgcattggttacaggcgtggtcagcttttgataacgccaactgatggtgaacctgttgggattcctttggcggaagtacagatggttctcgctggcctccactgctctatcagtggcggaatcatgctcaaactcggtgagcttggcataccgatcttgtttacggactggagaaagctcccgcagagcgcagctcaaggttggccgacccacactcgggtgggcgctcggcagattgctcaatctaatctctcgctgcctcggcgaaagaatgcgtggggccaacttattaaggcaaaggtccagaaccagggaaaggctctcagtaacgtcggcaatagtgcagcagcggagcaccttaaagaattgtcccgacaagttcggtcgggagaccctaccaacatagaaggacaagcagctcgatactactggaggaatttgagacttaattccgaattcaccagacaacaagaatccggcgaccctttcaatggagcgctgaattatggttatacgattctgcgcggcctcggtatccgtgcagcattttctgccggcctgtggccagctttgggggttgcccatcatggccggtcaaacatgttcaatttagtggatgacctgatcgagcctttccggccggtagtggatcttatcgtacactcgctcgggcatacgttcactctggatgacccttcagtgaagaaagctttagcgtcggtagctcagcaacagttcactatggatggagcagctgttgatacctcgctcaattctttagcgaaaagtttcggcctctacgtggagggggacctggacaagctgatggttcctcaatggattggttctcttcccgatgcctagagccaagcaggaggacggcatgtggtgtttggtcatgttcgatctaccggtcactacgaagcaagagagaaaggaagccacgaagttccgcaactacctattagattctggcttcagcatggtgcagttcagtgtatatgttcagtacctccctttgggggtgaatctctcaaagatagcttcctccgtgaagggaaggctgccagcccaaggcgaagttcggctcgtccccatcacagataaacagtggagcgaggccttccgattctcgaatcgtacggagctgcgtgagtctgaaacacctgaacaactacagattttttgatgccctggacatgcaaaaatcctcctcagagggcatttttgctctcctaggaagcttatcacagggaatgagaatgaatccccagcttctaatccgtgccaattctttctcctcgaagcttatcacagggaatgagaatgaatccccagcccatcgaaaacaatgtgctcatggcatcgaagcttatcacagggaatgagaatgaatccccagcgtgagtcgtaggccacgacgccggtttcgaagcttatcacagggaatgagaatgaatccccagctgtccttttcgtggagggtgattgcagggaagcttatcacagggaatgagaatgaatccccagcactatgtgacattgcaggattgtttcacgaagcttatcacagggaatgagaatgaatccccagcgtaacccgtcaccacccaacacggggtaggaagcttatcacagggaatgagaatgaatccccagcgtttttgggcatggtctagattaattcagaagcttatcacagggaatgagaatgaatccccagcttgcgatggtccggcgtgtctcattctccgaagcttatcacagggaatgagaatgaatccccagcagttccagccactctatggcatcctcaggaagcttatcacagggaatgagaatgaatccccagcgttgcggtcgagcaggtcatcatcgaccgaagcttatcacagggaatgagaatgaatccccagccgggtccaccgctgtgatgcgaattgccgaagcttatcacagggaatgagaatgaatccccagcgatcaactgatctgtgaattaatctagagaagcttatcacagggaatgagaatgaatccccagcaaaactctgtttggatcgactcgcctaagaagcttatcacagggaatgagaatgaatccccagcgaatgaccttgatctcaccgttggactcgaagcttatcacagggaatgagaatgaatccccagcggaaaggattggatatgtctggactcacgaagcttatcacagggaatgagaatgaatccccagctgtggctgctgacccactctggaaggaggaagcttatcacagggaatgagaatgaatccccagccataaacgagaacgtcaagaagttctttgaagcttatcacagggaatgagaatgaatccccagccgacgacccactggtgtttgtggctacagaagcttatcacagggaatgagaatgaatccccagccccaccggtattcggggatctcgttaatgaagcttatcacagggaatgagaatgaatccccagcggtcctcgttcgaccggattgtgtccacgaagcttatcacagggaatgagaatgaatccccagctgtgcttttaacttatcccaggtcgatcgaagcttatcacagggaatgagaatgaatccccagcaacctccgaagctggccggaaaatgcaagaagcttatcacagggaatgagaatgaatccccagcgtgtgaagttgtcggcggcggacgctgcgaagcttatcacagggaatgagaatgaatccccagcgctccgcacgcgcgtcaatatccgcctggaagcttatcacagggaatgagaatgaatccccagctgtcgtaggcgattgcgccgtgtgcgccgaagcttatcacagggaatgagaatgaatccccagccaccgacatgggcaacaaccccagggtggaagcttatcacagggaatgagaatgaatccccagcgtggcgacgtggcagcagcgttggttacgaagcttatcacagggaatgagaatgaatccccagccaaaaacgcagtagataattgggcgcttgaagcttatcacagggaatgagaatgaatccccagcgaatcaccttgatctcaccgttggactcagaagcttatcacagggaatgagaatgaatccccagcatgttggcgtcgcgtggtgcggtgtattgaagcttatcacagggaatgagaatgaatccccagcagttgtgtgtcatgtggttttgggttgtgaagcttatcacagggaatgagaatgaatccccagcgcttgttgtctgcgcttcatgcgcggtggaagcttatcacagggaatgagaatgaatccccagcatcgaacgttgtggggccatcgtgagcggaagcttatgacagggaatgagaatgaatccccagctctggattacaatatcacgccgttcgaagaagcttatcacagggaatgagaatgaatccccagccatgccagtgacgttgacggtcacgttggaagcttatcacagggaatgagaatgaatccccagccccggctagtgaggtgggtagtagagcagaagcttatcacaaggaatgagaatgaatcctcagcatgactgacaggtggtgtagacgcaggtaaagcttatcgcagtaaatgagaataagtttccagaagagtcgaattcgaacattatccaaagcactcgaataagaaagttaaatacttttcttgcaactgaaagtcaatcataacagcgagggggcagacgtttaccaagctaactgctcggaacgagcctgaaatcaaggtcagtcagctgcagaggcgctattattcttccatggctagcaatactcatcaaaagatccactaccagacactgggcttatccctcgagttgcccaccgattacgcagttcaacagctacctgactggcgcatggcgcacttcgcgctcatccttcccatcccctttatcacgctcggttctaagtcctccacagacaactggacccaagccataccttttgatgaaggctggactcgaggccgtttcaacggcatcaagcgaatcaacaccgcacagcatgacgccgccaaaaacacatacactgctccacccgaaagcctctttgcatatacccccagggcattccatgagtccgcctgcaaacgcttcagcggccccttacaatccagtctggccgcagtagctgccgatggtccggccattataggtgcagatgagtacgcaaaactcatgaacaacagagagcattcccaccatcgcgcatggaagaagctcttcgtcaacgactgttcccgacttaagggagatgtaggcaacgacgagtacgaacgccaggagtactgcgactatctcacaggcttccccaccacgcacgtcctcacatttcctctctctgagaaccctgccgagcacagtcaggtcagcttgatatgcgtggagtatttggagttttcagacccgggacaccgcaggcatggcaaagaacacacggatcagaccgttaacgcagcgttggtactccacgtcgtggccgaaaactgcacgtcaagccagttggagaaaatctcccgagctttgcaccgaccgcgcaacaaggtcaagatccccggagtgtcaacgcccgtggcgttgtttaaggaatttgtgaatgctgccagcgaagctctacctgccacctgcaccgtaaaagcagcacctggcggctttgtatacgcagaaggcgagggttttgccgacactcccgcaaaactcgtgaagcctttcgcagtggtgtgtgccgtgcccggcacggaggaaataaaaaccgcgccagaattcttcaaccagtcgactactgactggccacatgcggacatctgggcctggcagctctgcaccggagcagacaactacagcgaggcaattccccgcctgacccaggattctctcaaagaatcgcaagtaggcgcctaccaggcgtggaccatccatgcggacgaagatggtctcgcaatcgtacgcacgcgtcccgcgagcagctatgacaacaagatgtggatgctctccggcactcgattcgtcgacttggccctgctggttcatcgctccagaagctatctccacgggttcagcgagcgtttgcgcgcaattggcttcaacggtgacgagctcaaagaactcctcgatcaacagcaagtggctgcagacacgttgatgaccgctaccgaggacctatccaaatccctatccaatttccaagacttacagtcagacctggtggagttccgcgaccggttgtggtttgaaaccgttcccaaacgagaagtcgataccgtcatcctgaaagctctccaacgcaccacgggtgcagccgcacacttccacgaaatatgtgcagagatggacctgcgcaaggatatctacgccacacaacaccaggtcctcaaaatccaggcacaagaccggctggtggaacaagacaagcaacaacaggaagaagagaaagcccaacaaaagaaaaatgatcaacgcatggagcgcattactatcttcgcgtctgtgctggccattttgccactgatcgaggcctttccgttcgcagaaggaagcttcgctcccttcctcatttcgctgcttgtggtaatcatcggcgctgcagcattactagtgcccaggagcacatggaaagcaattcgcacaagcaagagaagatagcctctgacacggcgcggtgtcctgaatcgagggcaaactgctgtgatttggcggaaatcactacactttgccctcgatccgggaaagtggaggtacgagcgtctggcacgctggcccatcaccccaccccaacaccagcgaatatcgccaaaaccaagacagcgcagccttcctgatctaactttgaatacaacattatttttgtaactaaccctatgcttgtgcgcagcgtgcaccccaacgccacgcacggcatagaccacagcacctccacaacaccgagacaggaaagaggccccgccctatgaacgcagcccacgcgcccaaactcaccctcaccgaccacgccagcaacgccggaaccctcctcaaaggcaccctgcccctcttccgctccggagtactcggcagcatgacccccgccgccgccggcaaagccctcaaaggcatctaccaatggcgcttcctccccgcaggactcctcgccatcggcgccggccgcgaccccttccacaccgccatcatcgacgacgccggctccatcacctacagcgacctccacaaccaagtcaacaccctcgcacgcgcactgttccgcaccggcatccgcgaacgcgaccgcatcggagtgctctgccgcaaccaccgcggcctcatcatggccctgtgcgcccacggccgcctcggcaccgacatcgtcttcttcaacaccggctcctccgccgaacaaacccgcgcagtgatgcacgaacagaagatcgacctgctgttcatcgacgaagagttcctgccgctccttcccaaagacttcaacgactgccccgtcatcatcgcctgggaaaacggagacaccctaggcctcacggaggaggctgaggcggagctgccggcggcgtcgaatattaccgacgccatagcgagcggcaactacgccacacgatccgaggattggccgagcctgcgcaaggtcctgcgcaccaccccagaaaacctctccatccccgcccgcccccgcatgggacgcaccatcatcctcacctccggcaccaccggaacccccaagggcgcgcgacgaccagagcccaagacctacatgccggccagctccatcatgagccgcatcccgctgaagcaccaccgccccgtgttcctggcggcccccatgttccacacctggggcttcgcgcacatccagctggcgctggcgctacgcaacaccatgatcctgcagaggcgcttcaccgcgaaggacgccatccaggtcattgaaaagaaccggccgtacgcgatctccatcgtgccgaccatgctgcgccgcctgctgaaggaagtgcccgaaggcatggacgccggcgtgaaggtcatcgcctcctccggagaggcgctgccgcccgccgtgatcgaagagacgttcaagaagtttggcccagtgctgtacaacctgtacggctccaccgaggtgtcctgggcctccatcgcacgacccgacgagatggcgaaatacccacgcaccgccggaaagccacccatggccaccacgttgaagatcctggacgacgacggcaaggaatgcgccgacgaagaaatcggccgcatcttcgtgaagaacgacatgctgttcgaaggctacacccgtcccggcaccgacaaggaagtcatcgacggcatggtcaccaccggcgacctgggctactggaaggacggactgctgttcatcgcgggacgctccgacgacatgatcgtctgcggtggtgaaaacgtatacccgcaggaaaccgaagacgtcttcgccgccatggacaacgtccacgaagccgccatccgcggcgtggaagacgaagagttcggccaggcgctgtgcgcatgggttgtgctgaaggaccacgagtccagcggagtgagcgcagcacgccccgcagacagcatcagcgctgaggaacgcgcagagttcgaagcgcaggccaaggcggccgtgaagaagaagctggctcgccacgccgtgccgcgctacttcgtgttcatggacgaactgccccgcaacgccgtgggcaaggtggttccgcgggagctgccgaagccttaagcgtgcggctagcgccataaatgacacagttaagccccggaagcctctgaactagaccagttttgagagcttccggggcttaagtgtgtcatgttctggtaatccggccggcgtagcagggctgcggtggtggcgtgggggcacggctgcgcgcacgcaaaaacggcctgctataaaagcaggccgctacaagcccggagcccgggcttgtcagctactacttcagctcagcggaagacagacccagctcacgacgagccacgatcagctgctgaatctgctgagtaccctcgaagatgtccaggatcttggagtcgcgggaccacttctccagcagctcacgctcggagtagccgtaggcaccagccatctccaccgcgcgcagcgtcaggtcggtcgccatgcggccggccttcgccttggactcggaagcctccttggagtttggcatcttgttgtcagccatccaaccagccttcagagtcatcaggtaggcagcctcccaatcggactccaggcggatgtactcggacgcggcagcggactgtgcccatgctggagcgtcgtagttgatgtccacgccggcgtcggtcaggatttcgcgcagcttctccagggacgcacgagcaacacccacggccatagcggccaccatcgggcgggtgttgtcgaaggtagccatcacgccaccgaagcccttcttggtgtccacctcaggggagcccagcaggttctccttcgggatgcggacgttgtccaagatgaagtgagcagtatcggaggaacggatgcccagcttgtgctccaggcgaaccagctcgaagccaggggtatcgcgaggaaccacgaaggacttaatagctgcgcggccagcggacttgtccacggaagcccacaccacaacgtgggtgcagcggtcaccagcggtgacaaagatcttctcgccgttcaggacgtactcgtcgccatccaggcgagcggtcgcagccacggcagcggagtcggaaccgaactgaggctcggtgatagccatcgcggcccacaccttaccgaagctctccagctgctcatcggtcgccacagcagcaatcgcggcgttgcccagaccctggtaagggatggacagggtcagtcccacgtcaccccagcaggtctcgatgatgttcaggatggaggccatgttaccaccgttcttcacaccctcagtctgcttcttgccggcatccgcccggccaccggaagcacctgccatgcccttgccggcgtcggtcattccctcaaccagggatgccatggtgtccagctccacggggcgagcgtgctccgccaagtcgtacttgcgggagatcggacggaagatttcagcggctgcctggtgcgcctggttaacgcccgccttcagacgctttggaagttcgagattaatcatgagtgatattccttaactgataagcacttatctagcgggtttacagaacaacaacgccctcggcgataccaatggcgcgcaggtcgcggtaccagcgctccacagggtgctccttggtgaatccgtgtccacccagcagctgcacaccgtcgagaccgaagaccatgcccttgtccgacgcaaagcggcgcgccagcgcagcctcgcggtggtaggacaggccctggtccaggcgggacgcgccgcgctgcaggatcagacgcagaccgtccagctcgatgcgcaggttagcgaccatgaaggccacagcctggcggtgggagatcggctcaccgaacgcttcgcgctcgttgacgtacttcttggtgtactccagcacagcctcgccggtgccggcagccagtgcggcccagcccagtcgggagcggcggatgatctccgcgtagttctcgttgcgctcgtcgtcggacaggtccgtgccgcccagcaggttcgccgcaggaacgcggacgtccttcagcagcaggcggcccagggctgcgccgcgcagacccatggatgggtcagcctcaaccacaacgccctcggtgccggactccacgatggcgaaggtgttcacgccgtccaggtcgatggcgaccacgaacagctcagccttgccagcgttcggaaccatggtcttcacaccattgatgacgatgtcgttgccctcgcgcacagcggtggtctgcagcacgaatgggtcgaac

SEQ ID NO: 341 - DNA, 23303 bp, synthetic construct
  misc_feature 1..23303: note = Synthetic
  source 1..23303: mol_type = other DNA
tttcgcgggcgagctggatcagccccgcgtgccgagactggactccgagaagttgcgccgccttctgccgtggccggaggccactgagttcgattcgctggtgcccgaacggatgcaggtcccctctggatcacggattcgcctggagtacccagccgaccccgccagcgaggacgcccagattgtgctggccgtgaaattgcaggagtgcttcggacttgccgagacgccgcaggtgctgggcgtgcccgtgaccatgcacttgctgtcccccgccggccgtcccttggccgtgacgcaggacctgtccagcttttggaacggcgcgtattcgcaggttcgcgcggagatgcgggggcgttaccccaagcatccctggccggaaaacccttgggaggaacaggccacggcgcgcacgaagcgtcgttaagcgatggcgggcggtgcgggcggcggagttggtgcgacgacgggcgacaggcggcgggctgccccccaatccgcactctagcgctcgtttgcgactgtagagcagccgagagcaagcgctacagtcatcagccagcgctaaagtgcaataaattagccgcaaagcacagccaaaaaggcaaccgcacagcaagcaaccgtcctaatacaaccgacccacctccgcccagcgtttcctacgctgaatagccaggtcaatggcctccttctcgacctcaaaatacggctcgcacacctcatattctcccgagtacaccgaccacccccggtccatctgcgctcgaacatcctcagcagcccgccgaattatctcctccgccgagccccgcagcacctgactccacacaatccgcaccacaatcaggcccaagttcttcagccgcttctcccgcgcgagctccttactgatcgcgtcctgagtcgtctctcccgaagaggccccgtatttcacattcccatcgaactcaatcaccaaacccagctccggcacgaataggtcgaccctcccgatgaacccgtgcgcatcataaaacgctacttgctgcagtagcggggaacgcttgctctgcgggtgcgcgacccccgccgcaatagccgcctgcttgaccaacgattcccctatcgactccgcccccgtcgtcgcctccgtcagcagcttccgcgcccgcacattccccggcgagcgcgggtacgcgtcgaacgtcgcccacagctcctcctctgtgcagtgcccgcgcagcgccgcgtccgctaccaccgcaccattctccgaggtccgcgcccggcacaggtccactgctgtcttcgggatgtctgtgagccaccgcccttctcgctttacgacgtccacaggttccaaccgccccgtgacatggagcaggcggctgtgggatgttgggcctttcacggatgaaagtggccgacgccccgtacctgcgacggcgatgcgcgcgtgtcgaagcagcagcgggaaaccatgcagtgcggccgcggcttcaccggcgatgatgatgttgctgccgcgcctaatgagcgcctttacctggagggtgaagcgctcgctgagtggcgcggttagccattcgttgaccggataatacgcgccgcgagccagccaaattagggcgttgttgcgtttttccggctgctgtttttctgtatggttgcggatccattcatccctgtcgacacctgcccggccaaccatgtatctgctgcacggactctttccgtcgtgttgtgccccggcccggatgatgctgtcctcgtcgcgatgccagtcgatcacgtttgtcccctccccttatggacacagcgtcgagtaaggcacggtgctcggtgtgcgccgtgcatctgtgagctgtgcatgtgggcaccgtgcttggtgtgcgctgtgctcggcaagagtagctattttcccgcggctccggctgccgaagtacagctgctaagcgttgcctttggatagtttcgtcatctgtggataacctgccccgcccccagcgctccagccccccccagcagcgccctaccccgctcccctgccccaaaatccacactctagcgctcgtcggtgactgtagagcagccgagagcgagcgctacagtcaccgaccagcgctaaagtgcagtaatgcagctgcagcaatacaggtgcagcaatgcaccccccaaaaaaaacacgccgccctatacccgcaccctgcgcggattgcgccacaagtagatggcgtagcacaggaacgcgaagaacaacacgcatcccatcacgccctgcatgtttccgtagaaccactgccccacactattggcccgtccgaagtcgttgccgatgaacacctcgtacggcgcccaccagttggccacaaagaacagcaccccaaccgccacatgccaaatctcgcggtagaaaagcagcagtgggaagaacaccatgacaatcgaccagtgatgactgaccgcgtacggcccggcaaagctcacggccagcgccacgaaggccagcgccgagacgtcatactgctcacgctggaacacccatgccacaaacgccgcagcgatagcgccgaagaggaagaaaccatagatacccacctcgagcgcagtcccctctagcccggcgcgtgcaagtaggccactgaatgcctggttggcctcatacgtcggggcaccgccgcgattggaggagaagaattcctcggtccagaagtagattgactccctaaagcgcacggcaaagcccacggctaccgtcaccaggaaccagccgaagctcttggccacggcagcgaagtcgcgacgcatcaggaataccagcgcgtacgcggccggcgtgatcttgatgccggcagcgacacccacgccgaggccacgcagcttcttcggcagaaatcccagcacatcggccacgatcagcagcgcgaggaacacattgatctgcccgaagagcacatttgcccgcagcggatcgagcagcagcacgattccgagcagcccggtggcaatcagctctgggtagtcggcgcgcagccgctttgtcaccatccacagcattgcccacacggctgccatcgtcgcgatcgtccaaatgatctgcagcgtcgtcggccccgcccaggtcagaggataaaacagcaacgccgcaaagggcgggtagatgaagcggaatccggagcgcgtcgggaagtcctcggagtagaggtcctggccacggcggaatgcccagccggcgtcttggaagacttcgacgtccatcatgtagtaggtcgccgctcgatagatgaaggcaacgaccaccgccaccgagacgagtccgaatacggctgtgaggattcgtcgctgcagaaccgataggctcgagagtctgtccatgagcatgtctcgaatgtaccgcacccgacctcggccgaagtcttagagtgggagttatgtcagcccagaacatcctgccctccgatgtcgttgccgaacgctatctgaaggtccgctccgatatcgatgacgcttgccgacgcgccggccgccgccccgaggaagtccgcctgctgccggtgagcaagaccgtgcctgccgactctcttatcgacgactggcccgccctccatgccgcgggctgccgaactttgggggaaaaccgggtgcaggaggcggaggggaaagctgcagcgttccaggacgcgttcggggccagtactgatgcgcctgctacgacgggcaccacggctactgcgccgcgcatcgcgattatcggcccgctgcagaccaataaggccgggcacttggtgggctgtgccgacgaattccaggcgctcgaccgtccgaaggtggcggctgcgttgcagcgccggctggagacgctggagtcccctgccgagtcaactttggacgtattaatccaggtcaatgtgtctcgggagccgcagaagtcggggctggcgcctcagcacgcagcggagtttgtccggatgttcggcgagggtggcgagtatccgaacctgcggctgcgtggcttcatgaccatcgccgccgccggtgacccgcgcgtgcgcgatacgtttgcggagctgcgcgagctgcgcgacagcctgctgggtgacctgccggatggcgtcagcctggaggagctgtcgatgggcatgtccggcgattacctcgaggcaatcgcggagggagccacgacggtgcgcgtcggccgcgctattttcggggagcgctcctatccgcagaaatagcggtgcggggtacgctcgagggcatgagtgctgaaacttcaccctgttcccgtcgacgttttctgctcggtacggctgcgactgcagcgggtgcgctgattgcggcatgcgcgccgaagtctgcggtcgagaaggttgccgcgaaggatattcccgtgggcgggggtgttgtggttggtggctacgtggtgacacagccggagaagggcaagttcgccgctttttccaacgtgtgcccgcatcagaatggccgcatcaccgaggttcgtgacggtgtcatgatatgcccgaaccacggctccgagttcgacatcgcgactggcaaggttatcgctggcccgtcgcgccagcccgcgggcgaggcgccgctgtcggccaacggaacggagctgattgtcgggcagaagtagcgctatcgcgccttcaaacccgctacagcacaagcgcctgcgaccaacgacagtgccaccagccacggcacgagcccgccccagccgagtccgccgaaaaccatcccggagacccaccccaccacggacgaacccgcgtagtagctaaacaggtacatcgacgacgcctcggctcggtcacgctgcgccaccagccccacgccggaggacgacagtgaatgcgccacaaagaacgacgcagtaaacaccaacacacccacaattacggccggcagccacggcaccgcgacgagccccaagcccgcacaggcaccaaccgttgcgatggcaatcagcctgcgccgactcaccgttttcgcccacacacccgcgcgtgccgacgaccacgtccccgacaaataaagtacaaagacaaacccggcgagcgcgggtgacagaccgaagcggtcgccgagcctgaagcccaggtagttgtagagggagacgaacgctcccatgaataggaatgccagggcgcacagggcgaggatgcgcgggtcggcaaggtggcggcggattgcctgccattcgccggagaaggacagcgccttggggtggaacctgcgctggatgggcaggaaataccaggtcagaatggcgaacacgaaggccactgccgcggagaccgcgaccgccattcgccagccggcgaactccagcacaatcgaggggataatacgcccgagcagtccgccgacggtggtgccggagatatagagccccatcacgcggctgacgtggtcggcatggacttcttcgctgacgtacgccatcgcaacggcggggacaccggcaatgacgatgccttgcagcaatcgcaacgcaatcatggaaccgattccaggcgacgcggcaacgacgaggccaagcagtgtcgccacgaaggcgctgattacaatcacgcgcctgcggccgaagcgttcggacaggatggacactgggatgaccgcgcaggccaggccaccggttgtggccgacacggtcagggcggctgtcgcggggtcgacggagaggtcgtcggaaagcgtgggcagcagcgcctgcgtcgcgtagagagcctggaaggacgccaggcccgcgaagagcacggcgacgagcgcgcggcggaatccggggtcgcccggggtaaggcccgcggggagagactgattttcctggcttcctgctgcgctactcacaccttccagcctaacgcgaccggttatcgcctctgcgcggggagtctacgtacccagattgtccagagcctgggcgaggtcggcaatgagatcgtcgatgtcctcaataccaacggagaggcgcacaaggtcacgcgggatttccagagtggttccggtaaccgattgatgggtcattcctgcggggacctcaatcagggattcaacgccgccgagggattcggcaagctcgaactcgactgttttgaggcagagctgctcggccgcctcttgtccgctgagaccgtggggaagattggcgctggtggcgtcggcaagccgggcgctgaccattccgccgaagccgcacatctggcgcttggcgacgccgtggttgcggtgggagccaagacccgggtagtagacttcggcgatttcggggcgggaggcgaggaacttggcgacagcggcggcgttgtcgcagtggcgctccatgcgcacggccagggtcttgatgccgcgggttgtcaggtaggcgtcgaagacgctgggaatggcgccggtgccgccgcgcataaagtcgatttcctcgtcgaggtcaggggcattagtcaccagcgccccgccgacgacgtcggagtgcccgccgaggtacttggtggtcgaatgcaaaacgacgtctgcgccaagctcgagcgggcgctgcaggtacggggaggcgaaagtgttgtcaacgaccaatttcgcctcacccttggccgcggcgatcgcttcaatatcggcgatggtcagcaacgggttcgtgggcgtctccacccagatcacggtggtattaggctggatcgcagcggcgacggcctcggcgtcgccaatgtcgacgacggtgtgatcgatgccccaggctccgaatacgctatcgattaggcggtgggtgccgccgtagacgtcgttgggcatgacgatatgggagccgggtttgagcaggatacgcagaattgcgtcggtggcggccatgccggaggagaaggcccgacagtagctagcaccctcaaggtctgcgatggcgcgctcaagcccggcgatggtcgggttgccacagcgcgtgtattcgaagccgccgcggagctggttaattccgtcctggacgaaggtcgagctggcgtaaatcggcatgttgatggatccatggagggaatccggggtgtagccggcgcggactgcggcggtggagaagcgtcgcgagttcttcgtcaggtcttttttcgtcatggtgtgattatgcacatagaccaagcggtctacaaatgaaccgtaaaaattacctgcatcaatgcttaatgccaataaacttatggttttgtcagcgaacgagtgagcagttggttaccctccttatgcatgagcacctcacatgacagtcgcccctacgacatcgtgatctatggcgcgaccggcttcgtcggtcgcctcatagttgactacctggcccagcacgccccggaaggcacgaaggtcgcacttgcgggccgcagccctgcgcgactgaccaaggttgcgcgcgaggccgacgtagaggattggccacgtattgtcgccaacgccgatgacgaagccgcgctggccaagattgccgccgacaccaaggtggttctgacagttgtcggcccctattggaagtacggcaagacgctggtcgccgagtgcgcgaaggccggcacgcactacgtcgatctgaccggcgaagttcttttcgcccacgactccatcgcacaaaaccacgaaatcgcacagtccaccggcgcgaaaatcgtccactcctgcggcttcgactcaatcccctcggacatcaccgtccgtgcgctttacgacgccgcccacaccagccttggtgagacgaccctgctggtcaagcacgtcaagggtggcgcgtcgggaggcaccatcgactcggtgcgcacccagcttgccgcggcgaaggccgacccgaagttgcgccgcatcctggctaacccatacgcgcttgccgcccccggccctgaccagggtgcttttggcaaggacctgcgcccggcgcgtttccgcggtgcatggcgtgcaccgtttttcatgggcccgtacaacacccgtgttgtgcagcgctcggcgcatctgaccggatacggcgattgcttccgctaccgcgagctgatgaacgtcggccgcggagtcaaggggctgctgcgcgcgttcgctttcaagttcggcatgctggcaggcctagcggcactgtccttcccgccgaccgcgaagctgctggatgcgaagctgccgaagcccggtgagggcccctccgaggccgaacgtgccgagggtcgcttcactatcgagggctacaccaccgatacctccggtgcgcgctggcaatcgctagtgtccctggagcaggaccccggctacgagggcaccgccatgatgatctccaactgcgccttggctctggcccacgatgagcttcccgatgtctccggcgtcctcacgccgacggttgccctcggcgatgctctgcttcggcgtttgcgcgaaaacggcatgaccattcaggcggatcacgcatgagtttccgcacgacgctgacgcatgggccgaagttaccgcaggttatcggcaattcacgcggcactgatcccgacagcaggcctcgcgcgctggtgaccggggcctcatcgggaattggatgggcctgcgcggaggctctgatgaaggccggtttcgaggtgataggcacctcgcgccgaggcgcggaggcgccgcacccggatggcgtggagatgctggccctggacatggagagccaggacgacattgctgcaatcgctgcgcgtggcccgtttgatgtcgtggttgccaatgccggcgagagccagtcgggcccctttgaggagttgcctcgcgatgccctcgagcgactattccaggtcaatgtcttagggcaggtcgagttgctgcagaagctgctgcccgacatgcgtgccgcagggcgcggccgggtcgtgctggtcggttcgatgttgggcggtttgccgctgtcgtatcgctcttcttatgtggcgacgaaggccgcaatccgagggttcgggatggccctgcgcggcgaggttgcacagttcggcattggggtcacggtggtggagccgggctcgattaataccggcatttcgcagcgccgcacgaagtacggcgaagaagaatccgtctacgccgacgatgtgaagcggatgctgacacgtcttgacgcgaatgaggccaagggcattccggcctcccagattgcggacgttgtcatgcgagaggttgccgcagaaaggccggtggcgttggtggccgaggggtcgtcggcacgcgttgttgtgtccttggtgcgggcgattccgacgcaggcgatgctgacgctaatgcggcgggtgcacggactgcgctaatccgcgattgcgcgcatttcgacaccttgcgcgcaggccttcgctgcctcatgggataggtcgatggcctggttttcgtcctcgacctcaatgatccagaaccccgaggggaacgtctcagcgtcgtagtagggcgccgcgtcctgagtgccgtccggcatgatagtcacggcctgctccggcgggactaggccgccgcccatcacccaatgcccgttgtcctgcagcttctggttgaacttgccgacgcgctcaaatgcagcgcgcatctcttcgtcagagtcgtaggcattgatgtccttgcggccgtggacggtgagaaagtactgcatgaggggctcctgcgcggtcaagcttttccggtagaggctgattctggaggtttcgtttcacaaagtttagcagtgtttgggtgggagtggggatgagcttagtcacggatacaacatccacctgtaaagtcactagccaaaagaatcaaacacctgttccctagctcaaacactttgcaatccaaatgttttggtactcttttgtgagtattatttacacaggtgaaaggtcgcttccttaacaagcgtctaccttcctaggctttgcgtttgggctttgtgctatcatttcttattgagaaccaatcctcagtaaggaccgcctcgttagcggttccgattgctccttagggcccttcggggccctaatcttttggagcaaaaatgacaacgcgttacgtagttggaatcgatgtcggactcttctcggtgggcttttccgctatcgaggtcgatgaaaagggaatgccggttcggctcctcaactcaatgtcgctcatccacgactctggcttagacccaaatagccaaaaagaagcaaagacccgcaaagctgtttcaggagttgcgcgacgtacccgaaggctgtacgcggcgcgaaggaagcgcctagccgcgttggataccttccttacacaacatgatttcccattgattgacctggaaaaggaagctgacaaaatcgcgtggtcggctcgagctactttggcaactgaaaaggtcgaggaccacgagcagatgaagaagctgctatccattgctgtccgacacattgctcgccaccgtggatggcggaacccttacatccctgcggagcgtttgtgtactcaacgcaaagcctcggataagttcactatcctcgagcaaaaggctagagaggctgcccggaagccaatcccatcgacgccgaccctggcccaattggtgggtgctcttccgcatggcgcaacacaattgcgcggcgagaacggattcttatcagagactctcaaccagcaggacttcgccaacgaattactcaagatcgcatccgtgcaggacctcgaaccgcagtttgtccacgaactcctgctcaaggtcttctacgcaaaaagccccaaaggttccgcggaaaaattcgttggcaaggacgagctcgatccgtcacaaccacgagcatggcgcgcaacactcgccttcaacgagtatcgaatcatcagtcttctcgctaacgtgcgaattgccgacccttcgtcaccgacttttgctcagcgccgactaacggttaatgaacggcagaaggcattcaactttcttaacaactggacgcaaaaaactagcccgacgtggaccgacattgcagaattgtttggcattgatcggggattgctaaagggcactgccagcgctaacgacgatggcgagagaatgtctgcgacgccgccaatcaaccaaacacatcagatcatgtggaactgccaggtgaagtcattacgcgagttctggaggaagggaagtactgcaatgcgtagcgcccttatctcggaactctcgaacgttgaggctcccgaggaagggtctcctgaatcgattgctgcagctacagccattcggtcgctaccacccgaggaaatggaaaaactggaaacagtcaagcttcctcatggacgagccgcctactcagttaaaactctggacaagatcgccaaatatatcctcaacaacgaggccgacctccacgaagcccggcaagaaatatttggtgtagatgcccactggaagccagccgctgcaccaattgcggaacctactggaaaccctgcagtagataggacactgtctgccatcaaccgctggatcctgctcgcagaaaagcgatggggcacgcccctgtcagtgaatatcgagacggcccgcgatggtttcaagagtgcatctgtagctcgagaaattgagcggggaaacagcaaacgggcaacgcggaaccttgaaaccagacaggcaattgcagaaaaactgggaatcgaagggcgcgtccgaagcagtgatatgcttcgctaccaggcaatccagcgacagaacggacagtgcgcctactgtggcaccacgattactttcaagtccgcagaaatggaccacatcgtccctcgtgcaggagcaggttctaccaatcgacgcaataatctgctcgccgcgtgccatagatgcaatttaagcaaaggcaagcttccttttgccgtctgggctaacagcgaaaagtctggtcctagtgtgtctctcgaaggggcaatcgatcgtgtcaatcaatggccgaccgatagcggcctatctacgcgggaaatgagggattttcagcaatcggtcatcaagaacttgaagcgaacttccagcgacgacaagattgatgcacgcagtatcgaatccgtcgcgtggatggccatcgagctgcggcaccgcatgattagtcattttgcgaagcagggcaggtcaactccaaagattcgcgtgttcagcggaactgtgacagcatcagctcgaaaagctgctggaatcgaaaagcaaattacgatgcttgggggcggtcatggcaagaatcgcctagaccgtcgccaccatgcgattgacgccgcagtcgttgcactgatgaattacactacggcgcagacaattctcgaacgagagaaccttcgacgagcagaaaacatcattcagaaacccgataccgacttcggtacatggaaagaatacaaaggccgaaatcaacaggataggtaccttttcgagcagtggaatttgcgtatgaaatccgcagttccaatgcttcaagaggccttagaccagcatcgaatcgcggtcacacaaaacctgagactacgattgggcaacggacaagcccatgaagcggggattgggaagctggactctgcgaaagtcggtgatgctcttccggtcgcgcttatcgaccgagcagcttcgccagcactatggtgcgctttgacacggctccccgacttcgactggaaggacggactaccagagaatccgacgcgaagcatcgttgtcaacggcactcatctgaattcggaagacaaaattgagtttttcggtgtcaaggctggtgccatcgcggtgcgtggaggatatgcagagttgggagcatccttccaccatgcacgcctataccgtgttccagtcgggaagcgtcatgcttattgcatgatgcgcgtgtacaccgtggatttggttcggcatcagcacgaggatttgtttaccgttgatcttcctccgcaaaccatttcagttcgccaatgcgaagcaaaactacgcaaggcgctaagagagggaacagcagagtacatcacctggtttgtggttggcgacgagctacacttcgatgcctcgaaggtagctactggccaggcggaaacattccttgcagagttcggagacattcgttcatggaccgttaaggggttctactctgatgcacgcctacggttgaagccagcagttctatctgcagaaggcattacggatgaaatggatacagactgtaaaaaagtcatcgacagtcctggctggctgcccgccgttaacaaaatatttggccttggaggggtaacaatcgttcggcgagatgcccatggtcgacctcgactatcagctcgcggtaacctgccagtttccatccagattgattccttatgagttggcgggtgctcgacttcacgtctttcaacggtcgtatcagctacgagcgcggacgtataaaagctacataccgtgacggatccgagaagaaggtcagccttgcggagattgcagtcctagtcatcgcagataaaactgatgtttcctcagggctcctaagtatgctcggccaaaatggaatcccagtggttgtcactgactggcgtggcgttccagttagtgtcgcttcaggttggtccacacatacgcgtgtgggggcgcgccaaatcgcccagtcaaaaatgacccttccacgaagaaaagcagcgtgggcgaatcttgtccgagcaaaagttagaggacaagccaacacaattcgtgcgctcggacacgctcaagaagctaaagacctggaagcgctcacttcaacagtacgatctggggacccctctaatgtcgaagcacaggcagcaagactatattggtcggcctacttctctgaaggagaaagcagagaccaagaggggagcgatctcttaaatgccgcgctaaattacggatacacaatccttcgtgggcactgcatccgagcggtcaccgaagcagggctttggcctgccttgggggtttttcaccattcgcggtcgaatggtttcaatttggttgatgatctcctcgagccatttcgccccgccattgattactacgtagcgcagcttcctggcaattccgcaatggaggaccccgaaacgcggcggaagctcgtttctgcttctagctctcagtttcacgctgacggccgtaccgtatcaacaatgctcggttcacttgcacaacagttcggcttgtacgcagaaggtgatattcaacagttcagagtgcctacgtggtgcggtccctttaaggctgaagaataatgcccggagataagcggatgtggtgcatagttatgttcgatctgccagtaaagactgagacagaaagaaaggaagcgaccaagtttcgcaactatctattggatagcggttttagccgcgtccaatacagcgtctatgtccagtaccttcctctcggggcacaactagcaaaaattgcaaaagacattaaggccaagcttccccatgaaggagaagttcgaatcgtcccactcaccgacaaacagtggtcaaatgcatttcgtttttctaacgcttcaccaaagaaggttgaaaaaacgcccgaacagctcgagattttttaaataaaaatcccctgataaacctgctcagaaagcctttttacggccctttgaagtctatcaggggaaatgagaaccaatccccagcctaggacgttgaggctaaaagcccgtgcgaagtctatcaggggaaatgagaaccaatccccagcgaacgctgctaggtcaactgccgtctccgaagtctatcaggggaaatgagaaccaatccccagccacttggcaaagcaacaaagattgagaagaagtctatcaggggaaatgagaaccaatccccagcgtaacgcgacaatcctgctcgccgtcgcgaagtctatcaggggaaatgagaaccaatccccagcgacgaggacatctttagctacccctcgcgaagtctatcaggggaaatgagaaccaatccccagccccaaccggtgggccatcgaccagccacgaagtctatcaggggaaatgagaaccaatccccagcgactctcgggtgggagatgctgcagtgggaagtctatcaggggaaatgagaaccaatccccagcgtgtgctggtcaacggtgcgaaagccgggaagtctatcaggggaaatgagaaccaatccccagccttctgttgcttccatctttgttttttcgaagtctatcaggggaaatgagaaccaatccccagcgcggtaggtcgaagggcgtggctgatgcgaagtctatcaggggaaatgagaaccaatccccagccgttgggtaggcggggttgccagcggatgaagtctatcaggggaaatgagaaccaatccccagcctttccgcgtggtagacggcattgaacggaagtctatcaggggaaatgagaaccaatccccagcgggtgggttgaggtttgttggtgtcggcgaagtctatcaggggatatcagtgcaatcccgcaattctattctcccctcccagcgattctctgggatatttctaggctccgcgactctcaatcacttcacccaatttaggcacaatatttcgaacttctgcgctttctcgatgcctggctagtacccaaactctcgcacttggtcgcgtcagcaaactgagatatcggccttggtcgaccaagaaaaatagacttcaggccaagttaaaccaggtgagtttccctccttctgacttcgcactgacgcctcttacgtccccttcacattcagcacctggcgcagttggtgtaccacttccacgtcactgacctcatcgaccccacgcggcccagcccagctccttcagatactgcgtgaactcggaagtcccctgcgggaggtaggcgtaatcgcagcccggacatgcttctgcgcaatcttgttccccactcctcgtaaccctgagcacagtaagcaccaaacccggcacgtatctcgccgaaacatctcgcggaggcctgctacacaacagcaccccctgccttaagtgcgacgaattagaaaaagtcaacccccagaattgaacataacaattccgggggtattggcaagtaattgtctagtctttcttcacgcctgtagcgccacgcatttttcgccacacccaatccgcaacagcgaacaacaccagcgtgacgccaaatagcggcgcaatcacagagtaagcaaccagcgccacaatgatggccaccgcaacagaggggcggatgtcgcgccacctcgtcggcaagggcagccgacccggacgccgaccgcggccacggccgaaccacatggcataaccgcgaatgataattgcgatgagtccgatgcctaccgctaccaggatcagctgattgacccaaccgaacagaatccccatgtgggcattaatcgtccactcggtcaacttcgcagccagcggccagtcagcaaaggccacgcgatcgacaatgttgccattcgaaccgtcaactgcgacggtctccattcctagccgccactcctggcgcgcttccttagcgacccacgcatcaccgtcggcaggcggggtcagctcaatcttgccaacaagaccagagtccctggccacgcggttcaccgtatcggcctggttccacacctcaacaggagcggcgcttgcagaagcaccatgcccggcatgcgcatccgtcgccgccgcacccggagtcgcagcagccgtaatcgcggtgttcggcttcggggcaaaccagtccattgcctcgcggacctgcttgattcccgatcccgcgacccaggaccacgtcagcccagtcgcggtcaggaacagcaaaccaatactcagccacacaccgacacgcgcatgacgactcatatggtgcgcgcgcttactcgttcccttgttacgtccacgacggctgcggtcccaccacagccacaggccggccagagtcagggctcccatccaggccgcggcggtctcggagtagagacgcccaatgttgtttccgctccacaggcgcttgtgcccttcggaaatccaagttcgcactggcaatgccgcggcagaaccgtactgaatagtatcgcccttgattgagaggtcaccaggatcgacaaatacgactcggcggtaggacttggaaagcaaggacgaatccgcgaagagcacgtgagtggtacgaccgggttcatcgtaggtctggactgcatcgactggaaggtctggatgcagcttgcgggcggcctcaacctgctgttcaagtgaacgaggtggaagcgaagaggtcgcggtcatctgctcggagtagacgaccttctcaatcgacggtgacaacgcgtatccgatgcccgttaccgccgcaatgacaagcaggggcgcgacaagaataccggcaatcgtatgcatacgatgcaggaatcctcgggggccaccattgcggtcattacggttttctgcgacgggttttgcggctgaatcttcagcggcagttcctgtggctattgaagtcatgcactattagtcggacacccagcaagagttgttcccgttgaatttaattttttatcttcattggggtagccatctagataaaatccccgctaagaaccgggaaatcgtcgacaagcgagcgtagtctcggccacatgacatacccagatatctaccgggcagacgacaaccgctacaacaccatgccgtatcaccggtccggcagcaccggcctgaagcttccggcaattacgctggggctttggcacaatttcggcgacgaccgcccgttggacacccagcgtgagatcctgcgcgcggccttcgaccgcggggtcacccacttcgacctcgccaataactacggcccgccacagggcagcgccgaagaaaacttcggccgaatcatggcgaaggacttcgcaccctaccgcgacgagatgattatttcctccaaagccggctggtacatgcaggacggcccctacggtttcggcggctctcgaaaataccttgtggccagctgcgatgcttcgctccaccgcatgggcctcgattatgtggacatcttttaccaccaccgcccggatccggacacccccatcgaggagaccgtcgcagcactcgactttttggtgcgctcgggccgcgcgctctacgtcggtgtgagctcgtattcgcccgagctgacccgccgtgcccaggctatcgcccgcgagctgggcaccccgctgaccattcaccagccaagctactccatgttcaaccgctggattgaggatgaacttctcgacacctgcgcaaacgaaggcatgggtatcatcgccttctccgcgctggcacaggggctgctcaccgaccgctaccttgatggagtccccgcagactctcgcctcggcgcgcacaagatgagttccgacttcctgggcgaggacactcttgccgcaatccgcgccctcaatgagatcgctttacgacgcggtcagtcgctcgcgcaaatggccatatcttgggtcctgcgtcgcccagagatcacctctgcactgattggagcgtcctcggtcaagcagttggaggataatctcggtgcgctggaggccgcgccatttagcgatgaggagctggccgagattgacaagtgggccatcgaccgcggcatcaatcagtggaagggggcgacggagtcggtttaggcaacacagcaaaggcccttatctcggtagaactacccgatagggttcacaccaaactggtccattcccagcttcaacgccataaccacaaccaccgccagaatcacagcacgcacaaagcccgaccccttcgtcaacaccattcgggcaccgatctgcgcgccgatcacgttcgcagcagctaataccaacccgagcagccacagcacctccccttgcgctgcaaaggtcacgagtgctccgaggttggtaaagacgttcagcacctttgcccatgccgcgctatccctgaaattcatacccaggagcgtcgtaaagcaaagaatcaaaaacatgccggtgccagggccaaaagcaccgtcatagaagccaatcaccgcaatcagcgcagcaattgcggcccataccgcgagagtcttccgccgaggaattgcgacctgtccaaactcaggctttagggcaacgaaaattcccaccgcaaccagcgcaaatataatgattggccgcataacagccttatcgagcatcgaggccaggagcgcccctccaatggagcccgccaaagcaagcggcgcaaacctcagcgccccgcgagccgacggcaccttgcgggcaagaaccacggccgcgctggacgttccgaaaactcccgctaccttattcaccccgagggcctgtgcgttcgaaaaagccgggttcatgatcatgattagtgggacgagaatcagaccaccgccgcccactacagcgtcaacccaaccggctgccaaggaaccgataatcatcaccacaacactggttatcgacgcacctgtaagcatattgccattcttagcaccccaccccaacgcccccttcacctttcggagattttccctaaacggcctatttacaaactatacgaacgcatgtacgatagcaagtgagttcgaaacaattgtggggatttagcgaactgaaatctatggccacaacctgcggccagaggcattagccgaggaatacagggggattctaatgcagcctcaaagcaattctgacgacaacaaagagcaaccattcaccgaagcatattgggctcaacaaaccccgtccgaccagctctcaaaacttgcccgggaggcaaaccgcgctcagctcgctttgataagggcctgctgcccaaatggtgacgccgacgtcgagcaccacgcggcgaagattagtgtccgactgggcattactcgcggagaggccctgcgtatctgcgatataggtcttatgttgcgacggatgccacgactggcgcagcgcgctgaatcaacagattcactaactccgcgacaactgggcataatcgctcacgggacctgcactatcgcggacgagcagattcacgctgtcgagactgaagttctggaattggtcaccccgtcaaggccccgccaagccatgattggccccaggtcactgaccaacaaaattggggacatcgtcgccgagtatgacgattgagcccgcggagatggcacgattccaaccatcatcaagggtgaatccgtacagctaatgaccttaaacgggggcaaatattcgcaaattattgcgactctgcgttctgaccgggcgcttgagattatgtccgctataggcagtgccagccgcgcaagagaaggcatgactcaagcacaggcactcgtcgacttagtcagcggaaacacaagcgcagatgtcacccttaacatttatcgtgagccaggctcggacaaagcatggctagatggagccggctggctctcagcactcgctacccagcagtggatgacaaaggtaacccacttatgcctatccgccgacagcgccactgactcttacaggcccactgaagcacaaatagcccgcgtccgaggtcgagatggcacctgccgattccccggctgcgaagtgctggctcaccactgcgacgtggatcatatccagcctttcaacctagagaacccgcaagacggcggtccgaccgacacccaaaatctccactgtttgtgcagaaagcaccacaatttgaagacgcatcacctatgggaaatcacttcccttagggatgccacggaggtgtggtcatcagtagacggcacagtcgcaacgactgtgccgtctgggccaatggcgggattcgggtgccaaacctttgaccaacgcgcaacgcgcagaaccaaggcgagacaacagcactacatagattggctgatgtcgttttcagtgtccgacaccgagattatcgaaagcaccgaagccgatgacagcgatagccccgaatcggaggccgaataaacccgcctagattctgctagcccagcgggccaccgcagttcggccaagcacctgggccctgcgaagcaagcacgcgctcggcaacgtcaatctgctgctccttcgtggcctggtcagcggtcggcgcgtactctccaccgccgtggccgttccaggtctcagcggagaactgcagaccgccgtagtagccgttaccggtgttcgtctgccaattgccaccagactcgcacgcagcgacctggtcccacgcttcgactggcgcagcggatgcgaccgctgcggggccggcaacgaggccagctgctacgacgaacgcggatgcaatggacttcttagacgaaaaacgcataaaaagagaacactcctatgggttgacttcttctcttggcggcccaacctacgcgagatgccccctggtctgtcaacccagcgctccagaaaccaacccgtatcctggaagcatgtcactggcagatgtggtccggaaagccgaatcgaaaatcaacgcgttcaacactcatcggtcaaaaaagtcgggctgggtaccgtcggtcatcggctacaccggttacggcaacgaggaacaagtgcgcgttttcgccagggtccttatgcgagctccccaccgcgagcctcgcacggccgcggccagggggtttaggcagtttttcacgatccaggtaggcggtttccccgttcgtgtcaccgccggcgataagactatcgaggcagtcactgatgacaacggatatctggaggtcctcgttgaaggtcacggactcacgcccggctggcatgaagtcactatcgccccagccgatagccccacggaagaacaatcggcctccgccgaagtcctcatcatcgacccatcggcaaaggtaggaattgtttccgatattgacgacaccgtcatagtcacgatgctcccgcgtgcgctcattgccgcgtacaactcgtggtttgtacgcacagatagccgcaaagcggtgcccggattcagcgatttctacgccgaactccgccgccgccatactccaaaccgccatacgctcacccaaacccccgtcttttacctttccaccggcgcatggaacacgttcggtacattgcgcaggttcctgcaagcgaatgctctacccaagggtccgctgctcctcactgactggggcccgaccccgacggggctcttccgctctggccaggagcataagcgtgttcagttgagaaatcttttcatcgattttcccgacatcaggtgggtccttgtcggcgacgacgggcagcacgacccactaatttacggccagattgcagctgaacacccggaccgcgtcgcaggcatcgcgatccgcaacctaacccctagcgaacacattctttcccacggcacaacgttcccgatcgaccgcctggagcgcacgcacgtcccactcatcgagggcgcggacggttacgaactactgaagcaaatcgacaaattgccgtgatttacctacgccacgcccgaatccacgacgatgccgacatcccggagcacatccgtcggctcgagctgccgttcccattggaattcaccaccgcaattacagtcctgaccggcgagaacgggcgaggaaaatccaccattctggaggccatcgcctcggctatgggcgtggacaccgacggtggatctcgcttcaaaacacaacgcaaccgctccgcactccccctcgcgctaaccaaacgcaaccctccggataccttcttcttccgaggggatgcgcacctgaacctggcccggtactactccgaaatcggcgaccgcaaactgttcgaccttgtcgacatgagccacggacagtcgataatgtcactggtcactcgccggttcagcccagaatcactcatcttcctcgacgaacctgaggcgggcctgtcggtcctccgccaactcgagctcctcggcagacttggctccctcgccgagcgcggcgcgcaaatcatcatcgccacccactcccccattcttctggcgctccccgaggcaaccattctttcgcttgacgacgccaccatcaccggcttcgaagacactaacgcggtcagcgccactcgtgaattcctcaaagacccgactggaatcgcagattacatggttgagcgcttcggtgaatgttccacgtgaaacattcgatataccccagcgcaacacagttatataggccaccctgcagcgttacagaaacgtccccccgattctcgatatctatcttttcgcattgttatcacttaaggaataatcgtatctatgtcgaaaaaaactggtccgaaaccaaccttcactgcgaccgatgctgtgcgtgccgcaacggaaatcggactgg

SEQ ID NO: 342 - DNA, 23300 bp, synthetic construct
  source 1..23300: mol_type = other DNA
  misc_feature 1..23300: note = Synthetic
aaaatagccaagtcaataacgccctgctcgacctcgaactccggcgcacactccacatattcgcccgaatacacggcaaatcccgcccgaatttgctcctcaatctcctcggccgcccgacgaatgatcgccaccgcggcccctccgaacaggtcattccacacaatccgcacaacagtcagccgcaaattcttgagccgcttctcgcgcgccagctcccggttgatagtttcctgctgacccgcaccgccatccgcatacttaatatttccatcgaactcgatcacgagccccagggtcggaatgaaaatatcgaccctcccaataaacccgcgcgcatcgtgaaacgcgacttgctgcagcagcggcgcatgcctgcttcccggacgagccacacccgcctcaacgaccgcccgcttcgtcagcgactccccaatcgactccgacagcgacgaggcctcctcaagcagttcgcgcgcccgcgcattcccgggcgaccggggatacgcatccagcgtcgcccacaattcatcccccgtgcaatgcccgcgcagggccgcgtccgccaccgtcgccctgttctctgaagacttggatctgcacaggtcaatgaccgttttgggcacatccgtcactctccttccggcccgctttacgacgtccacaggttctatccggcccgtcacatgcagtaggcggctgtgggaggtggcgcccggaaccgaggtgagccggcgtcgtcctgtacccgacagcccgatgcgtgcattgcggagcagaaggggcaatccgtggagcgccgcggccgcctcacccgtgacaatgacgttgcttcctcgtgggacgagcgccttgacctggagggcgaagcgctcgctcctgggggcacggagccattcgttggccggaagatatgcacctcgagcgagccatacgagccccggggagctacctgtgttggcgtttcctgcgttggcgcttcctgtcttggcgcttgtcgggtgggcgctcgccgggcgggcgtttgccgaacggtcgaggcccgcgcgattgcgaatccactcgtcactgtcgactccagcgcggccgaccatgtatctgctgcagggaccgtagcccgcgggctgtttacctgcgcggataatgttgtcttcgtcgcgtcgccagttagtcaccgatcccccgtttcgtcattccccatgtggccgatcccccactcaccgattccccgtgtggctggcactccccttcaatgccgcccagatttcgagtgcgcccttacctgcaaaaatagcgcttcgctgggattcggggcaccgaaaaatcccctccgcgccggctgcctggggataatttcgcggttgtggataggttgcggagtccggtcggtggctaatcagtgcggttaccaggcagcgcggcgccccactttagcgcgcgttcatttcgccctcgggcactttagcgctcgttcgtgactttagagcagccgataccgtgggctacagtcaccagccagcgctacagtgccgggcccccgaaccagccagcgctacagtgcccaaaaagcccccaaaaccccagccacaccccgcccacatgcaaaaaccgtgacaggagaacctgccacggtgaaaagtggggccgctaccgtcgtaaagcgagccctaaagcgaaaagcacagcccaaaaacgcagcgcaaaaaccctaagcccgcacgcggcgcgggttacgccacaggtagatggcgtagccgaggatcgcgaagaacgccacgaaacccatcacaccctgcatgtttccgtagaaccactggcccacactgttggcgcggccgaagtcgttgccaacgaagacctcgtaaggtgcccaccactgcgcgatgaagaacagtacgccgaccgccacgtgccagatctcgcggtagaacagcagaagcgggaagaacaccatcacgatcgaccagtggtggctgaccgcgtacggcccggcgaaactcacggccagcgcaacaaagccgagcgcggtgacctcgtgaccctcgcgctggaaaacccacgccacgaacgccgcggcaaccgcgccgaagaggaagaatccgtacgtgcccacctcaagggcggtgccctccagcccggcgcgcgcgagcaggccgctgaatgcctggttggcctcgtaggtgggggcgccaccgcggttggaggcgaagaactcgtcggtccagaagtagattgactcctggaatcgcaccgcaaagccaatggcgacggtcaccaggaaccagccgaagctcttggccacggcggcgaagtcgcgcctcatgaggaacaccagtgcgtacgccgccggcgtgatcttgatgccggccgccacgccaacgccgaggccacgcagcttcttcggcaagaagcccagcacatccgcgataatcagcagcgccaggaacacgttaatctgcccgaaaaggatgttcgcccgcagcgggtcgagcagcagcacaatgccgagcagccccgtggccagcagcttcgggtattcggcgcgcagccgcgtcgacaccatccacagcatcgcccacacggccaccatcgtggcgatcgtccaaataatctgcagcgtcgtcggcccggcccacgtcagcgggtagaacagcagcgccgcgaacggcgggtagatgaagcggaagccggagcgcgtcgggaagttctcggagtagaggtcctgcccgcgccggaatgcccagcccgcgtcctggaagacttcgacgtccatcatgtagtaggtcgccgcccggtaaataaatgcgatgaccaccgtcgccgacacaagtccgaaaaccgcggtgaggattcgtcgctgcagaaccgataggctcgagagtctgtccatgagcatggtttgacagtaccgcacccgacctcggccaaagtcttagagtgggagtatgtcagcctcgaatatcctcccctccgacgttgttgccgagcgctacctgaaggtccgctccgacatcgatgacgcctgccgacgcgtcggccgcctcccctccgacgtgcgcctgctgccggtcagcaagactgtgcccgccgagtcgcttatcgacgattggcccgccctttttgcggcgggctgcgtcaccctgggcgagaaccgggtgcaggaggcagaggggaaagctgcggcgttccgggatgcgttcggggctgggggtgcgaccccggcgccgcggatcgccatcatcggcccgctgcagaccaacaaggccggtcacctggtggcctgcgccgacgagttccaggcactggaccgccccaaggtcgcggctgcgttgcagaggcggctggaggcgttaggcggcgaggccgggtccggggcgtcggcaagcggaggcggcgcggggagcacgggcaaggttttggacgtgttgatccaggtcaacgtgtcgcgggagccgcaaaagtcggggctggcgccgcagcacgcggcggagtttgtgcggatgttcggcgagggcgggcagtacccgaatctgcggctgcgcggcttcatgaccatcgctgcggccggcgacccgcgcgtgcgcgatacgttcgctgagctgcggcaactgcgcgacagcctgctgggcgacctgccggacggggtcagcctggacgaactgtcgatgggcatgtccggcgactacctggaggcgatcgccgagggtgccacgacggtgcgtgtcgggcgcgcgattttcggcgagcgggcttacccggctaagtagtccggccacgtagtccggctaagtaggggcgccgggggtacgctcgaggcatgagtgctgaaatttccccctgttcacggcgacgttttctgctcggcacggccgcgaccgcggcgggtgcgctgattgcggcgtgtgccccgaaggcgactgtcgagaagattgaggcgaaggacattccggttggcggtggcgtcgttgtcggcgagtacgtggtgacgcagccggagaaaggcaagttcgccgcgttttccaacgtgtgcccgcaccagaacggccgcatcaatgaggtccgcgacggcgtaatgatttgcccgaaccacggctccgagttcgacatcgcgaccggcaaggtcgttgcgggcccgtcgcgccagcccgcgggcgaggcgccactgtcggcaaatggcacggagctgattgtcggccagaagtgggccgcacgcggcctggctcggcctggctcggcctggctcggcgcactttagcgcgcgttcattgcggccccgggcactttagcgctcgttcgtgactttagagcagccgataccgtgggctacagtcaccagccagcgctaaagtgcaggcccccgaacaagcccgcgctaaagtgccccagccacagccacagccacagccacagacccctaccgctccttcaagcccgccacggcacacgcacccgcgaccagcgacagcgccaccagccacggcacgagccctccccagccgagcccgccgaataccatgccggacacccagcccaccacggacgacccggcgtagtagctaaacaggtacatcgacgacgcctcggcgcggtcgcgctgcgccaccagccccacgccggacgaggacagcgagtgcgccacaaagaacgacgccgtaaaaatcagcacgcccacaatcacggcgggcagccacggcaccgccaccagcccgagtcccgcacaagcacccacggtcgcgatcgcgattagtcgccgcctgctcaccgttttcgcccacacacccgcgcgtgccgacgaccacgtccccgataaataaaggacaaacacaaatccggcgagtgcgggtgacagaccaaagcggtcgccgagcctaaagcccaggtagttgtacagggagacgaacgcccccatgaacaggaatgccagggcgcacagggcgagaatccgcaggtcggaaaggtggcggcggatggcctgccattccccggaaaaggacagcgccttggcccggaagcgccgctgcacgggcaggaagtaccaggtcaggatggcaaagatgaaggccacggccgccgagaccgccacggccacccgccacccggcgaactccagcaccaccgaggggatgatgcggccgagcagcccgccgaccgtcgtgccggagatatacagccccatcacgcggctgacgtggtcgggatggatttcctcgctgacgtaggccatcgcaacggcgggaacgcccgcaatgacgatgccctgcagcaggcgcaccccgatcatcgacccgatacccggggccacggcgacgacgaggccgagcagcgtcgccacaaaagcactaatcacgatcacgcgacggcgcccgaagcgctcggacagaatcgacaccgggatgaccgcgcaggccaggccgccggtagtggccgacacggtcagggcggccgttgcaggatcgacggccagggcgtcggaaagcgtgggtagcagcgcctgcgtggcgtagagggcctggaaggaggccaggcccgcgaagaggacggcgacgagcgcgcggcggaagccgggatccgagggcacgaggccttccgggagggtcgcggcggccgcactcgctgagctcgtgctgccggggccgtggtttggggtcgatgctgcgctactcacgccctccaccctaacgcggccctgaaccagctctgcacccggcaaccagcgcccaccggcacccggtaagacacccgccgaccccgcgcccgctacgtgcccagccggtccagggcctgggcgaggtcggcgatcaggtcgtcgacgtcctcgatgccgacggagagtcgcaccaggtcagcggtgatttccagggtggttcccgtgacggactggtgggtcatgccggcggggacctcgatcagcgactcgacgccgccgagcgactccgcaagctcgaactcgaccgtgttcaggcacagcgcctcggccgcctccttcgcgccgaggccgtgggggacgtgggggttcgcgccgtcggcaagccgagcgctgaccatgccgccgaagccgctcatctggcgctttgcgacgtcatggccgcgatgggactcaaggcccgggtagtagacctccgcgatttccgggcgggagacgaggaattcggcgacggcctgggcgttggcgcagtggcgctccatgcgcacggcgagggtcttgatgccgcgggcggtgaggtaggcgtcgaagacgctggggatggcgccggtgccgccgcggatgaagtcgatctgctcgtcgagggccgcatcgttggtgatcagcgcgccgccgaccacgtcggagtgcccgccgaggtacttggtggtcgagtgcaggaccacgtccgcgccgaggtccagcgggttttgcaggtagggcgaggcgaaggtgttgtcgacgaccagtttggcgtcgcccttagccttcgcgatcgcctcgatgtcggcgatggtcagcagcgggttggtgggcgtctccacccagatcacggacgtgttcggctggattgcggcggcgacggcgtccgcgtcgccgatgtcgacgacggtgtgctcgatcccccacgccccgaacaccgcgtcgatgaggcggtgggtgccgccgtagacgtcgttgggcatgacgatgtggctgcccggggccagcaggatgcgcaagatggcgtcggtggcggccatgccggaggagaacgcacggcagtgggcggcgcgctcgaggtcggcgatggcgcgctcgaggcccgctatggtcgggttgccgcagcgcgtgtactcgaagccgccgcgcagctggttgatgccgtcctggacgaatgtcgagctggcgtaaatcggcatgttgatggatccgtgcagggaatccggggtgtagccagcgcggacggcggcggtggcgaaccggcgggccgggcgcgagttgcttgcctcgtgcggggtctgcgtcacgtcgttattcgtcgcgtcgttattcgtcatggtgtgattatgcacatagaccgctcggtctacaaatcgcatgcgggccgcttcgcgcgcattacacgctttacgacggccccacgttccccggcgacccaatccaccaaaaacttatggttttgtcagcgaacgcgtgctgggttggttaccctcctaaagcatgagcacctcacaagagccccgccgcttcgacatcgtggtctacggcgcgaccggtttcgtcggccgcctcgtggtcaactacctggccaaaaacgccccggagggcaccaagattgcaatggccggacgcagcccggcgcgcctgaccaaggtcgcccgcgaggccggcgtgctcgattggccacgcattgtcgccaatgccgacgaggaagaggcccttgcgaagattgcgtccgacaccaaggtcgtcctgactgtcgtcgggccgtactggaagtacgggaagacgctggtggccgagtgcgcgaaggcgggcacccactacgtggatctgaccggcgaggtgctgttcgcgcacgactccatcgagcgcaaccacgccgtcgcgcaggagacgggcgcgaagattatccactcctgcggcttcgattcgatcccctcggacgtcaccgtccgcgccctgttcgaggccgcgcacacgagcctcggcgagacgacgctactggtcaagcacctcaaaggcggggcgtcgggaggcaccatcgactcggtgcgcgcccagctcaaggccgtgaaggacgatccgaagctgcgccgcgtggtggccgacccttacgcgctggccgcgcccggcccggatcagggcgcgttcggccaggacctgcgccccgcgcggttcttgggcgcctggcgcgcgccgtttttcatgggcccgtacaacacgcgcgtcgtccagcgctctgcgcatctgactggctacggcgattccttccgctaccgcgagctgatgaatgtgggccgtggcctgcgcggattcgtgcgttccattggcttcacggtgggcatagcggcgggaatggccgcgctgtcgttcccgccgaccgcgaagctgctggatgcgaagctgccgaagcccggcgagggccccagcgagtccgagcgcgccgccggccgcttcaccatcgagggctacaccaccgacacctcgggcgcgcgctggcgctcgaccgtgtccctggagcaggacccgggctacgacggcaccgccatgatgatctcttcctgcgcgctcgcgctggtccacgacgagcttcccgacgtcgccggcgtcctcactcccactgtcgcgcttggcgacgcccttctccggcgtcttcgcgctggcggcatgacgatccaggcggtacacgcgtgagtgccgggcggtttcgggcgggcctgacgcatgggcccaagctgccctcggtgatgccgggcgccgcccgcacgcctcgcgccctagtgacgggcgcgtcctccggtatcggctgggcctgcgcggaggcgctggtcgcggccgttttgaggtcgttggcacctcgcgccacggcgccgatgcgccgcaccccgagggcgttgagatgctcgccctcagcatggagagccaggccgatattgaggcgattgctgctgctggtgctgccgagcccttcgacgtcgtggtcgccaacgccggcgagagccagtccggccccttcgaggagctgccccgcgacgccctggagcgcctgttccaggtcaacgtactgggccaggtggagttgctacagaagctgctgccaggcatgcgcgcggccggtcggggccggattatcctgatcggctcgatgctcggtggcctgccactgtcctaccgatcctcctacgttgcggccaaggccgccctgcgcggtttcgggatggccctgcgcggcgaggtcgcccagttcggcatcgacgtcaccgtcgtggagccgggcgcaatcaataccgggatttcgcagcggcgcaccaaatacggtgccgccgactcggtctacgccgacgatgtgcgacggatgctcacccgcctggacgccaacgaggcgaagggcatcccggcgtcccgcattgcggacgtcgtcatgagggagattgcggcggagcggccgatggcgctggtggccgaggggtcgtcggcacgcgcggtggttccgctggtgcgggcgattccgacacaggcgatgctgaccctaatgcggcgggtacacgggctgcggtaggcgggatgcggcccggccggcagccgacgcgggttagtcggagcggttagtcggcgatggcgcgcatttcgacgccgtttgcgcaggcctcggctgcctcatgggtgaggtcgatggcctggttctcgtcctcgacctcgatgatccagaagccggaggggaacgtttcggcgtcgtagtacgggccttcggactgggagccgtccggcatcacggtgacggcctggtcgggcgcgacgaggccaccgcccatcacccaatggccattgtcctgcagcttctgattgaagcggcctacgcgctcgaaggcggcgtgcatctcttcctcggagtcatacgggttgatgtccttgcgaccgtggacggtgagaaagtactgcatgcggtgctcctgcgcgcttccaaatcaggccaaactcaggcagagacttgagaatgctactgccagaaatttcgtttcacaaagtttagcagtgttggtgcgcgaatggggtagatatctgaactcgagacagaaagacggcgccccgagtctattcgaacacccattcgccaccccatgccgaacaatccaaatactttggtagactttggtaaccaatgtttacacaggtaaggcgataattcctggtattttttcgccttccggcaggcttttcgttcgggctttgtgctatcgttgttactgagaaccaatcctcagtaaggaccgcctcgttagcggttccgattgctccttagggcccttcggggccctaattttttggagcgagatggaattgcgttacgtagtcggcatcgatgtgggactcttctccgttggtttctcggcgatagaggttgacgaagtggggatgcctataaggcttctcaactccatgtcgcttattcatgactctggcctagatccgaataaccagaaggaagcgaagacccgtaaggctgtctccggagtcgctcgccgtactcgtcgcttgtatgcaacacgcaagaagcgcctggctgctcttgactcctttctcacgaaatacaactaccccctggtcaaccttgagaaggaagccgacaaaatcgcatggtcggctcggtccaccttggcaaccgaaaaggtagaaacgcccgaggagatgcggaaactcctttcgattgccatccgacacattgcacgccaccgcggttggagaaacccgtacattccggcggaacggctgtgcacccaacgccagccttcggataagttcaaaattctggaacggaaggcccacgaggctgctaagaagtcgattccatcagaccccactcttgcccaactagttgacgcacttccgaatggagccacacagttacgtggcaagaacggattcttgtcagaggcgcttaaccagcaagactttgctaacgaaatactcaaaatcgcatctatgcaggaactcgacccgcaattcgtccatgaactcctgctcaaagtcttctacgcgaagagtcccaagggcttagccgaaaagtttgtcggcaaagatgaacttgatccctcgcagccgcgagcctggcgtgcaacgattgccttcaatgagtatcggattatcagcctcctcgctaacgtgcgtattgccgaccctggttcaccgacatccgctcagcgccgtctaactgtccaagaacgacaaaaggttttcaacttgctgaacagctggacaaagaagaatagcccaacgtggactgacattgcagaattgctcggcatcgatcgaggggcccttaaaggaacagccagcgccaacgacgatggcgaacgaatgtctgctgtgccgccaatcaaccagacgcatcaaatcatgtggaattgccaggtaaagccactgcgcgagttctggaggaaaggcagtgctgctatgcgcagcgctctaatttcggaactttccaacgtcgaagctcccgaagaagaatctcccgaagcgatttctgcagcttctgtaattcgtgccctgccgcccgaggaaatggagaaactggaaaccatcaggcttccccatggccgagccgcctattccgtgaagactttggaaagaattgcagggcatatcctaaacaatgaagccgacctccacgaagcccgacaggccatcttcggagtcgataaccattggaagccagcagctgcaccgattgcagaacccactggcaatcccgccgtggatagaacgctgtctgcaatcaatcgctggctgcttttggctgaaaaacgttggggagtgcccttctcgatcaatattgagacggcccgcgacggtttcaagagcgcatctgtggcacgggtaattgagcggggaaacaacaagcgagcaacgcgaaacctcgaaaccagacaggaaatcgcagaaaaactgggagtggaggggcgcgtccgtagtagcgatatgcttcgctaccaggcaattcagcgacagaacgggcagtgcgcttactgtggcaccaccatcacatttaagtccgctgaaatggaccacgttgttccgcgcgcaggcgccggctcgaccaatcggcgcaataacctccttgccgcgtgccacaaatgcaacttaagcaagggcaagcttccgtttgccgtttgggcagcgagcgagaaatctggccctaatgtctctctccagggggcaatcgatcgcgtcaaccagtggccgaccgatagtggcctgactactcgggaaatgaaggattttcagcagtcagttattaagaatttgaagcggacttccggcgacgacaagattgatgcacgcagtatcgagtccgttgcctggatggctatcgaactgcggcaccgcatgattgggcattttgagaagcagggcaagttgacccccaaggttcgcgtgttcagtggagcggtgacagcatcggcacgaaaagctgccggaatcgagaagcagatcacgatgcttggcggcgggcatggcaagaatcgtttggaccgccgccatcacgccctcgatgctgccgtgattgccctgatgacctacaccacggcgcagacgcttctcgaacgtgaaagccttcgccgtgcagaaaacacggttcaaaagcctgatgcggacttcggcacttggaaagaatataggggtcgaaaccagcagaataagtaccttttcgaacagtggaataaccgcatgagggccgcagttcctatgctccaagaggctcttgaccagaatcggattgcggtaacgcaaaacttgcggctgcgcctagggaacggccaggcacacgaagcgggtattggaaaactagttagtgcacaagtcggcgatgcactcccggttgaccttattgatcgcgcggcctcgccggcgctgtggtgcgccctgacgcgtctgcccgacttcgactggaaggatggacttccggcggactcaacgagaaacatcattgtcaacggcactcattttggccccaatgacagaatcgagtttttcggtgttaaggccggtgctatcgcagttcgcggaggatttgcggaattgggtgcatctttccatcacgcccgcttgtaccgcgttccggttggaaagcgtcatgcttattgcatgatgcgtgtctacacggtggatttggtgcggcatcaacacgaggacttgttcaccgttgagcttctccctcagtccatttcggttcgccaatgcgaagcaaaactccgcaaggcactccgcgaaggtactgcagaatacatcacctggttcgttgttggcgatgaactgcacttcgacgcctccaaggttgctactgggcaggctgaaacatttcttcaagaattcggcgacattcggtcttggacagtcaaggggttctactctgattcgaaactccgattgaagccgacagtgctttcagcagaaggtattaccgatgatgtagatggggatagcataaagattattgacagccctggctggcggccatccattaacaaagtgtttggcctaggccatgtcactatcgtccgacgagatgcccatggtcgcccgcggctgtctactcgcagtaacttgccagtttccgtccagattgattcatgatgtcttggagggtgctcgatttcacgtcctttagcggacgtctcagctatgaacgtggtcgcgttagggccacctaccgtgacgggtttgaaaagtatgcgagtattgccgaaatttcagtcttaattatcgctgacaagactgatatctctacagggctactaagtatgctcggccagaatggtattccggtcattgtcactgactggcgaaaagtgccagttagtattgcctcaagctggtctacgcatacgcgtgtaggagcacgccagatagcgcaggcaaaaaatgactcttccacggaaaaaggcagcctgggcgaacctcgttcgcgcgaaggttagaggacaagccaacacacttcgcgtactcgggcatccccgggaagctcaggacctggaggctctcgcttcaactattcggtctggagacccgtccaacgtcgaggctcaagcagcaagattatactggtcagccttcttttctgaaggcgaaggcagggaccaagatggaagcgatttcctaaacgctgccctgaactatggatacaccatccttcgggggcactgcgttcgagctgtcaccgaatctgggctatggcctgccttgggagtttttcaccattcccgttctaatggcttcaacttggttgatgacctcttggagccatttcgacctgttattgattactacgtagctcaacttcccgatgattcagggctcgagtcccctcaaacacggagactacttgtttccgcttcgagttcacagtttcaccgtgatggccgctcggtttcgacgatcttaagctctcttacccagcaattcggcttatacgcggaaggcgatatccatcagttcaaggtgcccgcttggtgtggaccgtttgaggctgaaaaataatgcctggagacaagcggatgtggtgcatagtgatgtttgatcttccagtcaagaccgagtcagagcgaaaagaagctaccaaattccgcaactatctgctggacagtggattcagccgcgtccaatacagcgtctatgtccagtacctcccacttggggcgcatctctcgaaaattgcaaaggacatcaagaacaagcttccgcacgagggagaggttcgtatcgtcccgctaactgataaacagtggtctaacgctttccgtttttctaacgcttcaccaaaaaaggttgaagaaacacccgaacagctcgagattttctaataaaaattcccctgatagacctgttcagaaggcattttttcggccttcagaagtctatcaggggaaatgagaaccaatccccagcctgcggctgttggcgatgctgaaccgtggaagtctatcaggggaaatgagaaccaatccccagcgcttcccagaactcgcgtgccttggtcggaagtctatcaggggaaatgagaaccaatccccagcttgggtgaggggcgtgtgcggacgttgcgaagtctatcaggggaaatgagaaccaatccccagcgggcggaacccagccacgtctgattctcgaagtctatcaggggaaatgagaaccaatccccagcccccgcgcgagcggagatgttcctagctattcgaacaattcaaatgtaagagtcacgaacgataaccggcaagcaaactcataaaagagacttcccaaccccagccccacggcccgccgcttacagccctccctccggcagccgccaaatccgattccccaccggcgtgatccgcacgccctcgcggacgcggaatacgaaattctcgtcgctctcgacgcgcggaacgtatgcgaacccaggcatattggtcaatccgggcacggccgggtaactcgggtcatagtcgacgacctggttaaaccgctccagcttgttcaaaaagcccctgatctttgtcaggctcgcctctgccagcgcctcattgtccaactgccagtgcccgaagagccgcagcgccttgtaaatcgtgttcgacaaaagctccgacggcacttcccacggcatattctcggccacaatcggagtcagcggcgtatgcccgccggcctgcgccaactgacaaatgtactgccgcgataccccgtaccgccgcgcaatctccgactgcttcatcccctcacccataagcaaaacgacctcctcaggcgtgacaacagccaactgactcctcctatccccgcgcttgccgacgccacccaaacgcaccactacattctgcggcgaacacccggcgacagcacgacccgtaacaaacatttacgggccacacagtaggacgtgtaccggattcacctatggcccattttcgaacatgcgtttgtatttatggggcacataatctcagctatcggtgagttccacgtcggcgagcactctctcgcggtaggtcaatacctgctcctcatgactgcacaccaaaggaatgctggacaacaagcctcagtcacacaccccattcacgcaggtagcaagttgatccactcggaagaattattgacactaggcttagccgacaagttagaaaactaggaggaattcaatgagtgcaccttggcttcatgaaactcgcgagtggaaaggtcaatggtggattcccgaagatcctgagaacattcactctggcatcttgacctatagcccagagcttggtctggaattggtgctaattggtggttttatcgataaagcacgtaaacaagtaggcccaaatacctggaccatagacacttccaagtcggactttccagtcatccatggtgcagctggcggaaaacgcatcacgctcttcgatgcatttccgaaacacacggccagttacgggacggatgccttgaatggcccctcggagcagacgattagcgcaagtactgccttagtgggcatacatgctaaatctccggatgatgagtgttttgttcgtgccgatgtggcgattgaggaccttgagggatggtcagcaacctatgcgattaatcgagttattccattcgataaccagcggaatcggcctactggggcgggaaccgtcaagctcgagatgccggaggatctcgaggccaatctgggattagcaaagataactcttacccatcagcagttgttaccgacgattgactacatgcgagttggctctcgggggcgggttcaacataccccaatattgaaagttgagaccgacgccactgtttgtttagaaactcttttggagtacatttcggcactacaagatcttcttgcattagcaaccggccgtgaatgtgcagtgctatggatgaatgtattcgaacctcggccaattccggaagagccaacgagttggaacaattacgcaaatgaagtggctgtgtaccgcaagcatcgcacacttggcagtccattggaaaaggctacagctccaaacgatttttttgttcaccctcaaggacgccgactttgcaaataccgttactgcctggtggcaggtacgggaacgatttcgcgcctcatgcgcaatcatcgtaggcgaattctatgagccaggtggctttctcgagctaaagctgattaccagcgtagttgcggctgagtctttccacggagcgttgaatgagataccggctataagcaaagaagatgcgcttaaaaggctcgatgctgctcgtaatgtgctcagtgatgaagattgggcatggttgtcatcatttgtacctcatggcttcagcttgcgcgatcgccttctcagcttgtcacggcgattgcccgttgatgtccgcaaacaactactgcctgatgaagaaaagtgggccaggtcgacgaaaaaggcacgaaatgatctatcgcactcagcccatacgtcaatttcgccccatacgctatatgccatcgtgcgcatcacgcgggcagttataatcatgaacattttacttgagctgggtatttctgaggagcggctggtggaggcgttaaaataccatcgcacaatgtcccgtgcttgtgaactcgcccatgagtatttcccgcaccaagatgacagcgctggatgagtatgcgaagcctgcatacaaaacagcgccttgagacagattggctccagaggagcttgtgcgggaccaagtggcttcacttcatgatgaggcaatgccaattgataacaccagtttcgctctccagattgtaatgaatttttccgagtgaaccgtgtcgggttttgttctgccaaaataagatttcgttctatccaccagaataaagtcaaccccgaaattgttagaaacaattccggggtaatgatggtcaattatttgcccatttaagaccgcgccttcctccacgcccagtccaccgcagcgaacagcaccagcgtgattccgaacagcggcgcaatcacggagtacgcaaccagcgccaccacaatcgccgccgcgaccgatggccggatgtcacgccaccgcgtcggcacgggcagcctgcccggacgcctcccgcgcccgcgcccgaaccacatcgcgtagccgcgaataatcatcgcgatcagccccacaccaatcgccccgagcaccaactggttcacccagccgaacaggaatcccatgtgcgcgttgatggtccactcggtcagcttcgccgccagtggccactcggaaaaggtcacgcggtcgacaacgtcgccggtcgcgccgtcgatcgcggcggactccatcccgagccgccactcctggcgagcctccttggccacccacgccgcgccgtcggcaggcggaatcagctcgagcttgccgacgagccccgcctccctggcgacctgatccaccacgtcggcctggttccagacctcggtcgaggccccggtcggccccgcggacataccgtgaccagcatgcgcgtcgtgcccggcgtgcgccccagcggcaccagcagcacccggcgtgacggctgcggtgatggcggtgttcggcttcggcgcgaaccagtccatcgcctcgcggacctgcttgattcccgagcccgcgacccacgaccacgtcaggcccgtcgcggtcaggaagagcaggccgacactcagccacacgcccacccgcgcgtgacgacgcatatgacgcccacgagcactcgtggccttgttgcgcccgcggcgggagcggtcccaccacagccacaggccggcgatggtcagcgcgcccatccaggcggcggcggtctcggaatagagacggccgacgttgctgtcgaaccacaggcgcttgtgcccctcggagatccaggtgcgcagcggcagggcggccgtcgaaccgtactggaccgtgtcgcccctgatggcgaggtcacccggatcgacgaacacgacccggtggtacgacttggacggcaacgtcttatccaggaagaggacgtgcgtggtgcgggtggggtcgtcgtaggtctgcacggcctcaacctgcaggtccgggtgcagcttgcgggctgcggcgacctggtcggccagcgagtgaggtggcagcggcgacgttgcggtggtctgctcggagtagaccaccttctcaatcgcgggcgacaccgcgtacgcgacaccagtgagagccgcaatgatcagcagcggcgccacgaggattcccgcgatcgtgtgcatgcggtgcaggaatgctcgggggccgccgttcggcgttttcggacaattttctgtatctgcgacgggctttgcggctggcaatccagcggcagcacctgtggctgttgaagtcatgccttattagtcgggcttcacagggaggttgttcccgacgaatttgtttagccacttccggctaggggtagccgattggcccgcaggcggcactggtgtggtgcccgatcttcgcaaagcccggccgccgccagcctccgccagcgatccccctccagcgggatttgatcaacgcttctaccaaaaatggccatgaattccaccgatttttggcagaaaggtagatcaaaccgtcccggcacgccaagcacgccaagcaaaccaccacgccaagcacgcccaccactcccagcatcccgcgcccaacacccgcgccatccccctctcccgcgcgtacgctcgagtcatgagcacggacacgaacctcaccactccgtacctggccgatcccgcccgctacggcgacgacaacccgatgcactacaaccgctccggcaacactggcctcaagcttccagccatcacgctggggctttggcacaacttcggcaacgaccgcccgctggatacgcagcgcgccatcctccgcgcggccttcgaccgcggcgtcacccacttcgacctcgccaacaactacggcccgccgattggcgccgcggaggagaacttcggccgcatcatggaaaaggatttcgcgccctaccgcgacgaactcatcatttcctccaaggccggctggtacatgcaggagggcccctacggtttcggtggctcccggaagtacctggtcgcgtcgtgcgatgcgtcgctaaagcgcatgggcctggactacgtcgatattttctaccaccaccgcccggacccggagacccccatcgaggagaccgtcgccgcgctcgaccacctggtccgctccggccgcgcgctctacgtgggcgtgagttcctactcccccgacctgacccgccgcgcccagaagattgcccgcgagctgggcacgccgcttgcgatccaccagccgtcgtactccatgttcaaccgctggatcgaggatgagcttctacagacctgcgccgacgagggcatgggcgtcatcgccttttccgcccttgcgcaggggcttctcaccgaccgctacctcgacggcatccccgccgattcccgcctgggcgcccacaagatgagttcctctttcctggccgacgacaccctcgccgccatccgcgccctcaatgacatcgctttacgacgtggccagtcgctcgcgcagatggccatctcgtgggtgttgcggaggccggaggtcacctctgccctgatcggtgcgtcctcggtcaagcagttggaggacagcctgggcgcccttgatgcggcaccgttcggcgacgatgagctggccgagatcgataagtgggccgtcgatcgcggtatcaaccagtggaagggcgcgacggaatcggtgtaggactgcaggccgggcgttaccggcccaaccccacctaagctggagctatgtcgcgccccagcaatcccgaggaagtcatcatcgtcggcggcggccaagcaggcctggccaccgcttactacctccgcaaggccggcatcgactcgctcatcatcgacgatcagcccggccccggtggcgcgtggcggcatgtgtggccctcgatgacgctgttttccacttccggcttctccaaccttccgggcatgcagatgcccgacttcgagggttttccgcccgcctcccacgtcgtcgactacctgaccgcatacgaaacccgctacgacctgcgcgttctccgccccgtgacggtccgcaaggtcacgcacgacggaatgtttcacgtggaactttcggagcccaccaaccccggaccaaccaaccccaccaacacccgcaccctccacgcccgccacatcgtcgccgcgacaggcacgtggcgcagccccttcgtcccccactaccccggcacaaccaccgcccaccagtggcattcggccaattaccccggccccgagcccttccgaggcagccgcgtcgccgtggtcggctccgccaactcaggcgcgcagatcgccgccgaactttcgcttgacgacgccgtcccccacgtcacctggtacacccgccacgccccgcgctggatgcctgacgacgtcgacggccgcgtcctcttcgcccgcaatcgggcccgcgccctggcggtcacccgcggcgaagctgaccccggcgcggactctacgctcggcgacatcgtggtgctgccaaacgtgaaaaaggccagggattctggctccctgacctggactcctatgttttcctccctgggtgaggtcgatgccgaccacatcatctggtgtaccgggttccgcccggcgattggccccttccgcgggctcgaccggaactccttcgacttcgtcggctacggcgactgggtgggccccggagctgcaactattgtcggcgtcgggcccttcgccaagcgggcagccgcgcgcatcgcacgcgacatcgcgcaggcccgctaagcccagcccggccagccggacccctaagcccccatgttctccggctgctcgacgaaggtctcgggcagcgcgaacgcggcgagcaggctgagcgccagcaccaccgggatcgagtagaaggacacctgcgcgctcgtcgcctccaggccgaaggcgccctgctgcaggtagcccggcagcagcatcagcaggccggcgcccacgaactggatgccgttgaccagcgccgccgacgttccggctagcgcggtaccggccagctccgctgccatggtgaacgggatcatcgagccaccggcggcgaagccgaagaggaagtacaaaacgccgacgaccagcgcggactcaaaagtcgaagagatgacgaacgcaatcagtgccgcctggatcaccacgctggcaatcagcagcggccgacgccgcccgatcttgtccgacatcgccgcgaaagcgggcgctcccagggcaagtccgacccatacccagggaaggacggcgtgggaggcggcgtcgtcaagcccggaggtggaggcgatatcgccgccccagaccgcgccgagtgcgagcattccggagaagctggtggcgccgagaaggaggatggaccacatcttggggcgggtgaccacggtgcccacgtcggtggcgacgtggccgacgaacttgcgggggtggcgcggccagccgtgcgtttcgtcccagccggcggggtcgcgaaggaagagcagcgcgagcaggaaaagcaccactccggaggccgacatggccagcagcagcgtgtcccagttgaagcggcgcagggctccgacgatgatggtctggttgacggacgcggacatcgaggcgatgaactgcacgagcgcgaacatcaggccgtacttggccatgccgaaccaggcgccaccgatgaaacccgcgccgacgaagccgaagcaggcgcccgcggcgacgaccacctgggtcaggatcagcagcgggaggctggacagggtcgcgaaaccggtgatgccgagggtcagcagaatgattgcgatggggatgatgcggcgggcgccgacgcggtcgaggagcgagccggaaatgagctggaagatcgcaaaggcccaggtgtaggccgcgccaatcaggccgatctggccggaggtgagcccgtgggtgccggcgacgtcgcccttaatgacggcgtagccggtttggtagccgaacacgagaaccacgaatgccactccgattgcccaggcgagccagggctggattctgtttggttgcttcgccgtgctcatgtcggctcctctttctgcacacttttttgtggactatgggtgcacttttttgtgttttcacgcgccgtgaagcgggagaagccggttggcgctagcctcgtgcgccaaccggctatttccctttgttcccgggccggtttcccacgacccgagtctagtagttccgctttacgacgccacagcggaacaagttcttgtggcggaccggtggaccggtggcccctgccaggcggcccagtggcccttacccggtggcctcgtggccagccagccagcggggccagccgccggcggcctagcctgcttaggcgttttccttcgggaaggattccttcaggattgcgccgatgacggtggcgacgactgccaggccgatgaacactgccatgggcttctggaaggcggccagggatccgtcggtgccggcgagcattgcgcccgggatgctcatgagcaggccacctgcgatgaacattgcgccgttgacgatggagcttgcggtaccgatcaggc

SEQ ID NO: 343 - DNA, 16652 bp, synthetic construct
  source 1..16652: mol_type = other DNA
  misc_feature 1..16652: note = Synthetic
tacagtaaattgcttttctgtatcgtcctgcgttatcattaaggaatataccaacaaaggaattaaaaagacgttgcaattgagtatttcaatgtatgcctaaatttaaaaagtaacaaaaaaaagcgacacattttgattcttggtgcacataaaatagttaaatttgtggctcaacgattgagcttgctcaagaaacgatcgattctagaaatggaaaataattatatcaaaatcgcggcggaactttcagtttcggtcaaacaagttaaggccaccatagaacttcttgacgaaggtaatacagttccttttatagcgcgttatcgcaaagagctgacagacagtttagatgaggtgcaaattgcggatatcagagaccgtgctgagcagcttcgcgagctagacaagcgcaaagaagccattatcaagtctattgaagagcaaggcaagttgacacccgatttgctcaaagcgattgccatgtgcgaaaccatggctgtgcttgaagatatttatttgccttataaacccaagcgcaaaacacgtgcatctatggcacgcgagaagggcttagagcctttggctctttggctcttagagcaaaccaatagcgcactcgagtcagaagccaaccaatatgtatctgctgaaaaagaggtggccagcatcgacgaagctcttgctggtgcacgcgacatcatagcagaaatggtgaatgaaaatgctgaggtgcgctcaaaaatgcgtgttctatttgagaaaaaagccattgtttatactaaagtcattaagggaaaagaagaagaaggccagaagtacaaagattattttgattggtctgagcctctgcagaatgccccttcgcatcgcattttggccatgcggcgcgccgaaaaagaaagtattatcaccctagattgcgagcctgaggaggaatctgccttgaatctaatcaacgagcagtttttgcaaaacaatagcccctcagctcagcaagtagaagcagccattaaagactcttacaagcgtttgctcaagccttctatggaaacggaggtgcgcttatcctctaagaaacgtgccgatgaagaagctataaaagtttttgctgataatatgcggcaactgctcttggctgctccgttggggtctaagcgcgtgcttgctctcgaccctggttttagaacaggctgtaagttggtttgtattaacgaacagggcgcactggtttttgactcggtgatttatccaaacgagcctcagaaaaaagtagcggagtcaggtcttttgctcaaaaacctttgtagagagtataaaattgaggctgtagccattggcaacggcacagcaagccgtgaaaccgaacgttttgtacgcaatttggacttgcccaagagtatacagattgtggtagtcaatgaaagtggagcatctatctattcggcttcaaaaattgcccgcgatgagtttcctgacaaagatgtaactgttcgtggtgcagtctctattggccgcagactcatagatccgcttgccgagctggttaaaattgagcctaaatcggttggggtgggtcagtatcaacacgatgtagaccaaaaagctctcaaaacaagcctcgatgatgttgttatcagttgtgtaaatgcggtgggtgttgatgtaaacacagccagtaaggagttgctctcttatgtgtcgggcttgggcgaaagcttggctaagaatattgtggagtacagaacaaaccatggagcttttggagctagatctgagcttaaaaaagtgcctagacttggagaaaaagcatttgagcaagcagcaggctttttgagaattcccaacgccaacaaccccctcgatgccagtgcggtacaccccgaaagttatgatatcgtggagcgtatggccaaagatttgggctgtggccttgctgacttgctaggtaaaaaagagctggtaaaaaatatacagattgaaagttatgtggataatttcactggcttacccaccctgcgcgatatcttgacagagcttgcaaagcctggccgcgatccgcgccaacaatttgaagacttcaagtttacagatggcgtggagcacatggacgatttacgtgagggcatgaagttgcctggaattgttacaaacattaccgattttggtgcgtttgtagatattggtgtgcaccaagacggattagtgcatttaagccaaatagcagacaattttgtggctcatccttccgaagtcttgaaagtacagcaaaaagtagaagttaccgtagtgggtatagatgtgatgcgtcgccgtatttcgctcagcatgaaaagtgcccctgttttggagagtagtaaaagcaaggagtctgctaaagagggcgaaaaaggctcaagacaaggcagcacgaacagaaagtttacgcgagacaatcgcgacaataacaaacctgctttctcgactaccaaaaacaaccctacaagcaaaaacaacccaacaaataaaggagcagagcctaacgtatctaaaaagtctgactcagagctgatgcaacagaagctagcagaactacagaatatgtttggtagcaagaaaaacaaaaagtaattttttcatacttcaaagaagctgtaattttaaaacaatgcggcttctttgaggttttagatttagaaaatagccttcaaaaatgactgacgatatcaaatacaatgcggatgagctttatcaagctgccattcatatttacaccgaagctacgccgaattccaattcgatgaagtttatgcttagctttttgctgatgcacgacgaacaaattaaagattacgacagtgtggcagcagcagaagagtcgcctttagcacaaagtctgttcgctcatttcgactttatcaagcgggtgtttatggccaaaaactttgttacaattaccaaagaaagcaacgacgacatggactggtatgaagcttcgccgctcatcagacagtttttgcgattgtattttgaagaaaaaaagcctgtttttgtggacaatatgcctgcaacagaagttcaattgaatcaagataccccttcggtgaagcgcatcaaagatattttgaatgaatatattaggcctgctgtagaaatggacggcggcgcaattttctttcattcattcgaggaaatgacgggcacgctaaaagtcactttgcaaggctcttgcaaaggttgtccttcttcagtggttaccctcaaacaaggcatagaaaacttgttccgcagcatgatgcctgaggtcaaagaagtgatggctgaaaattaaatttgaagcttatgtgggtcgctatagcacatatttgtaagcgagtatcacatggcttcaatagcatctagcccatctggctaaaaaaccagcgggcataaagcaaatcttgatgcgtatcgatatcaattaccctttcagcttgcatgaggtatggccatatttttgaaccagtcatagatgcgtgttcacgaatggtgctgggtctagtaacgtcaataacgcagttgtagaaataaaccttgggcaaatcttggcgacgcagcaaataaggcacaggatgcaagtgcttcatgataggatcaagaaagccttctggatctatggaaaacattctataaggatgtttttctggttctgacacagagcgcacggagtgcgcttctgttcgtgtgcgtaacaagtgaactgcctcatcaatccaaataggctctcgataaggcgcagtaggacgaagatgaactacgagttcagggctataattctcggtttggagtaagaagtctaaacaatgttcaaatactggcaaatccaatacatggtcttgtgctagttcgttgggtcgcatgaaaggcacttctgcacctgcctgctggcttacacgcgcaatttcagggtcatcagtagaaacaattactcgtttaatttcttcagaagctagcgcatgttgtatagagtgaactatgagagggataccattcaagtctacaagatttttacgtttgatgcctttggagccaccacgtgctgggataattgctaaaacagacattgcgaagaattaattttatttttgttcggtgctgatacccaattcttccataacaaagtcagaataattgtaagaagcatcatagtaaatcatgtgcaggtcgctagctttatcaaaaataaagtttatctttttttctttagctacttttcgcgaagcagccaatattttgtcttgaataggccgcatgagttcagaacgcttcttaaaaagcgcgccatcataaccaaataactcagcttgtctatttttgaggtcgttttctttagtcaagatttcggcttctctttctttcttcatttcaggcgtaagtaacaccaactcagcctccatcttgcggcgcatagaaagcacttccgcctgtttggtttgaatttcttgctcccattgtttggtgagagacaccaactctgcttcagcgtctttgtatgctggcatttttttgagaatcacctctgagtctatatatgcaaaacgctgggcaacagatagtagcggtaagcagccgataagtagtagagtgaggagaggaatggcaaattgatgtctagcggtcattttttttggaaattttcggcatgaatgtgtttttttaagaagggaacagcatttgtctgaaatgtagcaaggcaaatttatagccttctaaaccaaatccagcaatcactcccttacattttgcagaaagatagctgtgatgacggtaactttcacgtgcaaatacattgctgatatgtacttctatggcaggcgcggtaacagccgtcaaggcatctgctaaagcaatagaggtatgggaaaagcccccagcatttagcacgatgccctgaactttaaatccataatcctgcacccagtctataagctgcccttcgtggttgctttggtgataagtaagctgaaaatcagggaataagcgcaccagcccactcagataactttcaaaactaattgtcccatacaggtgcggttctcttttgcccagaagatttaaatttggcccgttcaatagcaaaatgtgtggtttcattgaaccttagattttaaagcccataacgagaatatcatcagtttgtggcgtttgtccacccccacgccattcgtcaagtgaagcttccaagcgttcacgctgaacgctgaacggtaatttatgaatgtcggtgagcaatttacggaagttacgtatcaaaaacttggtcttgctagaaccgaactgatcctggtaaccatctgaaaacagatagaatatatcgcctggttgagtatcaattttgacagactcaaacactttaggcttgcggaactgcacactgccaatagggaatttagagcctctaatccattctatctggccgtttctgaagcggcaaagcggttgtttagctccagaaaactccatttctagtgttttcttgttgtatgagacgatactaatgtccataccgtcattgaccctgttgatgttagtggcgttgcccaatcggctaagggtcttgctcatgccctccacagagcggtcgtgatggaaagtttggataaccagctcgtcaagcttctgaaggacactgccaggatgagtgatgccttcatgcatcacaatttcgttgagaaggtcgttgcccaacacagtcataaatgcgcccggtacaccgtgtcctgtgcagtctgcaatggctataacgcgttggtcaccaatatcagaaaaccaataaaaatcgccactaataatatcccttggtttgaatagaatgaaagagtctttgattcccaaattctctattggtgggagcatggctttttgaatacgactagcgtagttcatactggccatgatgctgatgttgcgtttctctatggtatttttttgaagctcaatttcgtttttctgctgagaaatttgagtcattttatccaccaagtcattttttgtaatctcaagggcagcattagcggcttccacttcttttttctgacggcctatgcgtttggctataataaaaaagcccacagccgatatcaacaaaaccaccgccaccaaggagataaacatgatgcggcggcgcgactcttcttcagactgtgttttttctatgttcagcttttgaatctctttacgcatagaatcctgagactgcataatgacactagtcagctgtgacatcacttttttggtttgttgttgggctgccaaaaatgcttcttcgttagcgagcaatgcagattgcaacttacccaaattatctttgagagcttgtttttcttcagcagtaagcttagacttgtcgttattcagttcgttagaaatactttctatttcttttttgatctcctcgccgtttttgatgagcgattctttttctttttccacattagctaaaacagaattaaacttgctctcaaaagctgcaattctgctagaagtattcccccccgataccactattttaacatttctatcatctacctcttgaacgttttttaccgataggtcctttgcagaaaaagagttataatttggcttagtttcattttttaaagttagtttaaacttacccgtcgcatcggtggtgtgtaccactccgtcaagcgtaacagccagattgggaattggctttttggcagtatccaaaacaaacacgcttacaaagttgagcttttctgcgtgtgatgccttcatagtaataaatatatagcccgtattgtctattttgaggtctcttgctacgtgtccattcaccgtaaatttgctgcttggtgtcacggactttccagcaggtaaggggatattgaagtatccactggcatctgttttaactcctctaacacctaccattgccacttcaacacctgccactggctcgcccttggtattctgaagttgcccctcagctctttcttgagccgaaacttctgtcaaataacccaaacatagccaaagagaggaaaaaaagactgtaagataaaaagcaaacgaacggtgcataaatttataagaacgagtttggggatagaatctatagcttatctaaaaaaataacaagcacaactttgaggaggcaagttttttaagatttagttagtaaaaatatttggttatttggctacatgctcatatgaaacactgcaaattttttgagtacctaatattagagtaatgacgcaaaattttacaaaatcatacacaaatccaaaaaaaaactcaaaaaattaacatataatatttttgttgaataaatgctattgcttagttatacaaaatgtagtttgcagaactacgaagaatcgacgtaattctgtcagaacatttcaggtgactcgtaaataaacagctggctaggctcttcgttcttgccgcaggcacggtacataccttcactgttgtaaggcatactgatattgccgtttttatccactgcaatcaaacctccctcaccgcctatttttaccaacttgtccttaatcacatagtcgcaggcttcttgcaaagacaaacccttgtactccatcaagcaagagacatcgtaggcaacaacggctttcataaaaaactcgccatgtcccgtgcaagataccgcacaggtcttgttgttggcataagttccagctccaatgataggtgtatctcccacgcggccatatttcttgttagtcatgccaccagtggaggtggcggcagccaaatgcccaaacatatcacaagccacagctccaactgtgcccatttttttattaggcacttgtacggcatgatctagcttcacttcgttagtgtcgcgcagcgcgagccactgttgatgccttaactcattaaaaaagtagtcaggagaagctgtttctaagccttgagctatgccaaaaagctcagcttctttgccgcaaagcaacaaatgttctgttttctgcatgacagccgctgccaatttgataggatttttaaagccattcacaccagctacagctcccgcgcctaaattctccccctccatcaatgacgcgtccatctcatgagtacccttgtgggtaaatacagagccacgtcctgcattgaacataggacagtcctcaagactaactacggccacagtaacagcttctagagctgagccaccacgtttgagcactaggcgacctgcctcaatggcatcgcttaagccctttaagtacatttctttgagcctaggggtcatggtgctggatgccaaaacacccgcaccgccatgtataacaagagaataattggacatgttgagctataagagttaaaagataaagggctttagaacaagctaaggccacgaatgcaaatatacaaaaataattagctgaatagtcgagcatttattttaaacaccaatcaaaactacaatctgagcagagaaagatttgaaaatttgacatgattgtgtgaggcaacgatgtggagcttgatatagcaattagttttaaaaagacctgacatttcatcaaaattttatacttttgctgatattggagcattctttgtaaatgcgaatatcaatgattttatccaaagagacagttctgtaatgagattatggcttactaccctcgcgaagagaaaaagataaatgccgcactagagctgcttgcggccagtgaagtgtcagaaagcgtatggcgagccgaatatttagacttattgaagcactacgaaacgcttttaactgagtttagttttgtgactaaagtcagtgatagagtgtacaacaaaatgcaacgggtcaatgatgagttgaataagcaaaaaaccgatttggaacatgcccagaaaatcattctacaacaaaacctagaactaagtaccctcaagatacaactggaaaaaatcatcaaagagcgtactagcgacttgaatagtgcctatagtaatatgctgacacttaacaaagagttagatggttttgtgtatagagcagcccatgatttaagaggaccgattgcacgcctgataggactggcttctttggcagaaaccgagaacaccacaaaggactacattccgatgataaaaaattgcgcggcagaaatggacgatattttgcaacgcttgctccaaacctccattgtcaaaagccatattctggtttttgagcaaatacctctaggagaaactctaaacttaattttagaagatttgcgttccaccaggcagcttgaagccgaagtccaatgtcttgcctgccaaaataacaaagttgtgctcacagatgagtttctttttgtgatggctctcaaaaatcttatcacgatttgtgccaagcactgccaagaaaatgctagtggaaaaatagccatacatgtcatggatactccaaactctctgcaaatttatgtgagctatacagactctgttattccccacgcggttagagacaatatttttgacttattttttagatttacagcccactctgacgggctggagctttattcttgtaagctggccaccgaaaaactaggtggtgaattgtccttagtcagctcagaccaagaagggactgtttttgccgtgattctgccacacaactggcctaatgcaggacgtagagcttattagattggatgttgaaagccaagtcttgttagaataaacaccttgattgcgtacagtgctgcaaaaattatccagctaaagtacaatagttgcaaatctcattcaggttatttatgtttacctctcaaaaggttacagattctgaacacttggtgagctgatggcaaagctttgcccaaacagcaaagaaaaccttgagtctcctcaataaacaatgaaagccacttacgtggcttccagagatagacactaaacagaaaaatctttagtgtgaattggtttctgtaacaagatattacctcacaaaagtaagcgaccttttttacaaaacaaaacaaatagcatggaaaattttcaaaaaactcgaaaaattttaggcttagatctaggctctgcttctatcggctacgctatgatagaaatgcagggcacagagctgctagggcttgttcaaaagcacaaccaagatgccattggtgtgagggtgctgcccacctctggcgatgtgctgaaagacttcaacaatggcaagagtgtaagcgactgcgccgaacgtactaaggcgcgtggtacacgacgcatggtacaacgctttagggcgcgacgcgaaagactacttctcttgcttaaagggctgggttggattcacccaagttttccgtgtatggttgggcgtgaacatgaaaagcaaaaacaggaatacaaggtacaagaaagctcaaagctatcttttgtagctgataagctgcaagaaatagcccttcacaacggttgggctgcgcagcaactgggcgatagttttgttaaaagctttctctcgcctcagcaagtgagagcacggcagaggcagtttgcagaagagtttgcagaataccttccacagggctttgaattcaacctagatctcttggtttattatctgcgacacattggcatcagccaaaagctagataaagctgagcttgcgctagtactctatcatctcaatcaacgcagaggtttcaaaagctcacgcaaagaagcagcaaacctgcaacaaagcaaaaataatgacaacaatgaagatgctgaagacgaaacagaggaggagctggcacaagaaggaaaagattactacgtaaaagcaatagctcagacaggcaatgccaaaaattatcaagtaacacttgaagacgctgagagtggcgaatcttttgagaatgtgttagtttcagaggcacttaaacgtcaattacaggatcatcaagaatccaaacataaaattgctttggttttgagctttaagaaaaataaatatcagtgtagtctgcccaaagcaaagtctgaaacagttactatcgaatatgtacaagtgaaatttgttaaagagctggaaaaggaaatcattaaaaacaaaactcaaaatcctctttggattaccttagaatctgacagaagagaaggaaagacctatgccaaactcgaggctggcaagttctaccatctacaaattaccgagaccattaccgcaaaaggtgagaaaactattagcttcaaacgcgtctcagccaacgattggtctaaaaataaggacaaagtaaaacgcagccttgaggagctagaacaggaagggaagtttgtggcttggtggcatctctccaacatcctaggaaacctcaaagatgggcaaaagtacatcacatattctaccaatgaccaagtcattctcaggaagttttatgagaatgaattgcttaaaatttgggagacccaaaccagcctacatggagagcccctcgccacacgtcaacagatagaacatgtcttgagccttctctataccaatgatgagcagaatacagttttctcacaaaaaaataaatggggtaaaagctttacaattaccaaaaacggcaaaacctacaaagacaacgtgcgccgcgtgatggataaaggagaagacgcgctactctatttgctgcgcaaacacattatctactaccagagatcactcaaatcgcaggtaagccaaatcagtacctgtcgctatgaaacccaaatcggcaccgacggcagcacgcctgtacctgttcgttgtgcgccccaaagtgcaccctatgccgtagagtacaggctctggaacgaaattaacaatctcaaatacaccgaaaaaggcagtaaggagcagcccttttccaatgagcagcgtgccaccctgtttggattgctctgcaaaaacaatgaggtaaaagtgagagacatcgctcggaaagtgctccaaaaagacccaagaaatgtggagtttaacaaatctcaagatgctaaaattaaaggacatggcacccgcaaagccctcgaaaaagccctttcaaaagctgaaaaagaagacaaaaacaagctagaggtggtcttgaatgatacagcaaagctcgagaagctctggcacatgctttattctatagaggccgatatagagtctgagcctatcgagaatcctatagtcaaggctctgcgcaaacattttggcttttcagaacaggctgccgttgagctttccaaggtggctttcaagagcgaacacagtgcgctctcaaaacgtgccattatgaagctgctccctctcatgcgctgcggcaagtactaccaagcagacctactgccaaagcaggctctggaacgcctcaaaaaaatagaagataacgaagaggaaacctctctagaccccaaaaccttgaagaggtttaaagaaaacctgaaactagaaggactcatgcagtttgaggcggcctcgctcgtctatggttcgcattcgcgagaaagtatacccgaacgcctcgaaaagcctgaagatcttatggtgctcaagcagcataccttacgcaaccccctcgtagaaaaaattgtcaatgaaaccctcttgcttgttaaagagctttggcagcgatttggcagacccgacgaaatccgcattgagctagcgcgcgaaatgcgcatgaccgcgaaggagcgagcagacaccaccaaacgcatatcggataatcaaaaggccaatgatgaggtaaaaaagaaaatcgctagtgagattgctaacccctccaagaatgacctcctccgctatatgctttggcaggaaagtaatgaaacttgtctttactcaggccaaaagataaaagtggagcatatttttaatctaaatcaaacgcaagtagaccacatcattccacggtcacgtttttcggatgattctcgcaccaacaaagtactcgtactgtctgaagaaaacaaggcaaaaagtgatcaaaccgcctacgattatatgcagagcaaagggactgaagcccttgagcaatataaaaagcgggtggatgacctttacaaagggaaaaaacaaaagcgcaaatacttgatgatgacggccgctgatattccgcaagattttgcgagccgccaactcaacgaaacccgctatatcaccaaaaagtgcaaagaactcctcagggcagtctctgaagtctgggtgacctcgggaggaattacagattacctgcgccatatttggggagtagacaccctgatgaaagagcttatacgcccgcgctacgaggctaatgaagagcttttgaagctcatcgtcccgccgcagaaggatgacagggaagaacagcttttgggtttttccaaaaggctggatcaccgtcatcacgcactagacgcgctcattgttgcctgtactatgcaagggcacgtccaactcatcaaccaacaaaatgtggtctatacccaactcagtgcactcaataaaaacagcagtcttgatagtcagatagttactaatcagctcagcaagataccagaagcaaatttcaaaggtcatgcagacgagataaagcagcttgttctggattggaccagacgctataacaacagctcagacgaagactccaaaaaagaaaaaagacgcaaaaggctcacgaatttttcaccacccaagcccaattttaggcagttcaccaaaaatgctatggagcaattggtggtatcggtcaagtctaaaaaagaaactcgaggcgagctgcacgaagaaaccaccttcggtgaggtgtgggtgcaagaagagtaccagctagcagaagtcctagctatactagacaaagccagaaaagcagggtctaaagaacaagagtttgtgcgcattccccagccgctggactggctcaaaaaagaactcaataaccgtttagaagcgcataaaacgctcaaaaaagcccaagagtccctcaaaactgcgcccatcaaaaatagcaaagggcaagaactcaaggtagtcaccttgttggagagcattttggtagtacggcgtaagctcggcgacgggcttaccgcacctcagataaaaggcattgtggacaagtctgtacaagaggaaattatccagcaccttttgggaggaagtattcctgatggcgcaaaagcactaaaagaaaaactctcccaggaaaatatagttctcttcaatgacaagcgaaaagaacaaggcaagcctcccattctgaaggtcagaacgcgagtggcctatttacaagcagatatcttggacacaaatgtcaattcagggcataaaaagtaccactcaaaaggcaataactattgttttgtggtgggaagagtgccagataaggagggttttaagcgtgtgtatggttcggtgccactttttgatgccgtacaattgcgtagccaaggactcaagccagaagagccttttctgaccgaagaaaaggccaaacttcttttcacacttgtacaaaacgacacggttatttgtcttgaggaaggcgaacgcctagaagaggtgaactggaataacaggcaagagcttagtaaaaagctgtttagagtgaagaagtttagtaaaaagcagctctatctaagccctcttaacatgtctcaggcgattgcgtacaaaccacaggataccaaagaaggaaaaaacagcgaagaaaaaagcctttttgagcctactgctgaaaaatatcctttcaagcctctcatgtacaagctgaaaataagcaggctggggcacgtagaaggctactggaacgaggaaggagagtataagacagtctaaggctgtgcgatggtttgcaggcttcgggcttgcaaaccattttttctataaaactaaaaaaacaagccagatgatcaaaagaaccctttattttggctcgccagcctatctctccaagcgtcttgagcagctcgtggtaaagcaagaaactgggcaagaggtgagcatccccatcatggatataggcattgtggtactagactatccgcaaatcacaatgacgcatggcctcatgcaaagcctcatggaatacaacatcgcttttgtggtttgtgatgccaaacatcatcctacgggcttgatgctcaacctttgcggcaacacgctgcaatctttgcgcttccgcgaacaaatacaagccaaggagcccctcaaaaaacagctctgggcacagaccgtagaagccaagctacaaaaccaagccctacacctagaaatgagagggttcaaagcggatcagctctgggcatggagcagggcagtcgcttcgggagacaaaagcaatctggaaggcgcggcggctgctctttactggaaacaacttttcgctcctctgggcataccaagttttcgccgcaatcctgaaggagaagcccccaaccactggctcaatttcggctacgccattctacgcgccattgtggccagaggcttggtatctagcggcttactgcccaccctaggcatacatcaccgcaaccagtacaatgcctactgtctggccgacgatatcatggagccttttcgcccctttgtggacaagcttgtgtatgaactgattctaaaagaggggcttacggacagattggataaagtccacaaagccaaactgctcactatagccaccgaagagatgtttttaaacgagagacgcagcccgctcatggtagggcttcagcaaacaacggcctcgcttcagcgttgttttgcaggcagcgacaagttcattgtgtaccctctgcttcaccaaaccacaaggcgcaaactgtccgcgccttccaaccagccagacgatgagtaaagaacaggacgcttttaatcaatacagaatcatgtggacttttgtgatgttcgatttgcccacctacacccaacgcgagcgcaaagcggcgacggatttccgcaaaaaattgctcaaaaatggcttcaaaagactgcaattttcggtctatatccgccaccagatgagcaaagaaaacgctgaggtgcacaagaaatttattaaagacaatcttccgcctgagggcaaagtagaaattctgctagtaactgataggcaatttggcatgatggagtctttttatggacgcaagcccgttgtatcacaaatcctagaaccctccgtacagctcactttgttttgagctttgacgttgggcgcaggataaaatgatgattgaatttgttggctttgggtcgggctttattgaaaaagcaccgactttccgagcatgggcaataacgcgctttggctttaaagcggtataaaaaaggtcttataatgtgttcgttgaactcattataagaccttttttattttgaaaaccagctataagatactaaaaaacagaaagttaaacctagtctgttgttgcaaatatagcgtaatcttgttttgaaaccaattcacaactactggcctatgttgcgggtcattccatggttgttgcaaatatagcgtaatcttgttttgaaaccaattcacaacgatgaggatgaggactggtatgctagcgtcgttgttgcaaatatagcgtaatcttgttttgaaaccaattcacaactacgcttacaaacattctctgtatatttgcgttgttgcaaatatagcgtaatcttgttttgaaaccaattcacaacaaaagaatcaagatttgaaacaaacggg

SEQ ID NO: 344 - DNA, 23201 bp, synthetic construct
  misc_feature 1..23201: note = Synthetic
  source 1..23201: mol_type = other DNA
ccagggtgtacccggcccgcgcgaacaccacgttcatggcgtggctttcggcccgggcgatggtgtaggcggtaaggatgcccatgcggcgcacccgttcttccatgtgtcgcagcaggcgcagggcggccccccgtccgcgtgcctcgggccgggtggcgaagtcggtcatctcggcgcaccgccatgccatgtccacttccgcagaggcggcggccagcaggtcgttcccccgggtcggcccggaatcatgtccgtgcaggtcgtcgccgtccgcaatgccgtggaacagcaccccttcggccatggaccgggcaaggtacgccgggtcgtgcacgggaaagggataggtggcgaaggtggccgcgtacaggcgggccagcgcgggggcgtggtccggattcagttcgatcacccttcccgtcttcggtttcggttcaatttcctgcgttccgctggtggcgtcggacggctggctgccgtgccgtgcgcatgccgtaccttgttccagcccggctctcctggcattggccagggccagcacctcgcacagcagtccggggcggcgcggcacggcacgcgcgtcccacaggtgccgccccatgaagcatccggctgtgcgcccccggcacattcccggcacacgggcctccacggcaaagccccgcgccagaaaacgatgggccgcgtgctccggcacccgcgcgaacagccgggtgtagccgtggtacgccgccagttcctccatccggtcgatgatgctggtcgtaccgggtaggcctgataggccgggcaggccgggcaggtcggactcgtccagcttcatcaggtagacccggtcattgagcggtccgtgctggagcagcgagcgtccgtggcggattacctcgtcaggccgcgccctgtccggatgtgtacggtccggatgtgtctggcccggtcgtgtcctgtccggtcgtgtctggtccggctgcacccggacggaatccgccgcatcaggacgcatcgcgcctgcgctccatgcgttcattgtcagacggggtcaggctgcgggtgtcgtcccagtcggagagcagcttttccacgcccacggcatggccgggcacgtcgcccgcgtgcagttgcagggcgcagtcgccgcaccgcaggtcgcagcgggccggggtgtagtcgtccggctcgtgataggtggtgatgaccccctcgtagttgcgcagcaccaccttgcccgcgccccacgccaccacgtagttgggcatgaccggtatcttgccgcccccgccgggggcgtccaccacgtaggtgggcacggaaaagccgctgcaatggccgcgcaggctttccatgatctctatgcccttgcccaccggggtgcggaaatgcgccagcccttcggaaaggtcgcactggtacaggtagtaggggcgcacccggttgcgcaccagcttcaggttcagggagcggataatccgggggcagtcgttcactccggccagcagcacggtctggttgccgagggggatgcccgcgtcggccaggcggcgcagggcgcggctggcgtcgggggtgatttcgcgcgggtgattgaagtgggtgttcagccacagcgggtgatgggtgcgcagcatgtccacgaggtcgctggtgatgcggaagggcagcaccaccggcatgcgggtgccgatgcgcaccacctccacgtggtcgatggattccacctcggtcagcagccagtcgagcatgtcgtcggacagcatcagcgggtcgccgccggacagcagcacgtcgcgcacctgcggggtattgcggatgtactccagccctcgttccaggtcgccgcgcgaggggatggagtccacgtcgcccaccttgcgcttgcgggtgcagtggcggcagtacatggaacaggtgttgctgacgtggaacagcacccggtcggggtagcggtgggtgatgccgggggccgggctgtcgctgtcctcgtgcagggggtcggccatgtcgtgcggccctatgaccatttcgccgggcgaggggaaggattgcaggaacaccgggtcggtggcgtggttttccgtgtcgatgagcgacaggtaatagggcgtcaccgacatgggaaagcgctccagcgtgcgttcgtgcagttgccgctgttcgggggtgaagcgaatgcccagcgcccgttcgaaatcggccacgctgcgcacggcgttgcggatgtgccagcgccagtcgtgccagcgcgggtcgtcggtcatgtcgccaagctgggccgccggggcggttcgcgaggtgccggggtgatggtgcaacgtgggtatgttcaaggaagcctcctttgtcgggggtgaatgggccggacgcggatgcgcccgatgcgctccgcccggaccttgacgtccatggcctgctgcgccagcgccggatgtatggggccgtgacaggcctgacgggcaggccgggcgcgggccgggcgcgggccgggcgcgggccgggtgcgggccggatgcaaggccaggtgctaagccgggtgctaggaccagctaaaggatctgccccagaaagcggcgggtgcgttccatggcgggctcgtcgaatatctgggcgggcggccccatctccacgatggccccctcgtccatgtaggccaccacatcagccacttcccgcgcaaagcccatttcgtgggtcaccaccatcatggtggtgccttcgtcggccagcccgcgcatgacggccagcacctcgcccaccagttccgggtccagggccgacgtgggttcgtcgaacagcatcacgtcgggctgcatggccagggcgcgggcaatggccacgcgctgcttctgcccgccggaaagggtggcggggtaggcgtcggccttgtcggcaagccccacgcgatccagcaggcccagcgccatgtcggcggcctgtgccgcgggcatgccgcgcacctgggttggcccctccatgacgttgccaagggcggtcatgtgcgggaacaggtgaaagtgctggaacaccatgcccacgcgggcacgcagggcgttgatgtagcgttcgtcgccgcgcacaggctcgcccgagatgcggatttcgccctcgtcgtgggtttccagccggttcacgcagcgcagcagggtgcttttgccggagccgctggcgccgatcagcaccaccacgtcggacggcatgacctgcaggtccacgccgcgcagcacgtgagtgtcgccgaaccacttgtgcagtccctgtatgtcgatgacgggcgttgtgcccgatgtgccagatatgcccgttgtcgctgctgtggatgctgtgacggtatcgttcatggcgcctcctttcggggcctgcgccgtgtcgtgtgcgaggggggcggaagcagcatcagcggacgccgcctcaggccccggacacgccaaggcgcgcctccagcctgcccagcagccagctgaacagggcggtgtagaacaggtagaacatggcggccacggccagcatttccatcatcaggaagttggacgaggccagttgctgcgccttcagcaagagttcgttgatggtgatggtgctggccagcgacgaatccttgagggcgatgatgaactggttgcccagcgcgggaatggcccgccgcaacgcctgcggcagcacgatgcgcaccatggcccggtgccgggtcatgcccaggctgcgggcggcttccatctgcccggcggaaatggagatgatggacccccggaagatttccgccacgtaggccccgttgtggatgcccagcgccagcacggcagaggtcagcgcgctgaagcccgccagcccccgcaggccgaagtagatgaacagcagttgcagcagcagcggcgtgccccggataaggtagatgtaggcgcgcatgggcagttgcagccaccaccggccggacaggcgcagcagcgcggcggccagccccagcgccgtgcccagcaggatgcccagcacggtgatttcgatggtcatccatgcggcgggcaggaagtagggcaggtagtggaccacggcgttcaggtcgaagttcatggcgcctgcctcccgtatccggcggttgcggcatcagggctgggggcgatgagggcgatggcagggatggggcgagcggggcggggagcgcgggctgtggcgtcgcgttgagcgtaacgccggtcatggtgatggtcatggcgatggtcatggggccggtcgtcacatctgacgccacggcgcgcgcgccccgcccggcctagcgtttggtgatgtcgctgtgcagccatttttcgctgagcctgctcagggttccgtcggcgtgcatggcggcaaggatgcggtccacctctgcccgcagggtgtcgtcacccttgcggaaggccacggcaatgtcctcgcggcgcagcggcgaacccagcgccgtcacgtcgaacttgccgccctgcatggcggtgacgcctaccacgcggtcggtgatcaccccgtccaccacaccggtggaaagttccatcagggtctggttgtcatccttgtacaggcgcacctcgcccgcgccgagggccttggcgtcgtcggcaaaggtggtgccggtgaccacgccgatggtcttgcccgcgaggtcggcgggcgtggcgaacggcgcgcccttgcgcaccatgagctgcgcgcccgaatagtagtagggcgtggagaaatcgacgaccttgccgcgctcttcggtcacggccatgctgcccagaatgccgtcgtacgcgccggaacgcagcccctcgatgatgccgctccagtcagtggtgaccggggccgaggtgacgccaaggcgtttggccacctcggcggccacatccacgtcaaagccggtgagggtgttggtggtgtcgtagaagttgaagggcggatagccgccgctcatggcaaagctgatctttcctgccttcttcacccgttccagcccggtgggcggggggctggaacaggccgtgagggccagcaccagcagggccagcagcgagatcagggaaaatagtcgcggcagcggcgatgggccgggccgcaggagcgccgcctgggtggggatgttcatggatgctcctttgttgatggtgattggatggttggagcggaaatgacgagtgtgatgcacgcattgccgcattgatggcgtgggaatggcgatggcatgaactgcatggtcgccacatgcgtttgccggatggtcatcgatgcttggttgcagcgtgcgtatccgtggggattttttcagagtgctgcggcgtgaatggcgaacagtatcgcatcatgccgcaatgctggcatgatgcgtcatgactggcaagagggggatatgggttacgtgtcgggtatggcggcatacccgatgggggaggtgtttgcgctgctgcggggaagggggggaaggctggtggattgggccgggcgggccgggtggggcggaacggagcgggtcggggcggacggggcgggcgtcaggaaaggggggcgtcagcgcgagggggcccaggctcagagcagcgacggcccctgttgcaggtgggtttgcagcgacgtggtgctgccgcgcagccccagcttcttgcggatgttcttgcgatgggtctgggccgtttcgaacgagatgcccagcaggtcggctatttccttgccgctgcggccaagctggatcaggcggcacacttccagttcgcgcggggtcaggcccagcagcgcaaggtcgtttccgccgtccgccccgttggcctcgttgatcccgcccagtctgcccagtccgcccgatccgtttgctccgttcggttcgcccatcatgcccaccagctgttcggcaaggatgttgcggtagccttcgcgcacctctgcggtttcggcgcgggcaatcttgtccagcgcgggcagcatgcgccgcttcatgcgggtgtgcagggtgcgcagcatttcctgccgttcttcttccacggaccgcaagacctggcgcagggcgatgttcatctcctttacctcggccatgcggtcgcgcagcgaatcctgcaattccacgcgttcggacaggtcgtgcaggataagctggaacaggctgccgccctgaaaggcgatgcggcgcagggtggcctctgccggaaaagtggcgccttcgccgtcgcgggcggccagcgtgcgcgtccactgcttgttggggggcagcgtacgcatggccttgcgcaccatggggcgcgcccgccgcgccagcagcgcgtccacggcggtgcccgcgaattccgtcccgtccgccccatctggtccggtcggtccggtcggtccggccggtctggccggtccggtcggttcggctggtcccgttggggctggtccgtccggctctgcgggctcggcccgcgtgtccccggcgtgcctgcgcagggctgccgggttggcggcaatgatcacgccgtcctcgttcatcaggaaggtggcgtccttggcggtgtcgaacagcgcgttgaacagggtgaccgaatcggcccaggccgagatgtggtcgtgcaggcgctgctcgtagcgccggtagagcgcgtgcatggagtggttgtccgtggccacgaccaccagcccgccctgcggggcgatggccgggggcaggggcatgatgcgcagcagaaaggtgcgcccggcgcggtgaatttcgtggatggacaacggggggtagcggcgcagcgcgtcgtccgccgagcggccgccaagccccagagccttccagaacgactggccgggacgaggcggactgcccgcgcaggcaatgggatgcccgcgtacttccagtatgatgccgcgtgcatcggtgagaaggacaaggtctttccatgcatcgacaacctgccccggcgtggcgggggcaagctggcgcggcgtggatgatgatttgcgggtagtgttgggcattgtgcagtgtggtactacccgctgtgctgtttggcaagcatggatgatgcggtggcaatgcgtcgttcatttgccagaatgtcagggattgagatgctgttgcggtgtgttgcttgtgctgtgagacgtccagatgacggcccgttggcggctttcgtcactccccgtatcacccctgccccgccttccctgctgccatcggtgcgcaaccctgttatggtggtcccatgtcgcggcatggtccggcccgcgcttctgtgccgccctgtaccgttgccgaccgttccgcgccgtgccgtaaccatcgccgccatcccacagcccggcccgccgccggatgaaggagtttcgcatgtcgtcccagccgaccgcctcgactgctgcccccgccgtccataccgccgatagcctgcgcgggctgtttcccgtggccgggcagcctctgccggaagccgcccacgcctttgcgcccatagagcagcgcacctgccttatcgacggcaagctggaggaatggcccggcgagatgcagcaggtattttcgcccattggcgagaccgacgctgcgggcggctttaccccgcgcctgttgggccgctgccccatccttgacgaggccgccgcactgcgcgccgtggacgccgccgaccgcgcctgggccgacggcatgggcgcatggcccaccatgggcgtggccgagcgcatccgccacgtggaggattttgcccggcgcatggcggcgcggcgcaccgacgtggtgcgcatcatgatgtgggaaatctgcaagtcgtggcaggacgccagcggcgaattcgaccgcaccatggagtacctgcgcgacaccatcgacgcgctgaaggatctggaccgcgcctcgtcgcgcttcgtcatagagaaaggcatctacgcgcagattcgccgcgcgccgctggggccggtgctgtgcatggggccgtacaactacccgctgaacgaaaccttctgcacgctgatgcccgcgctgatcatgggcaacccggtcatcgtgaaaacgccgcgcctggggcggctgctgtattcgccgctgatggaagccttccgcgatgcgttccccgccggggtggtcaacatcctgcacggcgaccggcgcatcgtgaagcccatcatggcgtcgggccgcatcaacgtgctggcgttcatcgggtccagcacggcggcggacgcgctgcgcctggcccacccgcacccgcaccggctgcgctgcgtgctggggctggacgccaagaacgcgggcatagtgctggactgcgcggacatggacctgaccgtggccgaggcgctgcaaggctcgttctcgttcaacgggcagcgctgcaccgcgctgaagatgctgttcgtgcatcagaagcggctggatgaattcctggcccgcatggacgagggcatccgcaagctgcgcatcggcatgccgtgggacgaaggggtgcgcattaccccgctgccggtgcccggcaagtccgcctatctggacgacctggtgcgggacgccgccgcgcacggcggcaaggtggccaacagcggcggcggcacccacgccgaaaccctgtaccaccccacggtggtctgcccggccacgacgcagatgcgcgtgtaccacgaggagcagtttggcccggtgatacccgtcatccccttcacggacatagaaacgccagtgcgctacgtggtggggtcgcagtacgggcagcagctgagcattttcggcaacgacccggacgacgtggcccggctgatcgaccccatggtcaaccaggtgtgccgggtgaacatcaacagccaatgccagcgcgggccggacacctttccctttaccggccgcaaggattccgccgagggcaccctttcggtcagcgatgcgctgcgctgcttctccatccgcacgctggtggccgccaagggcagcgacgccaacaaggagattctgaccagcatcatccgggacaggcggtcgaatttcctgtcgaacgatttcatattgtagggggactggcgactgcgggcgtaagtctgggagagcggggcgctgccccgcacccctgtagctctgctgtcctcatccgtaaggttcgcgctgcgcgctcaccaacggctgaggcaagggggccgcgcgcgttgcgatcgccatccgtaaggctcgcaagcgcgcctaacggctgccgtccccttgaccccttttagggggtaaggggtttcaaatcaaaaggcctgccgtatacggcaggccttttggcgtttcggagaaagggggagcgaggggggctggaggtgcggaggcacggcggacggctccccgctaccctgcaccgagccagacttactgccccttgcgttcctgcaagtgcctgccgagcaccgtcttgatgagcgcctgccgcgagacgccaaggatcttggcctccttgtccagcgcgttcaccatccacagcggaaagtccacgttcacggtcttcttctcgcggttgggatggcggatggcgctggtatccagaaaggcggtgatgtcctcgccctcgtcaaaacggcggtcgaattcttcagtggaaatttgcttggacatacagtgccacctcctcttttcttgcccgtcgcacggatatgatgcgcacggcctggccccggtcagtgatgacggcggcccagcactggcctgccagatttccgatggccagcctgcgcggctccgggccgcttaccctgctgggaatttcaatcaggtacgggtcgtcccacagcgccttggcggcctcgaagtcgataccgtgctttgccttgttggcgtcgctttttatgggatcgtactcgaacagcatatgaaaagggtatccaatccataccccttgtcaaggcgggacagaaaatgaaaaggcccccgctgggagggccatggggccgttcttgcgaacaacaccctgcggcgcgtcaccttccagggaagggagaggcagccttgttgtgacttgacaattggctattatgtgttttttgacgtagcgtcaacattcgtaaagaaaaggggcacgacgatatgcagcaggttccttacattcttgggcttgaccttggcgcggcatccatcggttgggcgttgctggccgctggtaacgacggcgaaccagtgggtgtgctgcgttccggggtgcgactgttcgagatggggtgcgcgggcgatatggacaaattccagcgcggcaaggaggaaagccccaacgccgcccgccgcgccgcccggcagatgcgcaggcagcaccgccgcaaggcgcgccgccgtcagcgcattcttgtgctcatgcagaagtatgggctgctgccgccggggaacgtgcgcgacaccaacgcgcgcaatgcctttttcaacactctggatgccgcactgctggaccagtggctgaatcgccacgcggcctcctgttctcccgcagaggcagaacggctgtcttgcgacccggattttctgcatgtcttcccttatcggctgcgcgcggatgggctgacccgcccgctttccgcccatgaattcggacgggccgtctaccagcttgcccagcggcggggctttctcagcaaccgccgcacggaggcggaagaggacgaggaactcggcaaggtcaagacgtccatcaatggccttcaggcggaaatggatgccgccggggcggagacgctgggccagtaccttgccgggctggcgccgtccgtgtcgcgtatccgggggcgttacaccagccgcgacatgctgacacaggaattcgacctgctgtgggaacgccagcgcgccctgcaccccgcgccgtacccggcgcatctgcgcgaggctgcccgcaacgccctgtgcgacgccattttctaccagcgccccctgaaggtgcaggcaaaccttgtggggttctgcgagttggaacccggcgaacggcgtgcacccaaatatgcggacgaagcgcaggaattccgcctgctccagcggttgaacgaccttgtatggtacgacaaacagcttgtgccgcacaggctggcggacaacccggaacagtatgcgcggctgcgcgatgccatgctgcgggcggattccatgacctttccggccatgcgcaagctgctggggctgccgcaggacagccggttcaaccttgaggagggcggcgaaaagaaattgttcgggcaccgggtgaatgcccgcatgcacgcggtgttcggagatgcctgggatgattttgctccggaaaagcgcgcggcgatcctgcacgacatcatcagcatggatgatgcccgcgcgttgtgcgggcgcgggcgcagggcatgggggctgagcgaggaaaaggccgtacagttcgcaaggccgctgcctgaaaaaggttatgccagccacagcctgaaggcgttgcgtaccctgttgcccgccatgcgcgcgggcgaatcgtacggcacggtgcgcccgtgcctgtacccgccccgctatggcgatgccccgcaagacaccttgccccctgcgctggaggccatgtccacgttgcgcaatcccgtggtgctgcgctgtcttaccgaactgcgcaaggtggtcaatgccattgtgcgcgaacatggcaagccggtggtcatccgcgtggagcttgcccgcgacatgaagcgttcgcgcaaggaacggactgactacagcgcacggaacaggaagcaggaatcgcaacgagaaaaaatggccgaacggctgatgtcgccggaagcaggcaacgcacgcatcgccacaccccgccgcaacgacgtggaaaaactgctgctggccgaagaatgcggctggcagtgcccgtacacggggcgcatgatcgggtggaatgacctgttcggcccgcatccgcagttcgatgtggaacacattctgccgtacagccgctgtttcgatgacagtttcctgaacaaaaccctgtgccatgctccggaaaaccgcgcccacaagcgcgggcgcactccgcacgaagcctatgcggcagacccggaacgcatggacgccatcttgcggcgggtggaggccttccagggcgatgccgccacgtgccgggccaagctggcccggttccgcgcgcccaccatgcaggagtggaaagacttcgccgaccgccagttgaacgacacccgccatgcctcggttctggcctgcaagtatctgggcctgctctacgggccgcagtccaaccgttacgtacaggccagccgtggaggaattaccgccatgctgcgcggcctgtggggcctcaacaggctgctgggagacggcggcaagaatcgcggcgaccatcgccaccatgcggtggacgccatagccgtggccgcgacgagccggggcatggtgcaggcgttgcagcgcgccgccgcgcaggcggagtcgggccgggtgaatcggcttgtgccgcgcgacatggtgccgctgccgttcgaggggttcatggagcaggcggacaatgtggtgctgtccattttgccgtcgcaccgggtgtcgcgccgggtgcggggtgcgttgcacaacgagaccatttacgcccgccgcgaactgccggacggcgcggtgggctatgccgtgcgcaagcggctggatgacgtgggcaagggcaaacctgtggggcaggatgctgccaacacctttaccgccaagttgctggaccctggccttgcccccagtgtggccctgctgctgacgggcagcgtgccccggcgcgatgatgacggcagtccgccgcccgttcgttccgtacgggtgctccagacgggcaccccggtgtccgtgggcaaagacggcaggctgtgccagacggccagtaaccaccacgccccggtgtacgccgtgccgggcaagaagggtgaggaatgggtatgccccggtgtggtcagcctgctggaggccatgcagcgcaaggaggcatggaagaaaagtgagggggggccggtagtggaccggcagggaccggagggcgcgcgcttcctgttcacgctgagttcgggcgaatgcatccgggtgcgcgtggacgggcgggacgagtacctgcgggtgcgttccgtgtacatggagcaaggggttttgaaggtggaagcggtacgtcttcaagacgcgcgaccgaaaaaagaaatcggcaaaaagagagaaggcggtttctttaaactcagtttgaagcaattgcagcaaggcgactgcgagaaggtggttatcacccccttgggcacagtggtgccctgccgtgattgaccgcattctggacatcgcggccacaccggcccggctatcggtgagcaattccctgctggtggtggaggtgggcaacagcaaggaaacggtacccctgcacaatctgggggcggtggtggtctcctgccccggcgtcacctacactcaggcggtgttggcagggttggccggtgccggggtgccgttcatctgctgcgacgccaggcatcaacccgtgggcatgctgctgccgctgacggacaacagcgtgcaggcagagcggtttcgacggcaagcggacctgaacctgcccacgcgcaagcggctgtggcagcaactggtgcgggccaaggtgttggcgcaggccgccgccgtgcggcggttggggggcgacgggacgcggctggccgcgttggcggggcgggtgcgttccggcgaccccgacaacgtagaggcgcaggccgcccgattgtactggccgctgtgtttcggttcagacttcacgcgagacagggattcgggcggcgtgaatgcccggctcaattatggttatgccatattgcgggctatggtggggcgtgccgtgtgcggggcgggactgcatccgtccttggggctgcaccaccacaaccgctatgatgcgttctgccttgccagtgacatgatggaaccgtttcgcccgctggtggatacggtggtggcgggcatggagccatgcggaccgggagcggaactggacggggcagccaaacgcgccctgctggagggcgtatgcggcaggttcgcggtggaagaagaggcccgtaccttgtgggatatcgtcacgcgggcctgttcatcgttggcgggcgtggtgggcggcgcacggcgcgggctgtggctgcccccggtggagccgctgtgcggttgcgggccgcagatggacggcctggatgatgacggcgacgccgcgtgatttttcggggtaccgcatcatgtggtgcatagccctgtttgacttgccggtgatgacggcagaagaacgcaagcgggccaacaggttccgcaagatattgatgggggccgggttcacccggttgcagctttccgtctatgcccagccgtttcccgatgaacgccgcagcgaacgggccgtacggatcatcaagtccgaactgccgcccgatggcgaggtgcgcttgatgttcctgaccgacaagcagtttgcgcgcatgcaggtgtttttgggaaaaaaggccaaacccgtggaaaaagcgcccgaacaactctggcttttgtagggatttgaacggaatttttggagtgttgaaggccgcttgcgcggccttcaactgtaaacggggtctgattcaggtcaagtcacaaccgctgcaagccgagcgcgcggggctggaactgtaaacggggtctgattcaggtcaagtcacaactaccagttgttcatgtccgattcgccggtgactgtaaacggggtctgattcaggtcaagtcacaacccaggaccggcagcggcgagacggcggggaactgtaaacggggtctgattcaggtcaagtcacaactagaaggcgtggagcgtgttcacacccacgactgtaaacggggtctgattcaggtcaagtcacaacctacgtatgatgcttgagtccatgtgtcatactgtaaacggggtctgattcaggtcaagtcacaaccccaaagggcttcgagccgccgctgccgatactgtaaacggggtctgattcaggtcaagtcacaacgcgggggcacaggcacggacacgtacccggactgtaaacggggtctgattcaggtcaagtcacaactctatgccgacggggcggtgttcgccccgcactgtaaacggggtctgattcaggtcaagtcacaaccacgagtgctacgaggtgatggtggccgcgactgtaaacggggtctgattcaggtcaagtcacaacctgcttggcggacggtgagatggctctatcactgtaaacggggtctgattcaggtcaagtcacaacgcatccgctacctgttgggcgacgtggaagactgtaaacggggtctgattcaggtcaagtcacaacgacccggaaggtgaatggcatcaccgtggaactgtaaacggggtctgattcaggtcaagtcacaacccgccagcacgtcagccgcgaggtacgggcactgtaaacggggtctgattcaggtcaagtcacaactcatttccctcgcgtgcgtgggctgcggccactgtaaacggggtctgattcaggtcaagtcacaaccgctacacggtgcgccagctggctgacaagactgtaaacggggtctgattcaggtcaagtcacaacgcagaccactggagggatactgtgtgccgtactgtaaacggggtctgattcaggtcaagtcacaacgcgtcacggcggcggtactggacagcggcaactgtaaacggggtctgattcaggtcaagtcacaacgtacgaccagggggatatagtccaggtcaaactgtaaacggggtctgattcaggtcaagtcacaacggtccagctgctgggcggcgtacagggactgtaaacggggtctgattcaggtcaagtcacaacctcgtaaaactcatgagcacggggcgtctgactgtaaacggggtctgattcaggtcaagtcacaacaagttgggcgctatgccggtgcggatggccactgtaaacggggtctgattcaggtcaagtcacaacaagccggggatgcgatgtggccgacgccgaactgtaaacggggtctgattcaggtcaagtcacaacggggcaacctggcaccagccttcgcgatcgactgtaaacggggtctgattcaggtcaagtcacaacagattttcacacccgttgctcgtgcagcaaactgtaaacggggtctgattcaggtcaagtcacaacaagccggggatgcgatgtggccgacgccgaactgtaaacggggtctgattcaggtcaagtcacaacggggcaacctggcaccagccttcgcgatcgactgtaaacggggtctgattcaggtcaagtcacaacagattttcacacccgttgctcgtgcagcaaactgtaaacggggtctgattcaggtcaagtcacaacgccacggacaaccggccgctgacggtgtggactgtaaacggggtctgattcaggtcaagtcacaactcagcctgttcacggacgcccgggccggggactgtaaacggggtctgattcaggtcaagtcacaactgactgtcctgtgtaatggtcgagtctatcactgttaacgaagtttgattcagagcaacatcactgtgttgcaaaccaccattaatgtccttcccccttcccatcctccaacggcaagtctagctgccagatgtcctcgtcgtagtccttgctgacgatgaagccgaccgaccgtgccagttcggccatggacttgttgtcaccaagggccgcacccacaatgcgcttggtgccgcgcgccttgcagtagcggatgatcttctgcatcagcagcttgcccagaccctgccgcttcaggtcggaccgaacggccacggcgaattccgcctcgctgttgtcggtgctgaccatggcccgcaccacgcccagcgtgcgcaccaccccttcgttatccggccccttggcgataaaggccatttcgcggtcgtagtcgatctgggtcagcttcaccatttcggcgcggggcagcttggccacgttgccgaaaaagcggaaccgcttgtcctcggcggacaggctttccacaaattcccagtgctccggctcgtcttccgggcggatgggcagaaggtccacgtgccgcccgtcgcgcagggtcacgcattcctcaagctcacgcgggtaggggcggatggccagctggtccgtgccggtggtggtggaccaggcaatgcgcatgtgcgcatccagcgccaccacgccgtcggcatccacgaacagcgggtcaatttccagctcgaatatttcgggtatgtcgatgatcagctgcgacaccttgcacagcagcaggcgcacggcgtccagattcacgcggtccttgtgaccgttgccgcgcagcaggcggtacacccgcgtgcgcgataccagttcctgcgcaaggcccatgttcagcggcggcagggcggtctggcggtcggccagcacctctgccatggacccaccctgcccgaagcggatgatggggccgaaaacagggtcggtggcggtttccacggccagttcgtgcgccccggccaaccggcacatgcgctgcacggcatagccttccatgcgcgcgccgggcacctggtcgcacacgttgttggcggtggacagggcggcgtccatcacctcttcgtcgctggacaggttaagggcaacgcccccagccagcgacgtgcgcggcacgtcgggcgattccaccttcagcgccacggggtagcctatctgtgctgctgcggccacggcctcgcgcggggtcttcacgtggcgcgtctcggccacgggtatgccataggcggtgagcacggcgtgggcctctgccggggtcagcagcatgcgcttggcctccagcgcatcgtttaccaccatgcgcgccgccgtcacgtcggggttgaaggcctccggcagcgagggcggcgtttccatcagggtgtcctggttgcgccggtactccaccatgttcaggaaggcccgcaccgcgttgtccggggtgaagtggctgggcaccccggcggcggcaaacttgcggcgcgccccggcggcgtcgtctatgcccagccagcttgtcagcaccggcttgcggctgcgccgcgccacctcgataaccgcgcccgccacgtcgtcgctgggtatggaaaaggtgggcacgtgcatcaccagcacggcgtccacgccccggtcatccagcaatatctgcaacgccttggcgtacatggccccatcggcggaactgcgcacgataagcgggttccagtacgaccagtcgcgccccaactggttgtccagcgcctggcaggtttcgtcggaaagttcggccagcttgccgcgcccctgcaacagggcgtcggtggccagaaagccggggctgccgccgttggtcaggatggccagccggtcgcccttcagcggcttggcaagggccagcgtttccaccgtgtcgaacatggcgtcgatgtcggccacccgcagcatgcccgcccggcggaaggcggcgtcgtacacctcgtccgcgcccagcagcatgccggaatgcgcggccgctgccgtggccgccgcctccgaccggcccgccttgatcaccagcaccggcttgttgcgggccagcgcgcgcgcggcggacatgaaccgccgggcactgtcgatggtctctatatacagcagcacggcgcgggtgttcacgtcgctgttcaggtagtccagcacgtcgtgaaagtgcacgtcgtagcggtcgcccagggcgatgaagtgcgaaaagccgatgcccttggacgtggcccagtccagaacggacgtgaacagcgaatcggactgcgaaagaaaggccaccttgccgggcagcgcttctcgcggggcaaggctggcgttcacccccaccgacggcgtgatgaaccccaggcagttcggccccagcacccgcacgccccagcgccgtgcggcctgcagcagggcggccttctgcacttcgcgccgttcacggtcgaaccggaagaacccccggctcatgatcacggcggcgcgggtgccgcgcttgccaagctcttctatgtagccgggaatggtctcgggcggggaacagatgatggcaaggtccggcgtcagcggcagggtgtcgatgtcggtgtggccgggcatgcccgccacggcctcgcccgtttcgttcaccggcagcaccggccccagaaaggtgccggacatcaggttgtccatgatgacgcaacccggctcgcccggcgtggccgtggctccgatgacggtcacggaagtgggcttgaacatctgttccagggtcgaatgcgtggacaccgtgcgaacccccttccgtcgagccgccgcgtgcgggcaggtgcgggcgcgccgggcggttgcccggcgtcgtgcggtgcgcggttgcggcggccacgggggtggtctgcgcggcgggggatggcgcgggcggggcgcatgctgttgccccggcgtgccgtccccgtccggtgacgggccgtcttgcgccgttcatggggcgcaccattcagggcattctttccgtccaccggcaaaaagtcaatttcaccggcgcgggatgaccgttcaccgaaaagggggtggcgcacggcttcgcatgttgacggtgcgtcgctaaacaaaggttgcagggactgttgccggattgtccttttgcccgttggctacgtcaaacgcggtctgccacatcggtcgaatacgggaagagtatgctccctcatggcagacccgttttccttgccaacgaacaaaaatccttatccggaaacagcccctgggccacgccccgccgcgacacgggccgggccacgcgaaaaggccggaaacaccggcgtaccgccaaacgaacgggaggcaacggcatgagccagaacaagtccgacaagatcgaaagcatgatggacgaaaagcgccacttcgcgccgcccgccgcgccttccggagaccgccgccgcccccacgtgaacggcatggacgagtaccttgcccaccgcgaccgcgccgacaaggaccccgaaggcttctggggcgaccgggcaaagcagctgctggactggttcaccccgtgggacaaggtgctggacgcggacatgaacgagccgcgcatcgaatggttcaagggcgccacgctgaacgtggcgtacaactgcctggaccgtcatctgatcaacggtcgccgcaacaaggccgccatcatctggcagggcgagccggaagacgacgtgcgcgtgctgacctaccagatgctctacgacgaggtgtgccgcttcgctttcgtgttgctgggcctgggcgtgcagaagggcgaccgcgttgcgctgtacatgcccatgattcccgaactggccgtggccatgctggcctgcgcgcgcatcggggcggtgcattccatagtttttgccgggttctcggcggtaagcctgcagaaccgcattcacgactgcgaggccaaggtggtggtcacggcagacgccgtgctgcgcgccgggcggtccatcccgctcaaggtcaacgtggacgaggccctgaaggactgccccagcgtggaaaaggtggtggtggtcgatcgcgcgcactcgggctgcgccatgcgcgaaggccgggacatgtggtggcacgaggccatggccgaccgtacccttgatgccacctgtccctgcgccaagatggacagcgaggacatgctgttcatcctgtacaccagcggttccaccggcaagcccaagggcgtggtgcacaccaccggcggctaccttacctacgcggcccacaccacccagtgggtgttcgacctgcatgacgacgatgtgtactggtgcaccgccgacatcggctggattaccgggcacagctacatcgtgtacggcccgctggcccttggcggcaccacgctgatgttcgagggcgtgccctcgtggccggggccggaccggttctggcacatcgtggaaaagttccgggtcaacattttctacaccgcgcccacggtcatccgcgccctgatgcgcgaaggcgcgcactggacgcagaagcacgacctgtcgtcgctgcgcatcctcggctcggtgggcgaacccatcaaccccgaagcgtggatgtggtaccacgagcacatcggccacagccgcctgcccatcgtggacacctggtggcagaccgagaccggcggcatcatgatttccgcgctgccctacgccaccacgctgaagcccggctccgccaccatgcacctgcccggcatcgacgcggcggtggtgaagcccgacggcaccccctgcggccccaacgagggcgggcatctggtggtgcgcaagccgtggcccggcatgctgcgcggggtgttcggttcgccagagcggtacaagtccacctacttcgagcgcttccccggcatgtacgaatcgggcgacggcgcccgcaccgacgaggaaggctacacctgggtcatggggcggctggacgacgtgatcaacgtttccgggcaccgcatgggcacggcggaagtggaatcggccctggtggcgcacccggccgtggccgaggccgccgtggtgggcatgccccacgccatcaagggcgaggccatctacgcctatgtcaccctgtcggcggacgccgaagaaaccgaagaactgcgcgcggccctgcgcacctgggtgcgcaaggaaatcggccccatcgccacgccggaggtcatccagttcgccgaagggctgcccaagacccgcagcggcaagatcatgcggcgcatcctgcgcaagatcgcctccggcgcgggttccgactttggcgacacctctaccctggccgacccgggggtggtgcaggatctcatcgaggggcgggtgcagcttaccggtcattaggggcagtttctaaattgtcctttcacccgttggcgtcgtcaaacttcgcctgccatatcggtcgaatacgagaagagtatgctccctcatggcaggcttgttttcctcgccaacgagcgaaaatcctaatttagaaacagccccgaatcgcgagcgcgccgtgtgttgcccgcgaaagaaatgaaaggccaagaatgacgccggaaagttacagttcatcatagcaaggtggagcgccccgtttggcggcgggacgctccatccgccggcaaccacacccgcgccggacgtgcggcgatgtccggcgcgggtggccggccacaacgggaggcgcggttttcatcgcgccccctgaatgttctctcccccttcccgcaaaaggaggcggaccggcttgaccggtccgcctccgacgtttgtgggggatgcgtttgggggaagagtctggtgaagtttctggggacgcgtttgggggacgcgtcagggggggcggcgcagggccgccgggcggggctagcccttgcaagtggaggcgggcgcctcgtcaggcgtttccgacagggactggggcaggggcaggcgcagggtcaccgtggtgtcgccgggctggctgtcgatgtcgatgaacccgccaagcgaggtgatgacgcccacggccacggacaggccaaggcccatgccgcgccccacggggcgggtggaaaagaagggttcgaacacgtagggcagcacttcggacgggatgccgtgccccgtgtcgcggaaggcgatgcacatctcgccgcccggtgcaggggatgtgcccggagcagggggggagccagcagagggggatgcgccgggtgagagaggtgtggaggacgcgccagcagagaaggacggaccagatgagggagacgcgccggatgaggcgcgcgcgggcgcggcgttttccggcggcggggaacccccggcagtcggaaactccacccgcacggtgacggcaagcctgcgttccgtcaccgtggactgggcgtattccacggcatccagcgcgttttcggccacgtgcacgaacacctggcgcaattccacgggcggggccaccagcaggggcgtgtccggcggcacatccaggtgcaccgccacgccaaggtcggcggcgcggtctgccagcaggcgcagggcctcgcccagcaggtcggccacgcgcaccgggccggggcgcgggtccagccccttgccgaagaacagcagcttgcgggttatctcgcgcacgcggcggctctgggccttgatcttgaccaccgagcggcgcatttccgccgcgtgcgggctggatgcaaggtccggctcgtccagcaggtcctctatccagcccgccgcgttggtcatgatgttcacggggttgttgat

SEQ ID NO: 345 - DNA, 23189 bp, synthetic construct
  misc_feature 1..23189: note = Synthetic
  source 1..23189: mol_type = other DNA
ggaaacgcgcggcaaaccgaagccgcttcaatcgcggaaaaaatacgcgaactcacctcaaaagacggttacgcattttccgatatagctctgatattcagaagaaaaacaaacatggaaatctacgaacgggcattgagcggggcggaggtgccattcaaaagaaccgacacatcgcaatttttcgcgcgaccggaaataagagacatggtctcaatgatgaggtttatggcaaacccgcttgacaaaatcgccgaagcggcggttttaaggtcgccatttttcggaatttccgatgaggggctcgcacgatatttttctgaaaaaagcaaaacggaagcggattgcggggaatctttgcggatattgtcaaatggcaaaggagagcattgcgaagcggcgcggcatctgctttcagttattgaaaacatgggggaaaccgatatttcttcaccgcttgaagcggcgcagtttgcggcgtatgaactgggtctcgcggcgtgcgctctcgccctgccccacggacggcaaattcgcgccaacataataaaattcactgaaatatgcgccgggcttaccgaagacggaacggggctgaatgaagcgattgaacggtttgattctgaaaaagattttccggacaaatccggagaagcaaacactgaacgggaaaactgcgtaacgctgatgacaagccactcggcaaaaggacttgaattccgcgttgtgtttctcgcggacacaaactacaggcgcccgccctcaggcagaatcgcggcaagttcggagcacggcatcatggtttgttacgaaaattgcagagttggcgaatgggaaagaataaagaacgcgggagtggacgaggaggaaaaaagaattctgtatgtgacaatgacaagagcggcggacatcgcgttcgcgcaaagacacaaaaaaccgagcgaaggcagtctcgcgcggattattgaaaacgggctcgccatgattcctgaattcaaaggcgggcacgggacaaagcccgcacacaaaatggaaaccgcgaacgaaaacgtggacgaaaagaagcgcgcgcggggggcgaaggccacggcacaaaccctgcgcccgctttataaaaaagactccacacgcaaggaaccccctaatagattttgtgaacttgccagaaccgaagagggagaaattctccacagattttttcaagtgtgggattttttgcccgactcggttgaagaaaccgcgaattttgtaatggacgagtttttctcaaaacggaaaagtttgaaggaaaacatagcgttgtgcgcaagaaatgctctccggtctccacttggggaaatggcgcgcggcgcggtggaactgcgcagagagtatattttctcggttgaaaacaatgccggcggcaaaacggtcaacggaagaattgatcttctgattgaaaccacagatggcaaaacagttcttgtggactacaaatacacggactcttttgaggaagaaaaataccgggaacagatggaatcctactgtgaagcgattgagaaaatccggggtaaaaaacccgatgagcgctacatatgcgttcttccgtcagcggagttaaaaaccgtttaggacaaaaactatgaaaaaagtgtcggtcataattcccgctctcaacgaggagcggtcagtcgcggcggtcattggggaaattcccgcgggcgcggttgccgaaacggtggtggtcaataacggctcaaccgattcaaccgccgacaaagcccgcgccgcgggcgcgactgtaattgacgaacccgttcgcggctacggcaaggcgtgtcttgcgggcatcaaacacatatcgcgtgactcgcaaagccgtcccgacgttgtggttttccttgatgcagaccactcggactatcctgaagaaatcccgatgctggttgagcccgtttttcgcggcgaagcggattttgtggttggctccagaatcaccggcgagcggacaaaaggcgctctgccaccgcacacggttgtcggaaacagagtcgcgggatttattttgagcgcactgttcggagtaaagttcaccgatttgggaccgttccgggcgataaggttttcatctctgcaatcccttcaaatgagcgacgagggttacggttggacggttgagatgcaaatcaaagcggtcaaaaaaaagctccggtgcgttgaagttcccgtgcgctacagggaacgaaccggcgtctcaaaaataagcggcacattttcgggaagcgtcaaagcgggcgcgaaaataatctggatgatactcaaacatgcgttctaaaaaaggcgcgggcggcgcgaaatgtgttctgcttgacagagacaaaacggttttaatgcccataggcgacagatacatacacagggtgggcgattaccgcattccgcgcggctacacagaatctctgcttgatattcagaacgccggatacctgctttttatagtcacaaatcagggacgagtcgccaaaggttttatgagcgagaatgacgtgaaggaagtacacgcggagatggatgcttttttcagaaaacgcggagtgcggttttcgagcatccactactgccctcataatccagacggaacggtcgcgccgtataatgtgccgtgcccgtgcagaaaacccggaacgggaatgattgaaaaaatagttcgcgaacacggcatagatccgaaaacgtcatggatggcgggagattctgaaaaagatgtcattgccggagtgcgaagcggattttcaacaatacgcctgagccacggaacagtagtcggcacaagagcggactttattgaaaaagacattcgcggggccgcgcgaagaattcttgaaacggatttaccgtccccgaggggattcgaacccctgttgccaccgtgaaagggcggtgtcctgggccaggctagacgacggggaccggacttgaaatgagccgtgcaggattcgaacctgcgacccactgcttaaaaggcagttgctctgccagctgagctaacggctctcaagcgcgacaatcataacacaaattgacaatgttaaaactccgccgctttttacgacggcaaaaatccgtacactcttaacgattcactcaaaggaaaaaccgcaaaagctccgcccgccatgaattttattctaataacagtttccggcttctttctgttttgcaatttttcctcattttttctacttccggttttcataagcgggcttggaggagacgaggcgcaaataggatatgtgatgggcagtttcggcataacctcgctactgtgcctgcccttcatttcaactctcgccgaccgccacgggcgcaaagtttttatgaccgcgggcgcgctggcgatgaccgcggcttcggtctgtttcgtttttgtgcaagaggttggatacgcggttttcgccctgcggctgattcagggcgcggctttcgcctctttttataccgccgcgcttacgatggtttccgacatcgccgagacaaaccgcctgtctgaaagactggggattttcggcggcattactatgctttcatacgccgcggggcccaccgtgggagaatggataatgaacacgcacggcgacgacgggctttttgtttacgcctcatttttcagtctcgccgcgttcgtaaccgctctttttgtacgggaaaacaacttcaccccgcaagaggacaaaacatcgttcgggaaatttttcaaactgttcgccgaaaaaaaatacggaattattttcctcaccaacctcgcgatggcggtgggactgggaagcatgcttaatttcttcgccgtgttcgcacatgagaacagatttgaggcgtcccgattctttcttacatacgcgctgacaataatttccgtgcggattttcttttcaaaattcgccgacagaataggcaggaaaacagtcgcgtctccggcaatttttctcgcggcgaccgcgcttgttcttatttcacaggcgcgtagcgaagcgcaaatcattcttttgtgctttcttttcagcgcgggatacgggctgatgttccccacgctgggcgcgatggtcagagaaaaaacacaaaacggaacggcaaaagcgatgggagccttcaattcatctttcagtctgggaatcaactatgcggcgtttccgctcggaattgtggcggaaagagcgggattgcggactatgtacgtgctcgcggggctggttgtgttcacgggattcgcggtgtttcagatttttgagcgaaaaaccgcaggggagagcgaaacttgagaaatgcaaaatcggcaaaatggctcctttttcttatcgcgctggccgtgctcgcgggctacacggacctgccttcccactttgcccacgaagcgcaaaaggaagaaatcttccctgtggagcaaattattgacggcgacacaatacgcgttccggataaacgcggacgcagccgcctgatacggcttgaaggaatagactgccctgagattatgagacacgactctccgggcgacccgttctccaaagaggcgacggagttgctttcaaaactcctcaaaagcaaaactgtgcgagcgcgcttcggtgcggagcggtatgacagatacgggcggctgttggcatttgttttttccggcgacttaaatgtgaacagggaaattgtgaaagccggtctcgcaaccgtaattgagctgggacagcaagaccccgttttgatgaaagaactgctgaacgcgcagaaaaccgccatgcgaaatcgtgaaggcatatggagcggagacggaaatttcaaccaactccgaagcaacgaaaggtttgttgtcgcacaaagcaaagtggcgcgcatggagggcaaaagaatcgtcataatggcgaaaattacgggctcggcgcgcaaaagagggggtacggttatactcaaaaccgacggcggagttgaaattgtaattttcggaggctcggcggcaaatttcagccacttcggaattgctccgcgctcgcattacacgggaaaaacagtccggattgtcggcagagcgtcaatgtacaggggcgcccccaacatcattgtaaggcatccgatgtctataagcgttcaagaatgaaattacagaaaatactcacacacagcggcgcgcaactggggttggaaattgagcccgaaatggttgaaaagtttgagacctactcggatttgctcataaaatgggcttcaaaaatcaaccttacgtcaataaccgaccccgaaactattgcggtttcgcattttattgactcgcttacggtgttgcgtcatattgagcccggcgcgtccgtgcttgacattggcgcgggcgcggggtttccgggaattcccgttaaaatatgccgcccttcaatcaaccttgttcttgcggactcacgtgagaaaagagttttcttcatgagagaaatcataagggaattagaactggaaaatacgcgcgcggtaaaggcgagagcaggaaaggaaaacggcaaaatcggcggcggctttgacgtcgcggttgcccgcgcggtggcgaaatcgcccgaagtggcgcgcgctgctctgcctcttgtaaaagagggaggcattgtgttgattatgaaaggtaaaaacggcgcgcgggaatgggaggaggaagaacggctgattccacagggttccgttttccacacctcggaggaactaacacttccgacaagcggcgaaatcaggtttgttgtggctttgaaaaagcgtaaagagacgtgaatatgaagactgtcggcatcatcggaggaagcgggctttatgaaatggacggctttgaaaaccctgagccgctcaaagtcaaaaccccgtggggcgagccgtccgcgcctgtgatagcgggaacaatcggccgcacaaaggctctttttctgccgcgccatggaatcggacacacaattctcccgtccgaaataaactacagggcaaacatctacgcgctgaaaagcctcggcgtggagcgcataatttcggtcagcgccgtgggcagtatgagagaggaaataagtcccggggatgtggttgttccgtcgcagttcatagaccacacaaaaaatagacggagcactttttttgaaagcggcatagcggcgcatgtgtcaatggcggatccggtttgtggtgacctttccgccgttctgcgcaaagccgcccggcagtccggcgcgaccactcacgaagacgcgacatatatttgcatggaagggccgcagttctcatcgcgggcggaaagcaatctttaccggcaatggggagttgacgttataggaatgacgaacatgcccgaagccaaactcgcgcgggaagcggaaatttgctacgctacactcgcgatgtcaacggactatgactgctggcatcccgggcatgacgccgtaacagtggaggatgtgattcaaacgctcacaaacaacgttgaaaccgcaaaacaaataattaaaaaatctctggaaataatgggagaggagcaaaactgcgactgcgcaaacgctcttaaaaacagcattataacgcgccccgaaatggtgagcgaaaagacgaaagaacagcttggaataataatagagaggtttcttaaatgagcaaacttgtgatagtaggaacggttgcgcttgactccatacaaaccccgattgaaagcggagatgaaattctcggcggctcggcggtttattcgtgtcttggcgcgtctctgtttacaaaagtctgcatctcggcggtcatcgggaaagattttcccgctcctcactccgagttgctgcgcaaagcgggaattgacacaacaggacttgagaaggcaagcggaaaaacctttcgctgggaaggcagatatgatgaaaaactcggagaccccgaaacgctttccgttcacctgaatgtgtttgaaaacttcagaccgaatcttcccgacaaactcagaaacgcggagttcgtctttctcgccaacatggatcccgtcacgcagatggaaacgctcaaacagattaaatcaccgcgtgttgtcgcgtgcgacacgatgaatttctggatagaaaacagtttgtccgacctgaaaaaaacgctaaaaatggtgaacattctcatcataaacaactccgaagcattgtctttgagcggagaaaattccgtggtcgccgccgcgcgcacgataaaaaaaatgggtcccgaaactgttgtgataaaaagaggagaattcggttgcataatgttttcgggcaaagaggttttctgctcgcccgcatatccggtggaacgcgccgttgacccgaccggagccggagatacatttgccggaggatttatgggttatttgagtgaaaatggcgcggacagatacgaacacttgaaacaagcggttattcacggttcggttctggcttcattcacggtggaaaaactggggactgaaagcataaaaaaactgaacagaaaaaaatttgaagaccgtctcggcaaatttgtagaaatgttacggttttgaaaaaccatatgttttcatgaatttgaatccattaaaacgtctggggttttccctaatcctgcttgctcccgcgcttgttttttcggcgtgcgccggagcggggaaaaaatccgcaaacgaactgcgaaaccacaaaacacttgcggcctcatacgcgcggggcggagattttattggagcaataaaagaggttgatatggcaggaaaacaggccgaaggcgaccccgaagcgcatcttatcaagggtatcgcctattttggtctcaaagacctgcaagccgctgaaagaagttacaaaaaagcacttgaaatcaaaagcgactacacaaaagccagatacaacttgtgcggactgtatctcaaaatgaacaaccccgatggcgcgattgaacactgcaaagtcgccgcgcacgacctcacctatccgcttcgctacgccgcgcttgtcaacatcgccaaagcgcacatgctaaaaaatgacaccgcttcggccgagcggttttttgccaaatcaataaagcttgaaccgtcaaatatctattcaagaaacgaatacggcaaactgctgcaaggtctttcaagacactccgaagcaataaaacagtttcaggcggcgttgcgaattgctccgggatacaacaaggcgcgcctcaacctcgcgctcgctttaatgaaagcgggaaaccgtgagaccgcatgttcggaagtgaaaaaaatattgcgcaacaaaccgcgccccgcaatcgccgctcttgtggaaaagcacactgaaaaaatctgcgccgttcagcgtaacgcgaattaaattccgtccgagcgcaaaaccaccattttctccacactcatatcttttatcgtgtgcggaataccgcctgttccaagcccggattttttaagcccggcaaacggcattccgtctatgcggaacgccgtatgatcattcaccataacacccgaagcattcagttttttcgcggtcgcgagcgcggtgtcaatgtcgcttgtgaacaccgaagactgaaacgccacatcaagcccgttcgcgcgcgctacggcgtcttccatatcgtcaacctcataaatacagacgaccggaccgaaaatttcctccgtgctgacaagggatttatctgaagggttgagaagaacggtcggctcatagcatgtgtcaagcacgggttttccgccgcaaacaagctccgctccctctttaacggcctgtgtaacccacttatgaacgcgctcaacctcggacggacgaatgagtggccccacttgcgtggatttaagagcggggtctcccactttgagactttgcgcctctttttgaagaagcgaaacaaaccgccgtccttccttcttttgcacatatatccgctgggtggaaacacaaacctgccccgcatgataaaaaccgcctttggcaagcagaaccgccgcacgctccatatcagcgtcgggataaacaagcgcgggcgccaccccgccgtgttcaagcgcgcaacgggttccgggagcgagttttgagcgcagactccagcccacgcgcgaactgccgataaaactgaaaaacgccgtccgttcatcggttacaagcgcctgcgcggtgtcgtttgaatccgtgatgacgacctgacaccactcaggaggcaggcccgcttcaaccagaatgtctttgaaggaaacgcatgagagcggagtttccacggcgggtttgacaataacgggacaaccggcggcaaccgccgcgccgacctgatgaacgatgagattgagcggatggttgaacgcgctaacggccacaacaacgcctatcggctctttctgtgtgaaagccgccctgttcgcgctgtaaaggtcgccacccatcggaataacatttcccgcctctgtgcggattgtttcggctgcaattttcgcgctgtcggacgccctgtaaatctccacctttgaatcgttatacggttttccgccctcgcccgccgcctgttttattaaatcgtcttcgcgctccgagataatggaagccgtccgctcaaggatttccacccttttttgaaccgtaagccatccggcgcggtcgtcataaagttctttcgcggtctcaagcaactcattgatatgcttttcccccgccgtctcaagcgtggcaataacggagccgtcaaaaggatttacaacttccgtctcgcccgcaggtggaatgtctgttttgaattgtagagggatttttttaacactcattacggaagttctccttacaggtattgagtataactatattgcgaaaggcataaaaaagcgccccactgggaggcgccaaggtcccccgaaggggttgcctgcgaaacattagtctcttgttatgaattgaaaaaaaatgtttggacaggtttcagtcagtaacaatagttatgtatcgtatcgggacaaagcaatttgtcaaacaattggtgagagtggcaaatgaaaaaagcaaaactgtctgaatacacaattggtcttgatatgggaacaaactccattggctggagtgttgtagaggaaaagaacggcaaaccgaaaggactcgtaagttgtggaagcaggatttttatccgttccgttgaagacaaaacacccaccccaaaaaatcaaaaccgtcgagagaaacggcttttaaggcgtgtaattgaaaggcgacatagacgtaaaatgcgtctgagaaactatctgataagcaaagaatttctgccgaattctctgaaagatgaacccaatcctgaaacggaacttaacaaactgggcaacccttatgatttaagggcaaaagcgttggacgaagaattgactccacataagtttggacgcgcgatacttcacttgggaacacggcgaggatttttaagcaaccgcaaaacgggatttggaaatttgcgtgatgacccggaggtgcgggaaattttagaaattgaagataaatctgcaaaaactgacaacgatgaaaacaaattcaaaaaagacattcaagaactccgagatgatataaaagaagccggaaaaagaacccttggcgaacacctctcaaccctgaaccgcaaacgcaacagaggagaatatcatgaccgcagaaccgacagaaaaatgtatcaggaagagtttgaacaaatcttccgtaagcaattcgcacttaatccaaagatttatacggaaaatgtcaaaaacgcgattgagaaaatcatctttaaccaacgctctataatttggaataaaaacaccgtgggtaattgttctcttgaaccgaaaaagaaaagagtgaaaatggaacgtcttgaatttcagcaatttcgttactggcaggacattaacaatttaagttgggatgacaccgaaacgggagaaagagatgtaaaaccctcgcctgagcagaaacaactaattgccgaaacgcttgagaaaaacaaaaatctgacatgggcaaaaataaaaaccctgttcagcctgaacaaacgaacaaaattcaatctggaaaaagttgaaggaaaaagcagaaagggtattaagggaaacacaacagcttgcggaataagagagattatcggagatgattgggacgactcactcgacgacagcaaacaaaaacaacttgttgaagacttaatttcctatgagtccaaaataaaactgaaaaaacgcctgcaagatcactggaaatttgatttggaaaaagctgtcaaacttgctgttctggaattggaagagggacatggaaatctttcactgaaagcaataaataaaatcctgccacaccttaaagaaggcagggtttatagcagggaaagcgacaaggaagatgaaacgggagcggttcaagtagcaggctataaagacattacaaaaccgaagaccggagacaaagaaactcttggcgaactgccttttataccgaatcccattgttacaaaagctctttatgaagtccggcgtgttgtgaatgcaattatcaaagagtacgggaaaccaaccgctatacgcatagaaatgtctcgtgatttagagatgaacacggaaaaatacaaaagagcggaacaaatacataaaaagaataggaaagccaatgaggaagcggaagaaaaatacaatagcatcagagatagggaacccgacttgcggttaaagaaatatataagccatcaggacaaactgaaatacagactctggaaagaaagtgagtgtaaatgttcatacagcggaaagtctatcagtttgacggacctctggtcttccgatgttgaaatagatcacattcttccgtatagcagaagtcttgataactcttatatgaacaaggtcatatgttttgcaaaagagaacagggaaaagcacaacaaaacaccgtgggaagcatttggcgaaacagaacaatggaaaaccattgagagcatggcaaaacgcaacaactatcccgaagcaaaatgcggaagaattctggcaaaaaaaatggaaggaattgaagattttgttaacagccagctgactgacgcacgctacatagcaaaagaaaccggcaagtatatgagaactctcggttgcgatgtaacttttacaaaaggcggaataacaagttggctccgtcaccaatggggattaaataaaattctcagcgaaacgggagagaaaaaccgcgccgaccacagacaccacgcgattgacgcaaccgtgattgcgcttacgaaccgcagtctttatcaaaaaatagtcaaagtggcatcagaggctagcggtgattccatagaccccgaacatggattggaaccccctagaattcttgacaatctcagaaacagactgcaggaagctgtagatggaatgattgtctctcatgcaacaaacagaaaaataacgggagcatttcacgaagacacgatttatggagtaagagaagaaaacggcaaaaaaggaattgttgttcgtaaaaacttgactgatatatcagacgctgtgttgaagaacaaagagatagtatctccaactgttagagaagcatttgaaagatatgttttggaacaaggaaatgatttgagcaaggcaaaaaaagctttgaaagaacaaccgttgaaacacccggaaacgggagatgctgtcagacgcgttaaagtttggatgtctaaaacctttaatgagagtttttactatacgaagaagaataaagcaggaaaaatctcaaaggttttgcaatatggcaacaatcatcatgtggaaattatcaagaatggagaaaccggaaaatatgagagtattgttgtaacaactatgaaagccgcagagagaacaagaattaggaaagaaccgattgtaaaaactgaacacggggaaaaccgggaatttgttatgagtctatgtataaatgacaccgtaagtgttcagaaaaacggtgagaaaatattctatagagtgcggaaaatagacagaggacagaaaaatcagtgtataaaattgatactacgaaaacacacagacggaacctcagatcaagattttaaaaaactatcctccgatgaaaagaaaaaacttgaattggcaatggctccttcaacactaatggcggaatacaaagtaaaacaagaatccataaatgctcttggtctcgctaaaaacaacactaaaacacaatgatcaaaagaatcattgaaatcagcaaccccgcataccttcatctgaaagactgtcagatgattatcagaaaagagagtgaaaatgacagcagtattcccgtggaagacatgggtattctcatacttgccaaccctgcaatctcaatctctcaaagtcttatagcggaatgtcagaaaaataactgcataattgtgttttgcgaccaaaggcatctacccgtttccgccttgcttcctctctcaggaaactcaatgcacagcaaggttctcaacatacagacgggagttaaaaaaccgctgaaaaaacggctctggcagaaaattataatagccaaaaccgaggcgcagattcaaacgttgctctttttcaagaaagatccgggaacacttccaagtctcaagaagagagttcaaagtggtgatccgaaaaatattgaagcgcaagccgcaaaaatatactggtcaatactgttcgggaaagaattcggcagagattacaaagaaagtggagtgaattcccttctaaactacggatacagcctaatcagggcgtctgttgctcgcgctttgtgcggaacagggcttcatcctgcgctcggaattcatcatcacaatcaatacaaccctatgtgtctcgccgatgacattatggaaccgttgagacctcttgttgacagacgagtttatgaattgaacgaaaatggaaaaacagaaattgataaaaagataaagttatcattgctttcccttctgtctgaagatgttttacttgaagaaaagaaattgccaatgatggtggcaaatcaatacatggccgcgagcctgaagaaagcgttttcagaaggaattgactctttgaaaataccggaactgattgagaacaaacaaatgaggattgaaatgtaaaaaatggctttcggaggatacagaaccgtgtggataatagttatgtttgaccttcccacagacacaaagagagcacggaaagattatacgaagttcagaaagcatattatgcaagacggatttatcatgatgcagttctccgtatatgccagacactgcgcaagcgaagaaaacgcctatgtccattcagggcgagtaagagaatctttgcctcccgaaggcgaagtgcggattattacaattacagacaagcaatttggacgaatgcaaattttttatgggaaaaaacgaaagaaactggaaagggctcctcagcaaatcactcttttttgatttgtggaaaagccataaccccttgccagcaggacagttgaggacgagctattgtaactgactgaaacctgcccttaattcacaactcgcgccttggtaggaagtgcgaactgtaaattgtaactgactgaaacctgcccttaattcacaacaccccctgccctgtcttacaataatttgtccgtattgtaactgactgaaacctgcccttaattcacaactcaaagacagattgaagatagcgcgcgcagattgtaactgactgaaacctgccctcaattcacaactcggcacgcctttttttccgagtaagaagtccggcttgtgtccttcactttacaacccccactcaacctcataacattcactatccattccgtccaaaacggcaaccaatgaacacgctgaggaagtttttcgccgaagattttgttgggattttcaaacagcttcgactgagctacataccgccgcttatggtgtatttggcggcgggaatttcggggcttacgggaattgtcgccactttttttgtcaaagactatctggacttgtccgccgcttttctcgccggtctcggcttctgggcggggctcccgtgggcgctcaaaatgccagttgggcatcttgttgacctgatctggcgctggaaatccgtccttgtgtttataggcgcggcacttatcgcggtggggctgcttattgtttacgggctgatagcccacactgaatatatgcggcaaatctggcccatctccaactggttcgtagcaagcgtgattatcagccccgtcggttatgtgcttcaggacgttgttgcggacgcgatgacggttgaagccgttcccaccgtggattcccggggtgaaaaaatcagcgaagaggaactcaaatccgcgcacacaacaatgcaaacactcggcagatttgccgttatcggcggcacggttgtggtttcaattatcaacatagtcgcctttaatgacacatcggaactttcccgaccggaaaaagcgcatgtttacagtgaaatataccttatggctctcgccattccgcttgtgtccatcatgggcgttgttctcgctgaaatcctgaaaaaaaccggacatatacccggcgtgccgaagcttcagactccaaccgcaccaaactggtggattctctgggggagcctcgcctttgtcattttcagcatcggaacggggctctcaaaagttccctattcggaggaaatagtgttcacgggctccatggcgatagtgattttccttatgcgaaaactgcttaccgaactgcccgaagataaacacgccactcttataggaacggcgataatcatttttttcttccgcgccgtgccgaccataggtccgggaaacggctggtttctgatagacgaaattggctttgacgagcagtttttctcatatctgtcgctcataggctccactctcacgctcgcgggcatatttgtttttctgcctcttatgagcagggttaaaataccatggcttattgtttttctgtccctggtgtggggcgttctgtcacttcccgacattgggcttttctacgggcttcacgaatggacggcggcgctgacggacggcgttgtggatgcaaaattcatagcgattgtgaacacggcacttgaatcccctctgggacaggtggcaatgattccgcttctcgcgtggatagcgaaaaacgcgcccgaccatctcaaagcgacttttttcgccgtgttcgcgtctttttcaaatctctcgctttcagcggcgagcctcggctcaaagtatttgaatgaaatttttatcataacgcgcgaggtaagagacgaagcgcagaaaatcatcacatccgcggactattcggaactgggaatacttctgataaccgccacggtaattggcgtggcggtgccctgcctcacggtcttcatcattcaaaaaggacgctaccggagtttggactaaaccaatcccttttccctcaaacttcaaacttcaagcttctccctttataatcaagtctaaatgcagccattcaggtctttaacaatcgcttacagggcgattatgtctaacaaggcgcgtgcaatgcttacctcgctcggagtgataatcggcgtggcggccgtggttgcgcttgtctcaacaacacaaggggcgagcaaaatgataaatgagcagtttgagcgtctgggcgggaagtcaatgcttatcacgcccgtgcgcccgagcggaaacctgctcaaatttacttctggcaagccgctgaccgtcaaagatgcgaacgcgatacggcaattgccggatgttgagtttgtttcggaaataattggcacccacaaaacagttgtgcacggcaaaaaccagtgggttacacgcattctcggtgtgtcgcgcgattttacttttattaacgactggtttccgcagacgggcacttttttcagcgcggacgatgttgagaactcgcgtccggtgtgcgtgataggcacaacgattgaggaaaaactgttcacctcgacatcggccatcggcaaaaaaatcagagtggaaaacatctcatgcgaggttgtcggcacaatgcagaaacttggaacaaaaccgagcggcgcggaccaggacgacataattctaatgccctactcaacagtgcagaaaagaatcctttcggtaagaaacatttcaaaaatctcgctcgcagtcataagcccggaaagaataggcacggctttgagcgaaataaacggggttttgagaaaaaatcacaaaatcggagtgggtgaagaagacgattattccatcagaaacaacgcacagaaccttgaacgcatagcggatgtaacacggattttgaaaattctgcttgtaagtatagcgtcaatatcgctgatggtcggcggagtgggaattatgaatataatgcttgtttctgtaacggaaagaacaagggaaatcggaataaggatggctgttggcgcgaggcagatagacatacaaaagcagtttctggttgaagcgcttgtcctgtcactcgccggaggagcggtgggtatagtgattggagtcgcaatttccaaaaccgcgtctctgttcaccggttggcccgccgaaatatcattttcagccattataattgcctgctttttttccgcactggtcggagttttcttcggtctgtatccggcgcacaaggcggcaaaaatgaatccggttgaggctttgaggcacgagtgaggaaagacggaaccgtttcggttttaatgtctctgccaaacttgggacttggcggggagcagaggcaaaccgtcaatatggcgaacgctctctgcggaaaaatgcgatgcgtgattttctctcttggcggcggcgaacttgagagggaagcggatggcagagtggcgattctgtttccctgttatccggcgtttgttaaacggtcccgttttttgtcttttgtctgggggctgttcgcgcttgcccgtgcggtccgaaaggaaaaaccggacgttctctattcacggcactggacaaaaattccaaatattataatcggaaaaatatttggaataaaaaccgtctggagcgacgggagcggcgcaaattttctcaaagataaaaaaccgcttttatttttcgctcaccgctttgccataagttacgcggatttggtaactgcgaattcaaaaggagttgccgatgaaaatcgtgatgtctataaactgaggcgcgcgcccgaagttgtttacaacttaatggacaccggagcaatagagcgcaaatcaggagaacaggtaaatcacaaatggctcggagagcaaacgccgctcgtaatatcggtctgccgtcttgtgcggcggaaagggttacggactctgcttgacgcggtaaaaatagcgaatgaaaaaacgccggttcgccttttgattgcgggagacggagaacttaaagagaaattgataagccatgccgaaaaaatcggaatggcggacaaaacagactttctgtcgcaagaggaaaatccgcacagattcacggcaaagtgtgatttattcgtctgtccgtccgaacgggaggggctctcaaactctctgctggaagccgccgcgctcggaatgccgattgtttcaaccaatcacccttttggcgcggacgaaattattgaagatggggaaagcggaattcttgtgcccgtaaataacacgcaaaaaatggcggaggcgattgtaaaactgattgagaacagaccgcttgcgaaacttatgggcgaagccgcgagaaaacacgccgcgaatttcaacattgaaaaaatggcggaaagatttaagacgatttttgaaagggtcgcgcgatgaaaaaaccttttaaaatttgagtttgccaaacgaaaaaatgtaggcaagcaaacggagaaaagcgctcattctaaaactcaacctcaaactggaaatcagcgcagatctgtaattaattccttttttcctgctgagcttttcaagtcgtcttgcatacgcatacattgcctcgttaaaaagatgagtatatttgaatattacaatgttgcatgtattcagagtatctaaaacaccggggtccatcctatcagatttcatggagtcggcattggcgtgccgtctgtatctcagaagaacttcgtcaatgtaatttatagtccccccacccgccagaatttctattataaagaaccaatcagacgtattggaaaggagagggttacaccccccatcgggaattttgtctgctctgtacatacatgagggtgccccggaaaacattccatatttaagtgagacttcaacaccaccctcgtaactgtttcctttatggttgaaaagacgcaaggttttattggtatcctcgtcaaaaacttccatattgtggtaacaaacggcgcaatcgggattgtcttccataaaagccacttgccgggtaattttttccggaagcataatgtcgtcatctgaaaaggtgacaacatatttgccctgataaaaagaaagacctttgttcagatttgctgttataccctcattttgagatgaaagagataaaacaaaattgatgtcggagtttttctccttatattcacgcaaaacatcctgacttccatccgtggaagcatcatcacaaacaattatctcaatattcggataatcctgagctaagattgaatccaaactttcccgcaaccaactttttctgttataggaaagaacaagaatactaaccagaggcagaggaaagttatgacttttcatcaatctatactccttttacactcatcgcgcgaacacgcataagaacaaaaacaccaacaaaaacagacagaaactcaggtatgaaaaacgcccacgccgctccaagatatgaataatcaggaataagaataaacatagacgccaatcctacacacgcaaacagaattgaaaaaaccgttttggttccgggcattccgaaagccaacaaagcaaaattcgaccatttgcacaggtgtcctacaaccattgcgcctgtcaaaactctcattgcgtcagtcgcgggagtaaattcactgccgaaaacaatttctataaattcatacgcaaaaacaaacagaaaaacacaaacaggcaacaaaaacttcattatttcctttactgaatagacaataagctgcctgaattcatcgtaggattttcttgtctcaagacgcacaagagccggatagagaacggaataaacgggacccgttatcttatttgccgcagataccacgctttttgcgactctgtaaagccccgacgcctcaacacctgaaaaatgaccaagcagaagaataggaatatgtgtggagaaggaaaaggaaacgaaacccgtcgcgtttatattcagaacaaaccaaatcacttcgcgcatttttcctttgattttcgagaggtccgcaaataaccatccgctcattccttcaagtttcagagtcctgttcacatagaattgaagtatggcaaaattcacaacagccgcaataacgtaagcgataaaaaagccctttaatccaaatcccagaacaaaaaacagcacaattaaagcaagtttgacaaaagcatccacaactttcagaaaagccgactctctaaactttttcaacgcctgaagtatcgcgttggaattctgattaacagtcaagacaaaaaggctcaaagagaggataagaacatactgaaaagtgttttcagatttaataaaaaattcgtttgcaacttcggcaagggcaacacagacaacaaacgcgagaatcccgccgagaaaatcgattaaatagaaaaatttgataaatgaaagcgcggatgtcttgtcgttcttttcacaatattcagagatgtatttaaccgaggcctctcttattctgaaatcaacaaaggcgttaacaagggttacatatgacaaaacaagcgtgaacacgccgaactgttctagatccagaaaacgggcgagaaaaacaacttcaagagtcgtaaaaatagacgcacccatgcctccggcgaaaagcgttgcggcgtctttcctcagactttttctttcatcctgcgggggttgtatattcattgaaggacaagaaggcttcgcgtaactgtgctattataacatccgggccaatgagagtttcaactttactgttcgccatactattccttttcgccccaaccgcttccacagagacggtcttagaccgcacagacacaatcgcgcggcagttgatgtgccccgtttgcgccgggcaaagcgttgcggaatcaaactcagacctcgcccgcgacatgcggaaaataataagaaaaaagattgaaaacggagaaaccgatgaggaaattatcctgtggtttcaaggtaaatacggagacacaatccttgccgaaccgccgctgaaggggtttagccttgttgcctggttcctgcctgttattgccgcaatcgcgggaggtatggtagctgttctgtatatcagaaagaatgcccgcagatcacgcggataaaaacttccggcactcctcaaccgcttcgctgagtttttcaggcacaaaccatcggatgtctttttcttttctaagccaggtcatctgccttttggcaaaacggcgcgtgtccgtggcggtgtcttcaacagattgagttttcgttatctcgccgtcaataagcatattagcctgacgataccctatcgctttcatcggctttaaatctcttgaatatcccatgccgcgaatctgctcggtctcttcaataatccccccgtcaaacatctcctgtgttctgcggtttatttccccgacaagcgcgtctctgtcagtcgtgagaccgattttaagacagtcaaaaccgccgtccgaaaacccgtgagagcgccggacctgcgaagcgggtgtgcccgtggaataaaaaatctcaagcgcgcgtcgtatgcgcacggaatcgcgctgatgaatcgctacggcagaaacggcatctgagtcacgcaatttttcataaagccagtcggtcccgtagattttttcctcatcttcaagctgctttcttatttccgggtcggcagggctttctatcaacccttcaagcagagctcgaacataaagaaaagttccgccgactacaatcggcggcgttttttccgcgcaaagttttttaagtatgggatgagccagagtccggtaagcgcccgcgttaaactcatcgtccggctcgacaacatctatcataaaatgcggaaacgcgctcatcgcgtccgcggacggcttcgcgcttcctatgttaaaatgtttataaacttgaagcgagtccgcgccaaccacggctccggacagttcagaggcaaggcgaaatccgaaatcggtttttcctgacgcagtcggaccaacaaccgcgacaatcctcccgttttcgcactccgcggttatctgtaatcctctatattttctcccagcgcttccctgcggctgagccgtatcttgccgtctctctcttttgaaatacacttgacgagaagctcatcgccctcattcacaacatcggtaaccttttcaactcttccctcttccaactcggaaatgtgcacaagcccgtctctgccgttgtccatctccacaatcgcgccgaaatcaagcaaccgcttgaccttgccgaaatatattttcccgggctctatctcctcaatgattttttctatgcgattaattgccatctcgcatgactccttgtccggagaggaaataagcactttcccgtcgtcctgaatgtctatctgagcgccggtttcttcaatgagtttgtttatcaccttgccgcccgaaccaattacatcgcgtattttgtcgggatgaattttaattgacattatgcgcggggcgtgggcggaaatatccgaactggacgcgctgattgttttgcccatctcggcaagcacgtgaagccgtgcttctttcgcctgcataagagcgtctgagagaatttccttcgtaacaccgtctattttaatgtccatctgcaatgcggtaatcccgctctccgttccggcaactttgaaatccatgtcgcccaaatggtcttcatcgccgagaatgtccgacagaatgacgagtttgtccccttcttttataagccccatcgctattccgccaacggcggcgcgaagaggaacaccagcatccataagagacattgaagcgccgcaaacggtcgccattgaggacgagccat

SEQ ID NO: 346 - DNA, 23111 bp, synthetic construct
  source 1..23111: mol_type = other DNA
  variation 15688..15697: note = n is a, c, g, or t
  misc_feature 1..23111: note = Synthetic
cttcgcgctccgcagggtaaccgtcccaggcatcaagattatagggaagaacggtatttatacgattcatctcatcctgagttacagaagaatcctctcgcaacatccgggccttaatcttggtcagttgatcaataagaccagcaacctcaggcgtacgatcgcccagatggggaattatttcaaatggaacgttcatcctgcccataaggacctgctgaccaagaacctgccaagtggcggttgaaccggcaagttttccccgaagccaagcaagctgatccggaccgagcagtgtccgttctggagaaccaatatctttacggaaacgctggccgtcaaaaccggtttccgggtcgaaataatttttgtaaccaagctgtttttcccgtccgctcaggcgggtatcgagcataaaaagttcaactaggtttccaaaagaaaaactgcggtatatccgttgaggatttttcccgtctacagaacgaactggcatccattcgtaataggcctgaagcgcaaccgtcttgcgtttatcaaaacttccttcactttcatcatgattctgggcaccgcctacgtaggcatcatttgcgatctcatgatcatcccagacggtgataaacggatgtgcggcgtgaagagcctggagctgggggtctgtcctgtatagagcataacgcctccggtaatcatcaagtgtcaggatttccttgtcactgtactgcggaagatccctgtcggcttcctttgaattaccagtgccggaatccggtgctctaccatactcgtaaatatagtcgccaaggtgaatgacggcatccacgtcagccgttttagccgcgtgaccgtagacattaaagtagccgccatgggaaatgggatagttggaacatgaaaacaccgccagcttaaccgagtttacatcgccctgtggcagggtcttggtacgaccgatagcggatgttaccttccccgagcggaaacgatagtagtaaacggttccggccgaaagacccttaacatcaattttgaccgtgtaatccctcttggccgtggcagtctgaacggaactataaacgaggctttcgaacttttcgtccgaagcgacttcaaccctgaccttggctcttttctgagatgtcagcggagtaactcttgtccagacaacaaccctgtcagccaaggggtctccgcttgcaataccatgatcaaaactcacacgccctgaaccgccgtataatgcaaaaccgatagcaaccagcaaaacggcaaagaaaaagaccgttaaggcgtaaaccagatgttttctggaaagcaaaattcaactcctccctgcgcagagcagttttacagttatacacccaaaatcaacaacaattcagagaaaaactctcagatgcaaaaagtgcttcgaaacgagccctccgaacgatgatctcctgcatctccggctctttgacaactaaggctttgcaattattatcttgacgtattaccagcggagcgaaaccccccatggatatggattttgaaaaactgaagttcaacgacgaaggtcttctgcccgtgatagtgcaggacagttcaagcggacagatccttatgctcgcatacgcgaacagggaagcccttgagatgactgtcaagacgggaaggacccacttctggagcaggtcaagaaaaaagatctggaacaagggcgaagaatcaggccattttcaggacgtaagggaaatcttcgtcgactgcgactgcgatacggtgctcataacggtgaagcagacaggggcagcctgtcacacgggaaaccccacatgtttttacagatcaggggagatgcaagaaaaagcggcccctacattcgaaaaagcatcccttaaaaaggtgttctccgtaatagaggacaggaaacaaaacccgaaggaaaaatcctacgtaagcagccttatgaaaggcgggctcgacaggatactaaagaaaatcggagaggaagccggcgaagtcgtaatagccgcaaaaaacagggataaagacgaactcgtatacgagcttactgacttgtggttccactccatggtgcttctctgcgaagcgggtctttcgcctcaggacatatcagatgaacttgagagaaggttcggcaagcgcaaagaagaatattctgggaacaattaaacgcgaccagacgcagaaacccggttaaaaaccaagaaatcgcgtgccgacggctagattcttttcttaggagagtcttttcggagtaggcctgttctttttaggcctgtccttctcttctatgtactccccgatatgagttctttttctcaccgaaggcggcaagtttgagagatcaggcttcggcatgtcggttgaaaggtccctggtaaaagcgaaagtcgagattactttttccaccttctttttctccccgcaatagcactttacgtttttttcatccccttcttcgtatataagttcggaaaacctgtagtttcgcatgttgaaaagggcaagcagggatccattcttaagatagtagtcgttgaatatggaatcttttccctttctcccgtgttttgcgactatttcttcgcgttcgaggtcgacaacctctatagcgtagatgttgtcatatttctcgacaaggcttttaacggtactcttgtcccgttttttctcaagagtctttagtgatttttcaacattgtctctgcacttaatgcattcaaattcatagagtggcatttgcgtctcctatctgttgaaatactggttaaggtgatcctgtcctacccagtcgcttgctatttcttcatccttttgctgcttgtattcaagatgccacctgagttcgtccccgggacctggagcccttttgctcttgtcgtcgaatatggccttgaaggtggaaaaaacccttctcacagatccgggatcgtcgcagagaggacatttgatttcatcctgatcgtcgtcatctccgtacacaaggtggtcgaaacgaaaattcttaagctcaagataaagcactttcccgttatcaagcttgtaacgaaaccgccttgcaccgcttatacccctttcccctagttcaaagaactgttttccattcttgtcgcttgttacttcgatgtaacagaagttgcggttctgcttgaaaactttcctcgcattagtcttggtaagcttagcgaccagattgtctatatccgtgttgtaactctccatacaactgtcgcattcatattcgtataacggcacgttatgcctccggaaaaacttttaatctcgagaattataaacaatataatctgagtttaaagcccgaaaacgctgaagcaggcgaaacactgctgaaagaaagccgattatggttcataatgttaggagaatgaaaaaagccggaaagccgaaaatgccccgcgggcgaaacggaaaaaactatctccccgcgagtaaaaatctggacttcgtcgccgttgacgtcgagaccgcgaattcaaacgtttcaagcatctgccaagtgggaatcgccgtggtcaggtcagggaaaatcaaagacatatggacgcaacttgttgatccgcatgacttttttgatccgtacaatatcgccatacacggcatagaccaaaagatggtaaatggctaccctcggttcgaagaactatgtgacaagatcgcgcgacacctaggagaaatcgtcgtaagccatacattctttgaccgcagggcaatctcaaaggcatttgaaaagtgtggaaaatctcttcgttacggaacctggattgacagtgcgcaggtagcgcgacgcgcctggccggataaatacgccctgaggggctacaacctcgggaatgttgcctgcgatcttgggatctgttttcgccatcacgatgccggagaagacgcaagagctgcagcggaaatcgttttgagggcatacactgatactgggtttggggtaaataaactgttggatttgggaaccacagtgaaaccccgtaagcccaggacaagaattaaatagaatttagccagataaacttgccgatgacgcgcggatttttggagaattccacacgcgcggactaaatcggttcgcctgattgactcaacaccctgccatattatggtgttatacttggtagcacgatgaaggcaatggttctaagaagcacatatgacctgcttgagaatcatactcctcttgagttgctggaaatccccactccgaaacctgccgaaggagaagtgctgatacgagttttggcatgcggggtctgtcataccgacatggatgaggtggaaggaagagtggcgcccgcgttctttccgattgttcctgggcaccaagtggtaggagtgattgaagaacccggcctgaggttcaatgcaggcgacatggtgggagttgcgtggataggaggagcctgcggagaatgcgaccactgcgggagcagacaggaaaacctctgtcatgacttcattgctaccggaaaggataaaaacggggggtttgccgagttcatggtcgcagacgcagaattcatttaccccatacccgcagaaatggacccggtgaaaactgcccctcttctatgcgccggagcgataggttaccgctgcgtgaaactttccggaataacagatggagacgccataggacttatgggattcggggcttcagctcatctggtgataaagctacttcgccacacataccccctacgcgaggtgttcgtattcgcaaggggggaaagagtaagacaatttgccatggatctcggatcattctggtctgggaaaattgaagagcgttccccaaagcaactttccgccatcatcgacaccacgccggcatggaagccgttctgcactcgcttgaaaatctcgtcgccggggggaaactggtcgtaaacgccataagcaaggaaaattccgatattgactctctgttgagccttgattatcagtcccacctctggcttgaaaaagagataaaaagcgtagcaaacgtcacaagagaggatgtcgcaggctttctctcggtcgcatccagcttgggaatagaggctgaagtcaccgagtatggacttgaagaggcaaacacggcgcttttagaaatcagaaggggaggaggcaaaggtgccaaggttctaaaaatagccgaccggtaactttttcaaaatacagagtgtccgatttcctccagttcattctcaagttcttcgctctcaagcgactcgaacggaagagacaaaaacgctctaacccgtttttccaataatccataggcctcggcgaaagcttctcgctgttctgcttcggttccctgaacgcccgcagggtcagcaagaccccagtgggccgtcacgtgcctgcccggcaacacagggcaaacctcattcgccgcattgtcacataccgtaaagacaaaatccatcgcaaggacacccaccgcctcaaactcgtcccaagacttggaacgcagattctccgtgtcatgcccccggcggagcagaagttcaagagcataagggtgaatttctccccgcggatgacttccagcgctgtagccgacaaaacgcccgtcactattatgattcaaaagagattcggcgatgaccgaacgggccgagttgcccgtgcagagaaacaaaaccctgtagattcgctcgcgtgatggcttcttttctttgataacccttcccattttaccggataaccactctgcgagtacgcctgacagtttaaaataaggtcattctcgacagataaactacttaaaagacattttgataacaaagattgataaagttcgttattaaagtatcttttacgccacaggcgcaaactgatgaatgtttctcttacaccaaaactggaagagttcatccgggaaaaagtttcctccgggctttacaacaacgcaagtgaagtagttcgcgaagcgttgcgactgttggtcaatcaggagaacacttcaactgataaatctatggcagcacaattaacaaaagtggaaatccacaaacagattctgtctctggaaaaaccgttgcgggacaaaggggtcaaatccattttcctgttcggttcggcaattcgaaacgaaaacacttcggcaagtgatatagatgtttttattgatactgaaccggaagttcccttcagcttacttgatttagttgaagtaaaacatttccttgaagataacttgagatgtgaagtggatgtaatgacgcgagagggacttcgtccgacaattaaacaaagcatacttgatgaatccgagcaagtgttctaaatgtcagaaagactaattccttacctaagcatctcttataaggaattgagagcgcaaaacacttccgctctgtggttagctaacgtttagacaccaagcctcggtaatatataatttctccatggacgaaaacaaagaaattctcgtaaagaccgcaggttccatctgcactcttacgatcaaccgccctgagaaaagaaactcccttaccccagaaattctaagacttttaaccaaggaatttctaaggctagaaaaaaccactgaaatcagatgtgttgttataagaggaagtggtgatagagctttctgctcaggatatgatatagccgcaatatccgaggaagaaatcgcgatagaaaacggccatcccctgaccgaagccatgcgggcggtcaagtcctaccctcttcccgtaatagcaatgataaacggtcatgctttcggggcgggacttgaacttgctgtaacttgcgacctaagagtatgcgccgacgacgcaaaactcgcgatccctcccgtaaaactgggagtcacttatcattacagaggaataaagcaattcctgaacttagtgggccccgggtttacaagggaactctttttgaccggaaaccccgttaatgccgaaagagctctagaaaaaggacttgtcgaccatgttgtaaaaagagacaagcttgaagagttcacttataggcttgccgagggaataagcgaaaacgccccgctttccatgatatctatgaaaaagatgataaacatctgggaacaaggggggccgctatcagaagaaaatgaagaactcataaggtcccttttcaccaaggtgagggaaagcagtgacgcccaagaagggaaaaaagcttttctgcagaaaagaaagcctattttcaagggaaaatagaagcttttaaaattcagtttccgtaaccaaactcctttatcaggaaatctttctgggtcaagttctccttaactttaacccagagttcaagaaacagtttgactcccagtatcctctcaatttcaactctggcctcagaaccgatctgcttgagcatcccccctcctttccctataagaattcccttgtggcttttcctctcaacgtagatttccgcgtttatcctaatgaggttcttctccgcatcctcgctgaaccccgagaccacaacggcgaccttatagggaatctcctttcgcgtgagattgaaaaccttctcccttataagttcgcttacgtaaaaaatctcgggctgatccgtgaagatatcatcgggaaaatatttcggcccttcgggcaagtgctttttgagaagctgcgtgagctcctccaccccgtcgcccgtaagagccgagatgggaactatttcgagaaacttctcggaaaacctctcggcagctgaaagtatcgacaggagctttgatttttttatcttgtcgatcttgttcacgacgaacaaggagggtttcctgagcatcttcagtatggactgatcagccgccccgaagggcttttccacgtccgtaacaaacgccaccagatcagcgtccgaaagagcaccgcttacagctcgggccatcgattttccgagcctgcttttttccctgtaaacgcccggtgtatcaagaaagaccagctgcgaatcatcaaaagtccttactcccagaattctgttcctggtagtactcggcttatccgaaacggccgaaactttttctccgacaatcgagtttacaagtgtggacttgcccacattgggccgcccgataacggagataaaccccgatctgaagtcctctgttaagtgctcatccggcatggaaaactatctctgtccagcaaacaattctgttattccagtataattcaccgcgaactttaacacaaaagcccgcgcaccggtaaaacagcaactggtccgggcaggcaataacatgactcgctacagggaatctatacgtccggttattcactggttcagaaaagacttaagactcacggacaacccggcactctcaagtgcggctgaatccggccatccggtgctgcccgtttacatatttgaaagtggcgattctgacccctgggcacccggcggcgccagcaagtggtggcttcaccacagcctcaaagcgctcgatcaatccttagaaactcttggaaacaggctcattctgcgtcgcggccgaccgcaggaagttctgctagagttggtaaccgagaccggcgccacggcggtatattgcaactcgctcacagaaccgcatgtgatcaaggtcgattcagaactagagcgtattcttaacaaactcggaaccggattcagggcacttgacgggattctgctttttccgcccgaatccattacgacaaaaaacggcaaaccctacaaggtgttcacacccttttataaagcctgcttgaaaaagcttccactgcccaacccccttcctacgctgagacggcttccacgcgtgaagcaacctatcaggagtgattcgcttaaagaatggaagcttttgccgacaaagtccgactggagttccggctggcttgatatgtggacgcccggggaatcgggagcccttgcgcgccttgattcattcttggaacagcaagtagcaggatacggaaccctgcgcaaccgacccgatatcctaggaacctccaagctctctcctcattttcatttcggcgaaatatctcctctgctatgctgtcatcgagctttatctcacgtaaatcccgaagcggaaaacgattttaaatcctttttccgccagattgtgtggcgggaattctctcaccacctgctttaccattgtcctaaatttcccgaaaaaccgtttcaggcggaattcaaacgctttgcgtgggtaagggacgaagaagcgcttcggcggtggcaaagcgggcttacgggctacccgatagttgacgcgggaatgcgtgaactctgggctacagggtggatgcataaccgggtacgcatgatcgtcgcctctttcctcgttaaacatctgctcattccatggcaagacggtgccaagtggttttgggatacattggttgacgccgatctcgcaaacaattcagtaagctggcagtgggtagccggctgtggggttgacgccgccccgttctttcgaatttttaaccccatacttcagggtcagaaatttgaccctgacggcacttatgtgcggcgctgggttcctgaacttgcgaacttacagaacaaacatatccacgagccgtgggcagctcctaaaaagatactagagaactcaggggtttctctcggaaatagctatccataccctatagtagaccacttggcggcccgaaatcgcgccttggaagtgttcagacagataagaaactaaaatagttttatcgttcctcactttctcacacgacaaaaatatctctgttcaagatatcagacacatctgaaaacaagcttgattccaaaactgctaatctcgtgaaaatacagaaaggtcaaaaaaaaaggccccgatgcgaggccttggttctccttagagattgcctacgaagcatttgcttcttgttatgaatagcaaattcgtggcacattcagtcagttataaactttgtgtgatatactatacggtcatagctaaaaaagcaaacaattcaaatcggaagatcaaaccatgagcacagaagaatctaaattgccgggatatgcgataggacttgatgtaggaacaaattcaatcggctggagcgtgataagagaaaaagatggagaacccgtggagtttattgactgcgggagccgcatatttatccgttctgtcgaaaacaagtcccctactccgaaaaacaggaaacgaagggagtcacgacttcaaagaaggcaagtacagcgccgcagcagacgtaaaagccgtctcaggaactacctgattctaaaaggttttctccctgaagtgctgaaaaacaatcccacccccgaagaagaactgaacagcttgggaaacccttacattataagagcgaaagccttggacgaagagctgactccccacgaattcggtcgggctattcttcatcttgggacacgaaggggttttctcagtaatcgcaaaacttcgttcggcgatctggatgatgatacaaacgctcgcgaaatacttgaaaaagaagatgatgatgaaggaaaagatagagaagaaggaaaacttaaagaggaaatcaaaaaactcagagaaaatataaacaaaggcggcgcgcgcaccttgggagaataccttgccggactttcgcgcaagcggaacaggggagattttcatgatcgtcacaccgaccgcaagatgtacaaggaagagttctcagaaatatggaaaaaacagtcaagctacaaccccaaactctacaatgagggaacaagaaatgaactcgaaaagatcatattctcccaaagaccgcttaaattaaaaccgaatcgcatggggcgctgttccctcgaacctaacctgccgcggacaaggcaaggacgtcttgaatttcaacgttttcgctactggcaagacataaaccacctctcatatcaagaccccgagaccggcgaaaccgaaatacaattatcaaaagagcagaaaaagaaactcgccgaagctctggaaacaaaaagagaactcacatgggcaagaatcaggaccctgttgggattaaaaaagaaaacgagcttcaatctccaaaaagtagaaggcaagaaaaaaggtttgaagggaaatcgtacggtccatgatataaccgaaattattggaggcaagtggaattcgcttaatgagtcagaacaatgtctgctcgttgaggacatcatctcctatacatctaaaaaagggctgaaaaaacgtcttgccaatcactggaatttctccgaagaagaggcgacaagactggccgttgtggagttagaagaagaccatgctaacctttcgctaaaagcaatcaaggagattcttcttcatctgaaagaaggacaaatatatagtgaggctataaaagccgccgggtacgagattactcagccgaaaagtgacaatcttgactctttatcatctcctccttgggttcctaatccaatagttcagaaagctctccatgaaattcgccgcgttgttaacgcaattatcaaaaagtacggaaagccttctgcgataagaatagaaatggcccgcgatctggaaatgaacacaaagagatataagcagtttctcgcaagacagagcgaaaacactaaagcaaacaaaagggcagaagaacactactgtataatccgcgaagagtacccacacttgaagctccggaaaaatataagctaccaagacaagctgaaataccggctatgggaggaaagcgggaaaaggtgtgcatatagcggaaaaagcatagggatgaccgagctctttactcatgcaacagagatcgatcacatacttccctacaagaggaccctagataattcatacatgaataaagttatctgtctttctcaagaaaacagggaaaaaagaaacaggactccctgggaagcgttcggtggtacacctagatgggatcaaatcctcatgatctcaaaaggcttccccacaccaaaaaggaaaagaattttaactgaaaaacttgatggcattgatgactttataaataatcagttaaacgacacacgttatatatcaagagaagcgggtaaataccttaaaagtttgggttgtgatatatcatttaccaaaggaggcgcaacaagttggttgcgtcaccagtggggacttaacagcctcctaggaggtagccaagaaaagaacagagatgatcatagacatcacgctattgacgcaacggtaattgcttttacaaaccgcagtctttatcagaaaataatccatctagttccagattctgaaaacagttcaatatcaccggaacatggaatggaagtccctccacagattccagaacttcgcaacgacttatccgagtgcttggacaacttgatagtatcacattctaccaatagaaagctgatcggagcgttccacgaggagacagcttacggaataagaaaaggagccaatggaaaacctggtgttgtagtccggaagatgcttgtggatatgactgacagagacaaagaaaaaattgtctgtccagtaatcaaaagagcagttgagttatacgtatgggagcgaggtggaaaaataaaagaagcaatgaaacagttacaggaaaaccccttattgcatccgaaaacgggagataaaatccggcgggcacgagtatgggcatcagaaacgctaaacagagattcctactggaaacatgtagctccttgggataaaaacaagaccttgcggatcttaccgtatggaaataatcaccacgtagaaataatcagaaatcgtaaaaacgaaaaatatgaatccagattcgtaactactatggaagctgcaaaaagagcaagaaagttaaagcaaccaattatacagacagaacacggagaggattgggagtacgtaacttatctctgtattaatgatacggtaagcatagaggaaaatggaaaaagaaatttttatcgggttcaaaaatttcaaccaaacgaaaagatattagttctaagacttcataacgctgcaacgctggaagacaataataaaaggaggctgagaactgttgcagtactaatgagagatttaaagatgaaaaaagaatcgatagatgtgctaggacatttatctctcccaaataaaagctgaatgaatgattaaacgcattattgacgtcagtaatccatcttaccttcatatgagggactaccaaatgatcgttgaacaaaagaaaaacgaagtagaaagagtcccaattgaagatatgggggttttgatattgtcaaatcctgcaataacaatctcctcaagcctcatatcatcttgtcagcagaacaattgcattattgtcttttgtgatagtaaacaccttccagtctccgttctcctaccactgtccggcaactctttgcatagcaaggttttaaacattcagacgagtgtaaagaagccaacgaaaaaacgcctgtggcaaaaaatagtagttgcaaaaatagagtctcaagcaaaagcattactctcttgcggtaaaaattcctccgcaattgaatcaatgaagtcacgcgtaaaaagcggtgacccagataatgttgagtctcaagcttcgagggtatattggccccttatgtttggaagagatttcagacgagaccagaaagctgaaggaactaattcattgttaaattatggttatgctttattgagagcatcggtcgctcgtgctctttgcggaacaggattacaccctgctttaggtatccaccaccataatcagtataacccgatgtgtttagcagatgatctcatggaacccttcagacctattgttgatagaagagtctacagactttgggaagaaaaaatgattgacattgacagaaaaacaaagtcgtttttattatcttttctagctgagcctttgatattcagagatagaaaactcccattcatggtagccttacaacacacagctacaagtttgaaaaaagccttatcagaaggaccagaaaatttagaaataccaagtcttgtaatcgaaaaacaacaggagatgtttttgatataagcatggttttcggaggatataaaaccttgtgggtaatagtgatgtttgatctgcccacagacacgaaggcagatagacgctcttatgcattatttcgcaagtcccttattcaagatggattttctatgcttcagttctccatctatattagacattgtgccagcgatgaaaatgcctatgtgcactcaggaagagttcgtaatgctttaccgcctaaaggagaagtcagaattattaatgttaccgacaagcagtttgaaagaatgcaggttttttatggaaaaaaacggaagaaaacagaaaaggctcccaagcaaatatctcttttttaatatgcttgggagcctaaaccgcatgccagcaaggcactttagcgtgaagcattttaactgactgaaaggcccccgctatccacaacgaagaggagcaagttacttcttttctttctgcagtacaagcagtttaagaatgtgaatcaggctaggaatatcttgttgtacagtattccacacttgttctaggtctatttggaaatagccatgcacaaggtggttccgcattcctacaatcttttgccacggaatttcagcatgtgctaatctggtttcttctgtaatatgagttgtcgcttcaccaataacctcaatagatttcagaatagcattctgatgcaaacgactctcctcaaactgatgaaacgtcagatcagacgcaaattcttccacatcttgagccgcatgcaacatgtcgagcaaataagcaacctcatcacgttgcatagaatacctcagcagattttagaatcgcttcgcgacggatataatttcggttcttttcaacagcggtacgagagagcaaatcagtctctctccccagaatgctgcttaactcctgctccatacttaccatactaaaaagagtgtgatgggcttctgggcgaaaacggaccattacatctatatcgctgtccggcccgaaatcatccctgaggacagaaccgaaaaatgccaattccgcaatctgccaccgctcgcaaaaatcaataatctgttctctcggcacttctatctgtaagctcattatctcacctgaaacagttcagtgttctccaaaattcataacgtcagaaaatcccgcctatggatctcacaagacccgcctgaagatgcggtttcgcctcttcgaagctgagattagccttgttggcaacgctcacaatcctggtcctgtaaattttccacttcacatcatcagcatgtgaagtctgcttggtccgcgtcgcggtaccctgtgacgcatcggtatcttcagtccgataaacaagttctccttcccgcacgcgctcgcttatttgaatatctgttaccatcgtgaaaagatcatcagtgacgagtgcatcaaaaagaaagcccgcaactccgcccgcaatagcgcccgcaacagtgcccttgttgatctcgtcaacgtccccgcctatggcacctcctatgactccccctataaccgctccctctatcacgccttcgtaaccagttccaagcatggcattcgcatcctcaaggtcagatcttccgacattcagaatgttagcctgaagaatgaaattcgcctcggctgggtcttccgtgagactgtaaccgttagaagctatcctgcccttnnnnnnnnnncttactcaattccggacagttccttgtccgtcgtattttttatgtcaacgtatacgactctcttctccggcgacaccggttcaagaaaaatcgtctccgacatcttggtctcaacggtgagtttcctcttctctataagggtcctggtagccgcgcagccgtttacaagaaaaacaaggcagacagccatggcaaaaaacaagttccttctacagacaaattcttttttcattaatgaaaactcctcgggatattattgccggagaaaaatttccgaccttccaaactaaaatcgtatgtaaaaaaaagaaaaaaacaagcagaagaaagtgtggaaaatccgaaccgcgcaggtgctttttctcagaaatacaaaacaaaagatcaccttacacatatcccttgaaaacggcgctagaaccttgccaacgcaaatcaatctagtatcattagccaatcttttcactgccgggagaaccgcgttttcatgcttgaacttatgggagagtgggaaagatcaaatttctgcggagagcttaccaaaaaacatatagacaaaacggtaactctaatgggttgggtccagtcccgaagagatcatggcggggtgattttcgttgacctgcgcgacagggagggactctgccagatcgtttttaatccggagcgtgatccaaagatccatcagaccgctgagcaactgcgggacgaatgggtcatagcggtaaaaggtaaagtaacaccgagaactgaggaaaccgtaaacccgaacctaaagaccggcgagattgaagtcatagcagagcatgtaagggttcttaacacttcgaaagtaataccgtttctaatagaaaacgaagtgagcgccgatgagcttctgaggcttaagtatcgttatcttgacctcagaagaccaccgatgcgggataacataatcttccgccacaaagtcgccaccgtggtgcgaaactaccttaacgaaaacgggtttctcgagatcgaaaccccttatttcactaaatcgactccggagggagcaagggattttctcgtcccgagtcgacttaacgaagggcagttctacgcgcttccccagtcacctcagatattgaaacagaccttaatgatttcgggctttgataagtactaccagatagtgaaatgcttcagggacgaggatctaagagcggaccgccagcccgaattcacccagatagacctagagatgtcgtttgtctcagaagacgacgtaatctccacggtcgaaggcatgataaaaacagtcctttgggaaacaaaaggaatcgaggtaagcactccttttatgagaatgccttacgaagaagccatggagagatacggaaccgactgtcccgatacgaggttcggacttgaactaaaagatatctcctccatattcgagaactcgcaattcaaggtgtttcgcggagcgttggaaaaaggtggagcgataaaggcgcttaacttaaagggaggggccgagaaactcaccagaaaggaaatagacgatcttaccgaatacgcgatttctctcggagcaaaagggcttgcctggataagggtcggcgaggacggatggaactctcccatagtcaagttcctaagcgaagaggaatgcgagcttttagccgaagccctttcaatggaaaaaggagacatagtgtttttcggtgcggactccgttgagatggtaaaccaggtaatgtcaaacgtaaggctcagccttggccgaactctttctcttgttgacgaagaaaaactcgaatttctctgggtggtcgatttcccgcttcttaagtacagtcccaaggaaaaaagatacgtagccgttcaccacccctttaccgcccccaaggacgaagacatggaaaaaattggaagttccccgggtgaggcggtttcaaaatcctatgacatagtcctaaacggagtggagataggcgggggaagcataagaatccacagaaaagacatacagcaaaaagtgtttgaagtaataggagtagtagaggatgaggcacgggaaaagtttggttttcttctcgaagcccttgaattcggagcccctccccacggagggatagcgctcggtcttgacaggcttttgatgcttctctccggcgaagaatcgataagagacgtaatagctttcccaaaaacacagaaaggatcctgccccctgacagaagcaccttctgaagtttctcccgagcaacttcttgaagcgggaataagctccatagccaaaaagccagaagactgactttcaaataagaaccgtacattcggaatatgcagaacccgtgatttttttattgacgagggcaactgaccgttaagatacggtctaacacgggaaaaacttcttgaatatgaaatcaaacaaatctgccaagagcgcgaacccgcttcatacgcagttagagtcgttattgcttcattttttcaaggtctcataaatcgttgtttgctttatatttttttatgctatgattctttgcggttaccgttcagagcaggcggagttgtcaatagcggagatcagggctttcagtcagttaaaattctctattgcgtgattccgaggaaggtgcatggacatctggaaaaactttcacgggctcaattcaggttacgtaatggatctctacgaacgttacgtaagagactcttcttcagtcgaccccgcgacaaaaaccatctttaaggattggaaacccgacaccaaatactcgtccctcagagttgaaatagaacctgaaatcgagaaaaacggcttcaagcaatcatccgtaagagacgtaaacaaggccgttgcgatcgcaaacatggcccaggcgataagacgacacggccacctggcaagcaagatagatccactcgggggccctgttcacggagacctcaccctgcacgccgaaacgttcgggcttgacgaggaagagctaagagactttccctcgacccttgtaggatggcctctttcgcagaactcacttgacgcgctcgacggaataagaaggctgaggaaaatctattcatccacgacaggatacaactacgaccatatctatgaagccgaagagagaagatggatgaggggcgcaatagagtcgggtgtttaccgtcctcccctaaatcccgtgaacgaaggggagatcctagataccctcactaaagtggaagtatttgaaaacttcctccacaggatctttcccggaaaattcaggttctcgatagaaggcgtcgacatgctggtgccgatgctgaatgaactcatacatctcgccatcaaagccgacatacaccagataatcctcggaatggcccatcgcggacggctgaacgtaatgcatcacgtgatggagaaaaactacaagtacacgctacttaagttcaaggaccctgtcctggtaagagactttgccgacgacatgggatggacgggggacgtgaagtaccacgaggccgtaaaacgcgatatcccgacgggagacatgctcgaccgcaacatgaggataaccatggtccccaatcccagccacttggaatcggtaaatcctgtagtgcagggaatgtcgagggcatgcgggataagtgacgatacgccgggttctccgcaatttgacccgtcggcggtaatcccggtacagattcacggagattcggcattcatgggacagggaataaacgcggaaacgcttaatctctccgctctttcgggctaccacaccggcgggacgatacacataatcaccaacaaccagctcggctacactactcttccctccgacagcagaagcacgctttacgcaagcgatcttgccaagggatttgaaataccgattgtccacgtaaatgcggatgacccggttgcctgcatagagtcaatacgcctagccttcggatacacatccagattcgaaaaacacttccttatagacctcgtcggctacagaaggtacggacacaacgaggcagacgaaccgggattcacccagcccatgatatacaagaagatagatgctcatcccagggtgatgaacatttgggcgaaaaaactgatagaaaaaggcaccgtctccgaaaaccaagtagagcagctccagcaaaaacatatggagaagatttccgaggaattcgaatcgatctcccctgacgactcccccgaggaatcaacggcaccttccccggaacgggggatagcgaaaaaaacggttaccaaggttccagacgaaaccctccgcgaactaaacgactcccttctctcggttcccgaagggttcaccgtaaattcgaaaatcgccagaatacgggacagaagaaaaaacgttctcgacgacccgaacgaaaagacaatcgactgggccatggcggaagaacttgcctacgcctccatagtcgcacaaggcattcccatcaggataaccggacaggactccgagagagggactttcagccatcgccacgcggtgctccacgaccccgagaacggcgcgatccatattcccctgcaggggattccccaagcgaaagcggcgttcgagataaaaaacagcccgctcagcgaaaacgcctgcctgggttttgagtacggatactgcatcgagagaacgaactgccttgtcatatgggaagctcagtacggagacttcataaacggggcacagaccatagtggatgaatatctcgtatcggcaagggcgaaatgggggcagaccccatctctggttctcctgcttccccacgcctacgagggacaggggcccgaccactcgagcggaaggcttgaaagatttctcatgtcagccgctgaatataatataaggatagtaaactgctccacgtcggcgcagtttttccacgtgcttcgtcgccaggccctgctgcttgaaaaagatccccttcccctgatcgtgatgacgcccaagggacttcttcgaagcccgatgataaactcgtctctcaaggatctgtccgaggggaaatggctcccggtaattgacgaccccatgggcacccgacaggccaaaaaagtaagaaggctcatattctgcagcggcaaagtatacattgacctcatctcaagcgacctcagaaccaaatcgcccgatgtagcaatagccagaatcgagcagctttacccaagacccaaggaagaggtaagcgccatcttggagaggtatggtaaacttgaggaggttgtctgggtgcaggaagaaccccagaatgcgggagcctggaaatacatgctgccttttttcagaagaaaaatcatcaagaagcggtttccgctcagttatataggaagaaaacgttactcaagcccttccgaaggactttcctccatgcacaaatacaatcagggcctgctcataaaacaggcgttcagcatagatgaagtagtggaaggaaacgaggaaagcggtataacctggcacagggatatctgaaacaaacgcgcaagcgaggaagaaaatggccaaaaacatcgtcgttccccacttgggggattccgtaatagaagcaacaataatcaagtggaccaagcgacagggagacacggtaaaactcggagaaaccgtggttgagcttgaaaccgagaaggccaacttcgaagtcgctgccgaaacaacgggtattctggcatcaatagcgaaaaaagccgatgaggatgtcgaagtgggagacatcctgggaaccatcgaggtatccgcaggcaaacaggatataaaagacgatacggaagagcccgccaagggaactgaggctgcacccgaggcgccagccgaagaagttccacaggaaaagcaacggggagaagaaccgcagacccgcgtgactcccgtcgcgaggaatatcgccgagcaaaaccaagttgacctctcccaggtcgtacccgagggaaacagaatcacgaaagaagacgtggaaaaacaccttgagtcacagaaaaccaaagaggaaatcccgcaagaggctccatcggaggaaaaaactcccgaaacccctgtgtcacccgagcttttcccatccctatcccagctaaccgctaacagggaaagaaggatgaagatgtcgagacgtcgcaggactatcgcaagacgtcttgttgaggctcagcagacggccgccatactctccactttcaacgaaatcgacatgtcaaacgtaatggagcttcgctcgagaaaaaaagatgacttcaaggaaaggtacggtgtgaacctcggtttttcctcctttttcataaaagcctctatcggagcgctgaaactgtttccggagataaacgccgagattcaggacgatgaaatagtttacaaggactactacgacatcggaatagccgtaggggccgagggagggcttgtcgttcccgtcataagggaagctgacagaaaaaccttcgcgcagatagaaaaagaggtcagggaacttgccgagaaggcaaatgcgaatacactctcacttgatgaaattttcggcgggaccttcaccataacaaacggcggggtgtacggttcccttatgagtactcctatactgaacccaccacaggtcgcgatactgggacttcacaagatagaagagagacccgtagcagttaacggggacatagtgataaagccaatgatgtacacagcactcagttacgaccacaggatagttgacggaaaggaagctgtgcagtttctcgtaagagtaaaagaacttatcgaagatcccgaaactcttcttatcgaaggttaaaaccgcggataactccacggaaaaataacccagatctgtttggcgaaaacttctgatccatgccaagttcaaggacagggaataacaacgctgttcatggtaaagtgggagttatgataaggaggtacttttcatgttaacgggcacaagattaccaagtcgtttcggtcggactgcggtggtggtttttctcctgctctgcatcacaagccaaccatcaaacgcaactgagggtttttatgtggggggagcaatcggaggagagtacgccgatgtggattttaaaaaatcggtgggtcgtatccttcctgatactccagtcgcattcgcctcgtcagagagtgatgcgcaggactgggtaggctcattcaaagttgtcttgggacatcgctggaatctgtctgaaagaacatatctttcgggagaagttgacgcggcgctgagactcgacgattccataacgggttttcttgagggcgtcatagacactcagaatcctgacggcaacgtgttcccgggaaactggtatcttgacaagaatcacagcgtgggctttaacgccaaactcggatattcacccgaagaaatcagttttctgggtgagggaggttccgtctacgtgatcgcgggaatacagtgg

SEQ ID NO: 347 - DNA, 15303 bp, synthetic construct
  misc_feature 1..15303: note = Synthetic
  source 1..15303: mol_type = other DNA
gataacttatgtcaagtccggattgctcgcaggtgtagtttgtattgttctgcgggttatacggatgcaactcccaattcttcattgaataatcgaacctgtcccaaacctcaatctgcacgatgattcccatctcataagtcagttgcaacattgttttgaaacgccgccaatattcattgttccattgattaaggtcgtatttgccgttttctaactttttgaacggataaacttcaaatccgaaatctggtcggtcactcattgtgtttctgatataatttgcgccgcaatttttcatttcctgaaggtgttgctttaaatccggtatttgaaacaaattgtcatctttactgcccccgagcaaaagaataggtttccccatgtattgccagtaacgtgggtttgctttatatggtcgaatcctgttttcgttgttcacttgcggggattgcgcgaacacggatttaatacaacaaagtgatatcatcattgcacagaaaactcgaactaaacctgatgattctgacagttcatgtatctttttcataaatatgaaatcgctgtagtattgacgtaaccctgatgaaaagtattctgctgattttaagaatcttcaaaaatcgttataacctgaatgtgactcaggcattcttgcctgtgactttgccattactgaatattgcaatcggagtcaacctaacaaaaacttgccaatctaattggcgcgattttttgcgcttagtcaattaattggaggaacggcttacacgccgtccggaaatgggttggggtggagcccgaccctccaattcgatggattcatttatatgctctgctttatactaaaaatcacaggcattagcgtgtgacctcgattacaaaccatggagttgtaagctgcccgagcgcaagcgtccagccttctgcggtttgctttaacgggagcggttgaccgagtggtctgcctgcgccgtcaagtggttgcgcaaaaacagcgcgcgctggtttcagtccccagagcgtaaccgtcccgataacaggttctatccgcgatggcgcagtgccccacttttccaacgttgtgcgtttctcgtcccagaccattccggtattagctacgcgcgcaccagcggtcagcaacaaacgcccggctgactcaattggactgttgtcgagtgtactaagggtaaccgcgcaaaactgcgtttgcggctcaaactgcagatttttcgtgcgtccgccaccacgtccgacaatcgcctgcgaagcaggggtatcaatcacgaccagccctttgcgccatttcagttcccctgtgtcggatatatattcctcacctgcgattggctcgaacttggccgtcggaggtccatcgaaagaggcgacacgaacagagtgaatcagcgccaacgcaagcgggaatccgggcgtgaaatacggcatttcactatatggcatgcgaaggctttcgatgacttgctcgtggctgtatgtacgtgtaacagtgcgttgagcggcgtggacatctccccgcagaaacatcagcgctcccgcagcaagctggctgagttttaccgggtcttttgcaaaatcaaagtgcgccagagccacgttttgcatagtcgtcacatcctgatgagccagtgtgtaccagaagacaccgtcccaatcctgcaatgcggcgtaggctgccagaatcgggataccttcttcagcgttttcatgagggaacggatggtttacctctgaaacaataaacggtttgccgacaattggtgtgcgtgagagttggaccacggtcgagtgcaaaggatcatctaccatcggggtattggaaatcctgaacccgatgtgtttgcctgttttcggatcgcttatataactgggatgttgccagtaaacgtgcccgtctagaacatccagttgcgccagtgagattactgacgggtaaaacgactgcccatgaccatggtcgctgttcccgacaagcagcgcctttacgccaagctcctcgcgtagaaaccgcgccatctcgcggaagtagtcgcgctcgatttgcatataaaactccaattccagcgcgaaccgctttgggttcgcctttggaatatcctgctttcgcagccgctggatttttccctgacccgcagctttttcagcagcaattatttcatccagaccatcaatccgttgtttcgacaaccagacattaaatttttctgtaagcgcttctgcataactgggcgggatatcgtgccatgtgccgcctggtttgttcgtttgcgtgccgtcaagccgtccatttatccatgcctctatcaaagagttttcgtttacgaattcaacgattgcaacagcgggttcatctgcataggcgcgtcctgtgtacgggttgacgtgtgtcaacaactgacgtgcatactccttctgaagttcaatgagccgctcgtcgaaataggttgcccctttgccgatcccaagtagctcgtaatcgcggacgtcgtcgccgggtttataggtgcgatagacattgaggttaaggtcagagtaaatgccccgttttttgagttcgaagatgaagcggtcaagacgcgcgagcgcgtcggggtttagcgcgcgtgtatcgttgcgtttggggtcaatcaaaacgccggttctatccagaaagtgaaacctcacgcaattaattccaagtgcagcgagtcgcgcagcaataattggcgctgcattggtagaaggcacgcctgcttcagccgttacattaattccccagatgcggaaccgcgagccatcgctgcgcgccagatgcccgtcctttacgataatccgctcgtttgccggctttagcagaaatgaaacatcggcaggcgagcgttcggcactgtcccatgggactgtgaacacttgccaggtatcgtcggcgtgcgcaatgcccgacaaaagcatgagcaacagaaaagacttcattttgcaacagtgagattgcgtagcggttctttgcgaacctgaaactacggcaattattttgcagaaccagtttaataactgtgatctggttttcaggtgaattttagtcatagttactccgttcgtaattgggttgataagtaaaacttgttttcgactatcccgccgctgctgccaaaagcggttcgtgaacaagctgggttctcagggagaatgaattccacccggaaattcacttgagttgttttgactataattggaaatcggctcattgtttaaagcatgatacgcttttttaacagcttcaagatttttgtaaagcgttgttaaaggggggtgattcaaccgactttattcgctcgcacaggttttttgccaaagattcaaaatatcctcggtttaagcaaatgaactacctggtcatggtttagtcgtaacttcgtttttactggtgaattacaagctggtaataagactcagcgtagctgctctgcttggcgattcgaacaattcgacaaatgcaatgtaacaagctggatctcgaagaaatttaaagcctggttttcaagcaaattggctgaaacaattatggtgtgttgacgagtaacgaagtaaaagattatttcaggggcattcgacgtttgcaagcgaagtagcagaataaattaaaacaatcgccacaatgatataaatgcctgccgtgcccctctatgtccgtgctttaacgctttggatcagagttcgttttatttttaccaagcggtctttggctcagctcgatgtctctctccaccgcaggcgtaagagatttccatgaaaaaggttcttttgagttcgatggaaccggcaatcggttgaatttttcgccaagttcggcaagtcgcttccaatgaatcaatgccctttcgagggcagagattgcgatcgcctgttggtgcgtatcgttttttgcgcgcgcggtggcgagtgccacgccggcgcgtaatttctcggcgaaatagttcccgtaagcgacccaggcttcgatgtccgtcagctcgcattcaagtgtaggtggcagtttggttctggtgcggatagcggcaactttttgcaaagctgctgagcaatcgcgatcgagctcgtctgccagcgcaagaggtgaaagcttaccaggctcggaattgccgcctgcctttacgaagtcttcaatgttgacatacctatttgtgtccagaacaggatgttttatgaacgagtcgatgtcgaaaaaagtacgcgctccgttatcactatcaatccaggacgaaaagccctcagtataaagcgagccatcccacgtgccccggtggaacgatgcaaagtggagtggcactttgctggcaagcttccatgcctgcaacaggtcaccgccaggccctgcgccgaaacgttcttccaacaatgcggtgaagaaacggtcgggcgttgtggcatcgtaaagcagacgcccccacacggagtagaagagccattgccgctcgaaagcccagcgccaggttttatgtggaccttcctttgtgatataatcgagcgccggaatataacactccgagccgattatagcgccggccacgtagtccttgctctggttccgcacaaaagcacgcacgaagtccggctgaccccatcgcaggatgaacatgtcctcgttacgcatagtccagacaattttgtaacgtgtcggcggcggattccagtaaacatcagaaagttttccaccatgtacgatgaacaggtcgggcgaggaatgcgcgtgagaccagttgtgtttgaactcgacatagaccggtccggcgatattatttgagagcaattcaatttgcgcgcgtgtgcgtaggtcattttcttcgctggttgacccgccggaaccggtgtttgctgagaggggtgcgcggtagatgaacttcgctgggcgtttggcttcggcaatccccgcaaagaaggttttagccaaccactcgcgcctctgatctggtgtcattcctcccattcgttcacctaaagtgatgccaagtcctgttagatcagggtattcatcaagcacttgagttacaacttctcgggtgtatcgaattactagttcatttgtctcggactctttaccgaagtgactccatgtaacgctccagggcgcgacattgtgcgcgcgggaaaactccggtgatacgaagatattccagttgatcagataggtttcaatgccgcgttcttttgccatcgcgaagatgccgttccatagttttttccaatcagccagctctgcatcgttgaacggacatgcttcaggaaagtttctcggtcggatcatatagtgaaaaggatgaaggctccagagtgtgagcacgttgaagcggttttctgccatcatatcgaggaacgcctcccagaatttgaggtccttgcaggtggcctggtgctgttcgagggcaaggcttgtacggtaggcagcccacggaaggttaaacttgattgcgcggaactcaaactgcggttttactttgcgttcttcaatcttgtcccatggtgtaccaaagcggatttgttctgccacatccagcaaaccgtacatcgctcctcgctctccgccaccggtgattgttattttattacgctggcgggaaatattaaatccatcgggccctgcatttcctgctgcgacaggatcaatggtaacattcagcattgcatcctgacccgagtcggaacttgataaatgtcgcagcgtgtagcctctttggagaagctttgactcaagtattccaagcgcgtagcggagcaaaggtgagtcgggcgcgacaatggttacctcggcagctaaaagggaattcccgccagccagcagcaacatccagattatggtgagactttggagcagctttttcatcaggagtattctgaatgatgatttatgaaaaataaagaattaactgagtcccgacctgcaggacacacaactcctcttctttaagatgtaaacaaaaggataccctctggttacatcctaccaaacctgtcaacaaactaaatatcctttaacaatgaatttgtttcattttccaatcgctttatttcttcctcaattttctcaagttttcctggatgctcatatttatagaagtagctcgtgaatgggatttcgtagccgacaataccgacattgccatcttttccattgcgaactgtttcctcaatccacgcatccggggcatgaggttttacctctctttcaaaatattcgtaaataacctgtcctaatggcacacgctcaaaatcctttgctggatcttcaagaagctttttaaaggcgaatgaagaaattttttaaaaattatagccggtagccctgtacaaaattattagggcctccgttttaaccttacccgtaagttcattatatttttcaatcatttcttgtttactcggttcaaggacagcatcaagatgttttagaaccgtcaaaggacgaataacatcttgatatttataagcctttcaatctcatcgctcgcagaagggccagatagatagagtttccgtttttttatttttctgatggaaggcacaatagtacgcacagcaagcctcaaaatgtagaataagacaaacggacactgcaaaaaacctgatgtttttatagttaaaaattttcgcagataagtcaggttatttgattcgtttaaagagaatttcgcgctcgattaattgcgggatattactttgtttttcataggaatatggtacagcaagatcgggtatcgcggcaatcaacctgtactcgctttcactaattttatggtatctgaattcctttccatcgaagagtgagacggggatgaccgacaggtaatcaggcgtcagtttcgagaggtcttcaggcaaattgcctttagcgagtctgtatcgttcaattgcgcaggcaatgttgcaaagttctgcagccgtttgcgatacgccaactctgtaaagggtcctgtccattggtattgcaagaaatccggctaaaatactataaggcgaccttttaatttttgcggatagtttttcataatatgcagacattggcgagctccgcctgtccctgataatgttatcgaggatctgttttctttcttcaataaaattacagtgggttaccgcattctggtaaaaccagcctttcggtataaaccagaatggcgtaaagattttagaattagatgaatcgtcgtagctcgggttaaaatacttattaaaatactctatgtcctgaattgtcattatcatctctgcgccgaacgcctgttctgtctctaaactgcggcgcaaatcttttaacaaattaatgccggataaaatattctgaaacccggcaatctgctgttctgtccatatccctcttgccataccttcgcagatattttgcagggaaatattcagaacttttacccgaaccagctgagatataataaaaggttcgtccttgagtaattcagcaagccgaagcccgagtctgacatcttcgaacgccgcatctcctttgtttaactccataaaacaaaccgcccggaattgaattgtctggcatatttttttgaaaaatgaaagatacggcaaaggtattgctgcaggatctttgccatcataaaaaaacgggaacctgaaaaattctctctgttttgatgcggtaagaatctcgtccagatacggactgagtccgctcattgcatttaggacgcattcagcatcattagtaacagtaccgcagtttttataattacattttctgagagcctctgccgcagctttgatgttaacggaatttgtatcgaagataaaaattgggatcttgaaatctttttttctattatattcgagtttaaggataaactcgttatattcggaatcaaattttgtcaattcgttgactgcatttgtattgtcttttttgcctttgccatacacatcggcgatcaatttaaaaatgccactcattgcgaggttcttatcgtccgggacaggggattgaagataatgtttaacttcaagcaccacatccttgtgttctttcttccatttttcaaacgcccatttgcctcgaacattctctacaatgtggaggattatcaaaagcaggatgagtatgccgagaccgatggtgaccacattaaagattttcttaaacggtatggctaaattgatattaatctttttcttccagatgctttcattattctgattttccatacatttaccctttcggtaaaaaattttcttccataaaacactcttgttttaacaggagcacgcgcttttaataacttatttaagcatttgtcgtgccatggcccttaacttgttttaacaggaccacgcgtttttaaaggtttatgaaaaattgttatttgactattgaaattaaggaaagactttttgtaagaaagtgaaaacaaaaattgcaagaattcctatgcgtattcagagttagtatcccgtcgcgagattattttagcatcgttagaaacgctggcgtttggcgagtttatcctgaaatcacagcagctcacccatccggaatacctggacggcaacccggtaaaaccggtgagcaggtctcaataatcggcatcggcggatgggatgcaggggatgtaaaagacagtaaagaggccatcggaattatgcttgagccgattgaccaatgggtgaacttttttgataactcctgggagtatcacgatgtgagaagcgaagagattatgggcgaggcgctttcttccgtcggtggacgcgacaaagtatttctttcgacaaaggtatgcgcccgcgactacaaaggcgcgcttttacaacttgaacaaagtctgcacaggttaaagaacgaccacattgacctatggcaatttcacggtatcaaatgggatgacgaccctgatttaatctttgacccggacaacggcgctcttaaatccgcttttgaagcaaaaaaactggcaaaatccgatacaccggatttacccgacacaaagacccgaagtatcaccgtgcaatgttaaaaaggcctttcgaataggacactgttcagataccgctgaaagtgctggacgcgtatttcgcaagtttcaaaaacaatgttttgcgcgggtgtgtgaatcggaaaaatcggggttatcggaatgaaggcgcttgccgcgcaaaacggaatcattgtcagaaacctcagaataagcgccgaacttgcccgaagatattgccgctgaaagaatggcaacaattaaaaatccacgcatgatatgaggtatttcggtaatcatgaaaatcagatatatgaagtcgctctttttcatacctgaattcccggcatattccggcaaaggaattttcattggattttcctgataatacacccataaaaacgcgccaaccagaagaaagataagaaacagaggagatataaacaccgcgcttaaaatcgggcctttcttcttacgctgacatttctgcaaataagcacacgctggacggttaattgttcagccacatgcgaggacatggccataactgtcccgccgataagccccacccagatgtcgaacttgcttccgagaatcgcttttcaaaatgcgcagcccacgtcatttgcaaggacgtccagatgcgtgttcggtcagtgatgtttaccccctgctgccgtttttgcaatcacagcactcagtccgccatccatcatggatggcgtacagacagtgtaaaaatggcgccaaagagaaagagcgcaaattgaatggcgtctgcgaatttataattattttttaaaccacagagaaacacagagtctctctgtgttctgtggtgaaaacatctaaaccacgaaaacgcacagaaaaagcaaaggccaccagcagggcgctggtggtcttttaaaataacgctttacattgtcaccggcgtatctgccttgcagatagaggctcggcgtgcgttattaactttgtcttgattccacaaacaaagtaatatcaaaatttagcatatgcaagaggaaattttaaatgccagcgaagtatctaaaaatctcgaagtatcctttgacgtgggacattcctcaatcggctgggcggtcttaaaatcgctggataaaaacgtgcagaataacccggagtttccgcaaattgaacttctgggttgcggtgtggtaacttttgagtccgacacatgtcttgctaaaaagcgccgcgattaccgccgccagagacgccacatccgaagcaccaaaatgagaataaaaagaatgaaacaatttctggaacacctcaaagtcctcacggcttcggaattggaaaagcccggttctccatacccatggaaactcgcggcaagcgtccttcagggaaagcgcctgctcaactggaacgaaatctgggacatcctgcggtggtatgcacataatcgcggctacgatgaaaacagacactggagcgaggtggcagaaaaagacaaagatgataccgaaagtgttaaaaaatctattgagctgatgaaagagcatcagacaaaaacaatggcagagacaatttgcaaagaattagggactgatccatcagaatctgataaacgcgcatcacacaaatcatataaagaaatcggtgctgctttcccgcgcagtgttgtcgttaacgaagtcagggaaattttagaaaagcatattgggaaattgccagggttatctcaggaacttgtcgaaacacttgtaggagaatcaaaagatgcatggaaaacattaccatgtccttcaataaaccttccctctcactattgggggagtctattatgtggccaactcttgccccgatttaataacagaaatatcaaaaaatgcccattctctggtgatactttgcccctgaaagaatgcgttgagttctaccgttacaggtggggaaagattttaacaaacatccgcgtttccgctgacggattatttggacaaaaacgtcctctcaacccagacgaaagaaaatacgtggattcaaaaatgcaggaactcggtagtatgacaaaaaccgaattgcgaaaagcagtcgaagaggcagtactgatgacacttaataaagaaggcgtcccgcaacctgtcaaaattaatacaaatctcgaaacaatgtttcttacatctgaaatggaagggggacttgttttagaccctgttaaaaaacttatcaattcagatacggttcaatccttttggggagttttgccgccacaactgcaaaagaggttagcagggaaatggagaaggggaaaacaaatcacgatcggtgaaatccaaaaagaactcgaaaaaatcgcccctgaaaaagtggaagagttcaatttagctattaaaagcaacattaaaaggaaaaaaaagaccgagaaccgtctcaatgataaaattccggaatctccgttaaaaatgctgaaaggccgagcaccttatggacggaaacttctccagcagacctatgaggaagtgcttgcaggcagagaccctcacgaaaaggacggatgtctgtatcgcgccgaaaatattctaaaagaggaaattcgggaagctattgataaacagacaaataatcatcttattcgtcaccggcttcttattctggaacgactgtttgacgatattgtcagggaatacgcggacaacgacaaaaataaaatcaaattgattacaatagaagttaaccgcgacttgcgcgagttttcaggaatgacagcaaaagaaatagaatcagaactcaatgcgaggtctgctgactttaaaaaagccaaagaacagctggaagacatgctgcaggaggctgggctgtcaaataccagaatcacagccacgcttattaaaaaagcgcggattgctcaggatcttgactttacttgtccgtacacaggggcgaaatacgaattaatcgaccttataaataaacaggtagatttagaacatataataccaaaatcaaaacgtccctctgattcaatggaatcattggtcataacatttaaggaagtaaatagatggaaaggcaatcgcactgcattacggttcataaaagaagaacaaaacaaacccgtcccgggaaaagaaaacctgatgattctaacagaaagaagatttcaggaacttgttaatggacttaatacaaaaggacatcccaaggataccgaacgtaaaaagaagcgcaaagaactcttgttgatggaagattatgtagaggaagaattcctgccgcgtgatttaacgcagacgtctcagttagtaagactcgcagtgcaggttttaatgaaaaaatacattgatgaaaaagagaaacctgtatttgtaagtatgcccggttctatcacaggaaagttccgtgctgggtggaatttactgggctgtttgttgaaggctgttccatgggcagcagatggggataatcaggttaaaccaaaagacgaattgagaaatattacacatctgcaccacgcaatcgacgcgtgcgtgcttgctcttgcagcgcatttcatccctacttacaaaaacggtaaagtctgggaacttatgattaaaggcacggttaaaccatctgaaaagagctatatcgaagatgttcccatgttgcaattagattcagaaaaccggctccacataaaagatttgcccgattcaataaaagagcagattacagaacggctatgcgagcggcgtgttgtacaacacatcccaaaagatatgagcggagttaaatgcgacgagacagtctatcgggtcgttgatccaaatgacaatcatccctacgcaaaaaaacttatccgctgggctaaagagaataatatccaaataccatcaaccaatgatgatactgtgctgattgtagcaaaaaaacgccgaggagcagacggcgcaacaggctctaaaatattacataaaggggataaatatgtgtggctatatgacattgttaaaaaagataagttacttggtatagatcctaaaaaaggtaatggaaaacttaaaagacttaaagccgctaaattaatcagtgaaaattacggtattgcgcttgacccaaaacctcaaatgataaggcatttcaaagttcatcaaactatacaggataaaaaactcaaaagaattcttagaaagggaagtattataaatgtaccaaaaggaacgtataaaggtgtatggaaaatattctctataaaggataataagaatggtctcgcaattgatattggtttaccagatgtaataaggcctgcaaataaaacaaattattcttattctaaaataaacgcttctctaaaaaccattattaacggcggagttcagattattaatatgccatatactggagtaaatgtcgcattatataattaatattgacgcgccacagtgttcaataagttgtaaggacgggcaactgatttacaaaactcaggatgattatcgcagtcttccgctggaagacgttgcagcaataattatcacgagtttctccgccaacttacacagcaatttaataatcgaagtggctaaatatggaattgcttttgtaatttacaaggcattcaagccggtaagcctttttgtcccggcaaaccgttcaacagatacaattctgacccgcgcccagatcactataccggataaattaagaaccagactctggcgcaaaacaatagacgcaaaatgcgcaaaccaactttccctttgcgaaaaacttgcaccggggcatgaaaaactagaactcctgcgggaatctatccttcttaaaaatcccaaggaagccacctgcgcaaagatttactggaaaataatctcttcggtaataaacgaagaaaattttaaaagacaccgttcggtcggcagtttcaacaacctgttaaactacggctatgctgtgttgctatccaccgtattgcaaaaactctttgcgcttggattagacccgacattcggaatctcgcatctgccgcgtgaacgctgcaccccgcttgcctacgatttaatggaacctttcagaccctgcgtagatttgcgggttgttcaatgggttaaaaataaccctggcgaaaataaatacgaagtaaacaaagaattccgcaaatgggttacaggttttgtaatagaaaaagtaggatatttttcgcttaatctcgaaatacaaggttgcgttgaatgtatgataagaggatttcgtcgcgctttaatcgagagacaatcgaagtattacagaccctggtgctcagataaaaactcaataccggatctggatgatacatccgggtagaaaatataagcggaaaatggaaccggagaaatttaaaatgggatggctactcgttgcgtttgacctgcctgtccttaccaaagagcaaagaaaggcagcgacagattttaggaaatttcttaaagacgatggttatctgatgattcaattaagtgtgtacgcgcggtcatgcgtatcttttgcaagacaacagacccaccttgaaaggctaaaaaaacgtatcccgccagaaggcgctgtccgtgcaatttttatcacaaaagcacaatgggaacgctcgttcgtaatctacggaaaaccggtgcaagaagttgccccggagaaaattcctgaacagcttcaattttggtaaaagcttgcccctgaacgtgttaggctttgccattttacatcactcgaaaatggaatcaaggcaaagcaaaacttcagattttttgtaagtcgttgtgattttacatcactcgaaaatggaatcaaggcaaagctggatggccagctactataactcaggttatattttacatcactcgaaaatggaatcaaggcaaagcgtgcgattgagcatggtaggtactcaattaattttacatcactcgaaaatggaatcaaggcaaagcgttaatgtttttttagtttaactaggctagattttacatcactcgaaaatggaatcaaggcaaagcgtcactgtgcggacatacgggtaaacaatgattttacatcactcgaaaatggaatcaaggcaaagcataaaaaatgttccttctcacccttgagtttgtgcctctgggctactaaagtcgcatcatcctgtgccccgtcacaggcaatataaccataacgagcccctaataaatcatcaccataatacgtcgcaacaaatacatgcggcctctgacagccttgaggctgatgcctcaaaaatgcatgatattcctcgccatccttttcccatgcccactccggtatgtcgttggctgcacgatacaatggctccggccatttgttgtagcttaccgtgtaa

SEQ ID NO: 348 - DNA, 23501 bp, synthetic construct
  misc_feature 1..23501: note = Synthetic
  source 1..23501: mol_type = other DNA
atccgacgacataaaacatatcctgcaacaagtgaaacaagccgtacggattaaatgaaacaaaaacgatgcacaacatacagaacatagtatacagcagaacggttttattttccgcatcaaatattttgaccttatgctcaaaataggcggtttttatgatttccaaataagctttcgccagaacgaggagaaaaagcaaaataatccccaagctgacataacagccatttttcagaagttcggaaacagcgccaagctgccccgtaaacccggccaacggaggcagccctatcatggaaaacaggctgaccagaagcgctccggttgtatacgggcgggtttcagcaagaccggacaaagatgttgttgccgccaaatactcgccatgacttttcaggctgtaaaaaaccagatagccgccgttcaggctcagcgtataaacaaaaaggtaaacaaacgcggcaaagtccgtttcaattctgaaaaaagacagcaggagaagcacaaccccgaaatgatacattgaactgtatgacattatacgatgcagatttattctggcattagcaccaacggcgccaaagatggcggacaacagggcgaatccgacatataccggcgccagcgccgctttatacggggcgagaagttctatgttcagtttaataaatgctccccacagcgcaacgggcacaaccaaggcaaagtaatggctgaccggcagtatccccctgccggccttgtcttccgccattatatgaaacggcgcaatgccaagcgaatataaaaaggggacgacaattgccaccgccgccaaaaacagaggcagagaagccgtatttccggaaaacagcgcataaagttccgaaaaatcgaccgctccgtcctgtatataattcaagaacccgaaaccggcagcaaaaataaggacaatcacggccgatacgcccatataccgcacggcggcttctgacggcagcttttcatagctgatgccaagcaggcggtagttgatgaaaatcagaagtatatagcagaacagcagcgccaccagattagatgcagccagcagcaggtctatgcctatcagtgcgcaaaggactaaaacgtagtatctgcaacctgtccggttttcgacggaaaaccaggctgacgacaacccaagcataatatatgccaagaagcccgccaacaggctgaacagcaaagtataggcatcatttgcaaaataaagcgggctgaaagtcttatcgtaaaaaacaatgttccagaatatggacgccaacagccaaaaacgggatacccgggcataaagccgcgccgattcatatgaaagcatatacaatatgcccaggtgtacaatccccatcaacaacgacaattcgggaagcgtataaacaagctggtgcaaaatcacgtctttttctcctaaaatacaaaccacaacggcttaaaaaacgaaaagaacaatatcaacaggcagccgatataaacggcaaaatggagattgggcaaatccgcccccagaatacaggctgacgctgcgttgcttttgtctttcatccgatacaattcttccaacagcgacaacgccaccataaacaaagacagcattaccattattcccaaaatcaggttatagttaaatatttcggaaataatgagaaaattgttccagaacagcgacgttaccggcagcccgataccggccagaacaaacagggacaggcattttgacgtacggggcatatagcataaaattccgccggcactgtatatcccgagctcttttttctgatgttcaatatggctgatgaggaatgacagcaccgttacaataataatataggaaaacaacgaatagccgatattctgcgtcaacacgtccgtcggcagaaatacgctggtcagataaagcaggtaataaactgtcgtataggcaaaaagtttgtagcggatatctttatggctgaggctgaccagcgagataaacaacatagttacaatgcagacaatctcaaaaaccggcgcatatacggctatggtcgccggcacgctgttaggccaaaagcggataaagccatacagcccgacaagcggaatcagattgccgaccaaaaataccaacggatttttcagactggcattgattgacgatatccagtaatggaacggccatatcggcagccgggagataaaagcgagaaagatgccgagccagacacagtattccgtacaaccgttcagttccaagcgaccagccgcattcagcggaacattatccccgttgaaattatacattgtcagaactgcaaccagcaaaagcagcgcaccgataaggttatagaggctgaaacggattaaaaccgtttttttgcgctggcttccataggtacttatcaaaataatcagaggagctccggaggcggcaaaaaagatataaaaagacagaatatccgcggcaacaaaataaccgtttacaaggctgacaaacagcagttctgacgctatcagcgttttggaacgttccgtccggcggcggtccaaacaaagttctgcaatcagaaaagccatattgacgctcaaaatcagcaacagggaaaaaatatcagctcccagactaatctgaaccggcggaaaatcaaaccaggagaatttctccatcagctgcagccccgttttttgcatatcaaacagggaaaagccatataaaaccatgccgacattcagcatcaggcttaaaatggaaacgttatatacgttttcggccgcataattacggtcgttcttggcggtcagggcaaaaaacgacccggccaaaggaattattaccaacaacagcaacacatatgaactcacggcagtgcactcctataaaaagatacgacaaatgccaaaaatcccaacaggataaaaacaaaataggccatatagcttttacggtttatcttgaaaaataccgacaatcccaaccgattgagtgcggaaagacccgccgttataatcttttcggagaaaacaaaatcaaccaacagccataaagtccggctgatatacatcagcggcgtaaccagcgcatagaagaaaaagcttttgcttaagtcttccttttgcagccattcaatgccgtacacagcccgcaggcgcgacaaaggcaacaaaacaatgccagccagaaacagaaccataaaggctatattataaggcgtaaaggcatttaaaacccaagagccatatatcaacagcgaaaaattaacgacaaatgacaacgggcggagcggatttggattcaggctttccaaacgccgggtatgcggcgacctgtatatctgatttaaaacaagcgccacagcggctaaaacagctgcaccgcctccccaaatccagccagatgaggcaaacttcccagcaattttccagatgacggcaaaaaatacgtttgcggccaagataagctgcatcagcgttgcattcatgagagcggaattggtttcccggctgttcagcatttcgctgacccgcacttcatgattctgataaagatatattttcagcagcaacagattaaaaaagcaggcagcaacataatagccggcgcagagccagctccaggcgaatccgtttttaaccagcagcagaagcaaaaatccgataaatcccatattcagatacaccagcttcttttttatattgtcaacggcgacaaaatatacaatacccgcagccattgtcagcgttcccataattttcaataacggaagcgccaaatccgaaacggtaacgaggctgttcagacgcagcagcacaataatcccggcgagaggcgcaaacagcatattcacggcgctcatccgctgaaaacgggcagcatgcaaatccagcaaataactttgaaacataaaacatccggtttttgctaaaagtgcaatggctgtcacaagcccgacaaaatcctgatgcctgccaatttcttcataatacggaagacggtttaaatccaagctctgtaattttccgcaggcaagcgccaaaaccataaacaggcacatatcggcaaaaaaattatataccacatagcggcgcgacgaatcgacgtcttttaatataaggtaccctaaaatatcggttataaacacagccgtaataagctggacacagttttctgcgcaaacaagcaggcttaatgatacaaaattcaaagttacaagcgcattaaatgcgctctttttttcttcatagcgaaaaatattattgtgcaaaatcgtaatcaaagatatgaaaaacaacggcagcagcaattctgcatctttgggttccggatgaaaatcaatggttatatttccaatttgggaagtattccacaaaaaggagaatccctcccctccgctatttagcaaacggccggaaaaatctataaacaaaaaggccgcagcaaaaaacatcagccacgacaccaagcggtcatacttcattctcagcctcagaaatcctacgagaccgacaataaccatatatgccattatttttatcatttatccccaagccctttcatcttatccttgcagaatctacatcagccagagtttaggggaaagatattacttaatcaaggcttttacatcttttactatacgcacgggaacaacatattcgcgagccacatcttcattttccacttcgacaatcagcatagaactgacagatttcaatggcaaacgagcctcttttgcaacattttcaaaaacgacagcactgtcttttgtccggtacaacaaggccgtagcaccgccgtcatagacgaaacgcggattttcgggaccgccggcgcgggaatttattataatcaggatatcgccttcttcattctgcaaaatatcatacctgctttcctgatcaacttctttcattgtggacattttcacctcttataaaagcttgttattttgtattttatgtttttttagcacataatagttaacaaataaatagccatgtgaaaaaaaattatatttttttattgactatctgatttttatcctttataagtccatttcagttgagttgagggcccgtagctcagtcggtagagcatttgacttttaatcaaagggtcatgggttcgaatcccgtcgggctcaccaataaaatcaagggtttaggcaggttgtctaaaccctttgtttttgggtagtagtgaaatagtagtgagtttggaaatgatgagttctttaaaaaaattaaaaaaattatgtcagcaagctgattttatatacgattctgcaatttgcgaagagaatccaaataagattattcctacacctatagatgagagtaattctttagaaaaacttgatttaagatatatttctccatcttgtacacattatgacgatacattagttgacaaatggcttgctgatataaaatcttatgctatcagatataatttaacggatttctttacagataaatacttcctatctgccactcctaatactatgttatttgatatttggcatgaacgtgtagcctctttatataatttatgtatcgccacaaacactaaaccaccctttaaaataaatgcaatggaatattctatttatgttttgaaaattgttaaacaaaaaaaaatttcccctacttaccacgctcggagaaattatttctttcccttatttattagagatttctaacagtttgtttgaaaaagtttttttaaattataaaatatttatttctaataacaatattccaactaatgataaactttgtattactttagctggaatcaaatatttagatcaaaacagaaatagacttatcaaattttggtactggtcaattactttatttgcaacgcttcttatcggtatttttaaatttcttctccagctttggttaacaaatacttctgctacaaatagttctcatacttatgaagtaaataatatcacaacagatattcatcctgttcatcaaataaattacaacaattatggatatggacagcaaataattcaacatacagatgtcaaatactaaaacaaacgactcgttcatctttattgatataaaaagcatcgtctatgacgcggaggatgaagttgtcatctgattcgttggggtgtttgtagttatcaaaattgccgtagtcgccgttgatgatggcgttatctactacttacgacggattggtattacctgatatgccgcaggtttctatggtatcgcaaaaataatcccataaacagtcgggaattttccagtcataatgacttgccacaagatctctacggtcgtttaataaggtgatgtagtcgttaatatctatttcaacttttacagtgcaacacattgttttacctttcaattagattaaaaaaatactcatttgcagacgtattttttttatttttgaaaaataaaaagcgggtgatggtggcaaattgccgattagatatcggttaaatgtctgtaaaaaattaacaactcacgcatagttgacgggttttaattaacaaaacggaaataaaacgtaacacctgtttggaaagcgtgcggtgtcttgtaattgttttataacgattttttattagaaagcatattgggtgagctgtattttgtctgtttattggtataatggtgttacttttaccactttgttggtttttaatgtcatacactcccccctatttacaaaaaggggatatgggtatgtatatcacggtttattagagattagatgccctcgggattttagttttactccctcagctgcctgtgtccagtatatttatatataatatactggacagagcagatggattaaaaaggaatgtctatgtcgtcgcgtttaaataaatcagaaatcttttgtttaacagcctttaacaacattgttactttttgtgatgatgttgcttttttgaagttatcaagccaaatttctcttgtgaaaacatcattaggaacaatgcttatgccatatttttggcgcaacaaccgcatccaataaaaaatctcatccaaacttgctttgggataatttgcttgcaaaatttcacgcatttgcctctttatcacgtcttctgttaaatcttcgtttgtgatttcaagctctttattttcctcaacataaacaacatcatcaagagctacatcatctacataatcatcaggttcatagtcatcatattcggcgatttcattctcatagtcttctggattatcaaacaaagacatatatttgggatgaatttctgtttgatagacttcgcctatatcttcttttgggaatttagtcattatctttccttatgttttttgtggatgaagaattattttatccattttcaacctttatccgaactttatgtcctttattatttttaagatttaaaacagcaccatgtttttgcaatatttcaataattttctttccatatttatcttatcgtgccatggcatacattaaaggtgtatagccatagtcatcaacaacattcacatctgcattatatttctcaattaaccttacaattattttaggtttaacaagtaagcttccccaatgcaatactgttacgccatgatcagttctcattgctacatctgcaccatatttaactaaaaggtccataattttataattttcatatttcatagcatactttaatggggtatatccgactttatttttagcattaacatccgccccctgtttcaaaattaactttatttcttttagtgttctattgtattttattgccatgatgagagcagtatccccataaatgtttttcttattaacatcggcaccatggtctagcaaaaatttaataatatttggatttttattatactttattgccaacataagtggtgtgtaatcataaaaattttgatggttaatatttaaaccttctatcaaatagagtattaaaactttgggattttttattcgtgcagccattattgatagtattgaatttccattcttatctatacagttagctctcaatccatttttcttatggcattcaagcaagctcatttctttagaaatttggtgtaaatcatcatgtctaattcttaaatacgcccctaaacttgttcctactaatataagagccatcattagaataagttttttcagatatttaataattttttgctttgttattgtcatcagtctgtgttcccttttaagcacttgccgtcagctatcatatagtttgtaatatttaagtctttgatataaagagttcctaaaagcctgtcccaaccgtcataatgcggaaggtatttgcctttgaaatagagttcttgtttgtgtctattcaataaatctgctaggatttgctttgattctttgccaatctttacaacttcttcaactgttatacccgctttttgagcttgttgacgtgctttatctgttcgtcttatttcgtagcagtcaatgtctaaaaatctgacattttgtaccgtgttcagattaccattccatttttcaaaatagattttaacagtatcgccgtcaataacttcaaaatcatagattttttgcagacgtgtgtggtaaaaatatatagatataatgcttagaaacaccactattcctaatacaacaccacaatttttttctaggaactctttatatttatccattctgaatttccttatctgcgtctgtcttatttgttttcttttctagccatagacctattgtcgttgtcgtccacgcaagaaactttataacaaccttaaaaacagataaacaatcagcagaacaataattagttcaaaaaaagataacggctcttgtgtcgtatgagttggtgtatctatttgctgttgtgatgttacaccagatacaacggattttttcgcaacagctgattgcttggctaattcatcttggtgttttagatacatccgtaatggttttgcaaaactacctatcattatttactgtccttgtgagatattgcaatagaattacttatccgtacaactaaactggcggcattttccctcttttagcataaagtcgttgacgttgatgtctttggcgtaaactatgccgaccaatctgtcgccattgcctgttttgcatactttttctggtgtttccgtaaaataaatttcttcttcatacaattttaacaggctgcttagcttcgttttagattttttaccttgttcaacgatttcatctggtgacattttccattcagttgcttgtttggataattttccatttgattttttactaaattctgaacaatcaatgtccgctaggcgaattgttgcataattttttccgtctataacaccttttatggtatcgccgtctaaaacttctgtgacaatcagtttaactttggcttttggcgcggcagctttatctgttgcatacacgtttgtaaacgcggcgcttgcgaataataaggtgatgagtagtaaaaatacgatttttttcatggcgattgccctccgatagttcaaaaataagaaaaccacctttaagataaggcggtcggagaattcgtaaatcatatatgtcgagatgattcttttagcctttgaggtgttatttcagagataaagacacctttggacatacgctaaaagctccccgaccttttacagtcggggatatacgttaccataaagataactaacgatgttatccgacaccgcgacatataaagaagcctacgacagctccgcacctttctcaaagtgcaagggtaggataagaacaaaagtggaatttatcaattgatttttttttacaaaataatggaggcaatttctcacctcctcatcttacgacattttcagtcttattatatatgtgttgactgtctaattaatctctgaaaaaaattatgtctccacaaatatcatttatgatatgacaatatttttcttgaattgtcaatagttttcctataacttttgtatatatttgtttaggagaaaatttatgaagtatcgtttaggattagatttgggggttggttcaattggtagtgctgttattcaattagatgaacaaaacaatacagtagatattgttgatgcaggagtacggatttttgaggtttccgaaggggcagaagagcggcgtttaaaaagaacagcaagaaaaaatcttattcgcacaaaaaaacgattaaatttattagcacaaaagctttttgaaaatggtttatgggtaaacgttacacctgaaggaacagataagttgcgcgctaaatctccgtataaaattcgtcatgatgccttattcgagcaattagcctctccttattatattggtcgagcaattttacatattgctaaacacagaggagcgggctttgtttctgctgctgaagaattagaagaggagattttagaagaaggtgaaaaatcaaagaaaaaactttcctcatacgataggatggtcaaatatcttaaagacacaaactctttaacgatcggtgattatttctataagcgtcttcaagaaggctttgccaaagacgataatggaaataaaatttctcctgaaaaacgcatcatccgccaaaaacaatatgctttagaaaaaaatcttgttgattatgctatcccgcggtatttagtaaaagatgaatttcataaaatctgggatacacaggcgcagtactttccacaaatgaacaaagacggcctaaaacaagaaatctacgatattttgttttacgaaaagtcccctgctccgtatgccgttggaaagtgtatttattttcgtaatgaagatagattgttgaaagcgcacccattatctgaaatgcgccgtatttatgaagaggttaataatattcgcattgaaacggatatgggaaggcggcgcttaacccttgaagaacgcgataaaattatcaatgagttgctgtttaaaggggaaaacgcaggtaaaaaatcaatcaaaaagctacttaatttcagcggtcagattaaaatttctcttattgatgataaagttataaaagcttatttgtattcacgtccagagtttacaaacgttgaatatattagaaatctatccgatgagaagttagcggaatttgttgattttttggctgaaccaaaagatgaaaacgatataaatgggcgcttacttaatgaagacaagcttattttacaattaaaagaacttcttaacattgaagacgaaaaggagattggcaaccttttaacaaaacttcccaaagggcgtggtatgctcggaaaatcagcaactgagattttacttacggaactaaaaaaagaggttttatctccccgagaaattacggatagattagcaaaagaagacaagcggtttatggcggaagaagaaattgcccgcgcgatgcagggaaagtgttgttctttgccttattacggagagattttgcaaactgatacgcaacctttaccgcctcttgttattcaaaataatacaaaccttaatcctgatgaaatacgctggggcaaaattgccaaccctgctgtacatatgattttaaatcagatacgtttggtggttaatgacattatccgcatttatggtaagccatatgacattaatttagagcttggacgcgatgtcgggatatcaactaaaaagaagaagcaggaggaaataaagcaaaaacaaaatgaaaaattaaacgaagaagcaaaaaaatatttaaatgagcgaaaattatttgttaatcgtaacaatattttgaaatacaagcttgctaaagagcaaggctgggttgatgcgtatgaccctcgtgttgaaataccgcaaaatttcagcggtttcgaaattgagcatatcattccgcaagctaaaggagggactgatacttactcgaatctgtgtctggttaatcgcaaggacaatctgaataaaggtgatagatttgcatacgaatattttgaacagaccaaagagccagaggttactcgcgttattttagaagttgcacgcaaacgtatgccgcaaaaagtatggcgttttgaagctgatgcgcgtgaaaaatttgaagacaatggggatgcagatgaaacgaatcgttatttgacagatacacggtatgtttctaaaatggcgcaacgttacttacgagctattattgacagtgatgatagagatgaagtaatccacacgcgcattttagctgtgaggggaactcaaacttccgaacttcgtaaacactggtatctttctggcttggaatatgatttagatggcttggatattcttccatatattcagtgtgctccatattggcaaaaccaagatactggcgaagttattgaaggtgaaaagaagccagatattgatggtaattggatttttagaaataagataaaaaataaggaatggatgcgcaaacctcgaattgatcatcgccatcatgctatggatgctattacagtagcctgtgccaatagaagccttattcaaaaaatggctaaagaaactgatttgcataaaatagaatatcctttacctttactaagtattcattctgttggagacttccgtcgccgtgttattgatgtattaaagaacatcaatgtttcacataagccgaatcatagcaaggcaggacaatttcatgaagaaagtggaagaaccgtgttatgtgttaaccctgaagatagttcagcgattattacgtctcgctcgagaaaaattctgcaagttgttaagtctcttaaagatttgaataagcttcttgtcggcagtaccattaaagatgaatggcaccctcaaattgcagagaaccgtattaaacagacaaaacttaaagaatattttgaactttacgcaaatactgctgagcaaatcttaattgcagaaaatgagcaagcagtcttagagggcaaaaaggaaataaaaataaccgaaggacgaattttaaccaaagcttttcgcattattcaagataaaggattatggaaaggaggtagttttagcgactatgagagcagttcttctttaataaatattccaaagcacggtgtggcttatctttctggtaacaatcattgtgttgacttctttgaaaaagatggaaaagttggctgggaagttattaaacgttttgatgcaaaccaagctgattttgaaccacaatggaagaaagatggtggaaaaattatctggtctattcagcaaggtgatttattagaactaaacacgcctgaagaatggaaagggtatactgataaagatagatgtttggctaaagttaagaaatttagtgctggtcaaatgactatcgattacattacagatgctcgcgcaacaacaaaagctaaagatgatcctgaatatatgctcgttggaagtttggttaatcgtggtttaagttattttacaaaaaacgatgctcgaaaagttgaattaaccccatttggtaagattaagaaaaaacataaggtgctgtggaatggcacgaagacaaagagctaaaacattaacagggtggtcgatgatgtggattatttgtatgtttgactgccctgttagaactcgaaccgaaaccagaaaagcgacacgttttcgtaatacacttcttgataatggttttgtaatgaaacagttttcagtttatctgaaacctgtaaaaagtcttgatgttggtcgcaatttagtaaaaaaattatcccgatttattcccgataatagttctgtttcttttttgtatattacagacaaacaatatctcatgacggaaaactatctcggcaaaaattacgaagaaaatgaagaagagctgcgcgaaaaagaggggcaattgttacttttttgaaaaatacagcaatttttgttccttttctgaatcgattcgcctaaaaaattgacaccttagaaaaattttattcttatatttttgatttttaaaacaaaaaaggattgaaaatttaattattttcaatcctttaaccttgttaggttatatcagagattaattagacagtcaactataacatgcaaacagcgagcgactttataaacgcggttatatcagagattaattagacagtcaactataacaaagcccgtctgtattattcgacttttaatgttatatcagagattaattagacagtcaactataacttaacaggtgcaagctcatctgctgcacaagttatatcagagattaattagacagtcaactataacaaatcactattactggttgagattatgtaggttatatcagagattaattagacagtcaactataactagcaagacatatcgttagcaatcgtgtaggttatatcagagattaattagacagtcaactataactaagccttgcgactggctggcaaaaaaacggttatatcagagattaattagacagtcaactataactataaaaacaggtttaagctcgtccgtatggttatatcagagattaattagacagtcaactataacagaaaccctaatattataaaaatgagatgcgttatatcagagattaattagacagtcaactataacgaaaacatataatcttacatttatttaaaagttatatcagagattaattagacagtcaactataacttgttctttaatgtgtaaaggtatttcttggttatatcagagattaattagacagtcaactataacaaaactggaactgcagccataaggcaaccagttatatcagagattaattagacagtcaactataacttcgcgtatgagcttgtaaagtatatgcagttatatcagagattaattagacagtcaactataacaaagacacccaagcgatgatgttggagatggttatatcagagattaattagacagtcaactataactaatgtggtaatgtcccggccattcttggagttatatcagagattaattagacagtcaactataacccatgcaaatcaatgtcccaatctacgattgttatatcagagattaattagacagtcaactataactaattattagctttgttatccgcggcaagcgttatatcagagattaattagacagtcaactataacttgccttgacacacttattttcatttatcagttatatcagagattaattagacagtcaactataacctttacccagatgaacacatccggctataagttatatcagagattaattagacagtcaactataactgcagcgttggcgtaaaattttagggataggttatatcagagattaattagacagtcaactataacttaggcttggcaatggttacgacatccgcggttatatcagagattaattagacagtcaactataacgttaggtctatgattgtactggggtcttctgttatatcagagattaattagacagtcaactataacacgatttcccctatttcggtcagttcggcagttatatcagagattaattagacagtcaactataacggtacggtgtgaaccatatccaaagcagcagttatatcagagattaattagacagtcaactataacaatttgcttaacgtcgcgccagtcgtccttgttatatcagagattaattagacagtcaactataacagctcgaccggggcaagcgggctttcaaaagttatatcagagattaattagacagtcaactataacatctatgattttatcgttgcagctgtcgccgttatatcagagattaattagacagtcaactataactaaaagtcattcgccgttacctcgcctttagttatatcagagattaattagacagtcaactataacatatccccacatcgtgcgtctatcgctaaagttatatcagagattaattagacagtcaactataactacatagcgtacaaaacatacaaagtcaacgttatatcagagattaattagacagtcaactataacctctgctggcaatgggatttaccgggaaaagttatatcagagattaattagacagtcaactataacaatatcctttatagaaaagccacgcaaattgttatatcagagattaattagacagtcaactataacaggcaaccgtaacgactgtttacggcaaatgttatatcagagattaattagacagtcaactataaccttcctaaagttgctaaagaacaagctaaagttatatcagagattaattagacagtcaactataacggagatttaagaagttcgatgattttacacgttatatcagagattaattagacagtcaactataaccatttgcgccgttcgtcctgcgctttctgtgttatatcagagattaattagacagtcaactataacggagcggtgcagaagattaaagttttgcgcgttatatcagagattaattagacagtcaactatacttctttaaatctcaggatacctcaaaactacttttttcatttcatagcttataactaaactggcaacaaaatcatatattgcatcatttaaagatacactcccttttgctgtttgcacagaataggtgattatttttgttatatttcttttaatttctggcgttaattctatgtggtctatattgacaagcttattaacttcatcataaacaattttatcagcaatagctcgaaatggctcaattaaatcatctactaatggcatcggattagttttgttacaatgcttaatccctatatacggcaatagaccgttccccgcgacagctcttgcaactatcgccctaaggatagtataactgtaatttagtaaaatattgatatcatcacttaatctatctcgcacaaattttttaccaaataatgatttaaaataaatacttgctgcctgtccttcatgatttcgcgcgtcattgctcagagtctccttggctagccatttcagacgctctaagttttgatgttcgggtgaaaagcactctaatactttagcctgattaagtattttatgctgtacgatacttttccatagatttttttgaagaggttgagaacactccacttgttgttttatccgtggagatattaaccaatgccctgtatatggaagagttatcgcacttggaaggtagcatttattgcaaaaaattatcactccaccattttcacatatcgcattaactacatttttagagattgttacattattagcggaaagtactagcgataaaatattgtctagtggcacattttgctttacccttaaactttcattttctataactaaaaatcctcgagataatgataaataaaagccatcattacttatttcaataatttgtttttccatgtttacgttccctatccttttgtcaggatagaactaattgtttaatattttactcataaactaattcacctgtccgcctacttacatatatggtaggcggacaagttttagttagctgtttttagttagccattcggtagatttctgatactcgtgattttgaaatacctgtaatggcttcaatttcacgacatgaacagccctgctcttttaggtcaataactgttgcatacgtatccacccaagagacaggaccattatccatatcaagcagttctatccccaaatttgaaatttgctttttactcaaatttctattcttttcaaacattacttgacatttgccattaaacataacctcatcttcatcatcacctttttcagatttggctttattttttagatttataactaaatcaaggatgtcttcacgtttggaaattccacgttctccaccccgtttaccagaatgatggatgataagaacagctacaccacttttgcgaagagaaatcaaccaactttgaattatcccccaagatgctgcatctagctcatctattgtggtaagggttgacaaattatctaaaattaataacttaacacccttttccttgataattcggctgatttcttcttgcatttttttattgccaacgtctatggtactaaacgtttgcatatcggcagcaaatagctccaaattttcagtataatcaatattttcctcaatcattgattttcctgttactttttgaaagcgctcttgcaaacaatttgctggcatttctccatcaacatacaatacttttgcgggatgtggcgctttccaccgcaaaaatttgcctccatttgctaccgctaatgctaatgacatcgcaaagaaacttttaccaactccacggtaagcatgcagcattgacagacttccctctgtaataatcgggtctaaaatcattcctgcttttggtaaatcaagcgacataaaacgatttagattataaatcttgcacttcgcattattctcttgattttcttcataaacagagttatttgtattgatgttagtatttggatattgacagtcctcgttctgatccaacggggacatattttttgtattattcatcattttttatcctttcatattcggatgttgagtttactttttgactgttagttgcaagccaatctaaaacatcttgttttaggtacaggcggcggttgcctattttggtgtatgggatgccaccgcctgatacggctttgcaatttagccatgatacagagcggttaataaatgccgctactgtttttgagtttaacaatgcttcagcgggagcggcaataaactctttttgtaaatctattacattttgcataatggaactccattaatgtgttgtcgttcttcaaccaatcagccattataactgactggcagaacgtgggcattatagaaggaaatattgataatgaaaatgtcggtccttatggaacgacagttacacctttactacttgaatttgcacgataaatcatcatttgtattttaccttgtaaatcaaaatctatattttctgtaatttttttatttaatttagaacaatttttttgtataaaatcttgtatctcttgtttgtttttttcataaaactctgaaattttatcgcccttttgtttgtatagatccagtataaaattcttaaatagattctcttctttatgtttggttttattcatacttctagattttttcgtatttttggctctcgtgtttaaattttcgccataccaaaacgataaactttctacctttactgggcttactacttttctattttttaatcttttatatatttcatttgctaatttttgttgttcattatcccccacatttttaatatagtttaagaactctcttttgctgattctactttttcctatatttttatatgtaatatacacaaaacaatctatgtacgttataaaaacaagctcgttttctgcaaatccccatccaaaccattttaataacaactcatcagacatttcttttgctgtaaacatcttttttgttgaacgtagaatgtggttacgtttccttatctccccctattcaggacgctcatgacgacttgtttgattgtttccatttcttctggcttactttcggcgatgagaatcgttaaagcggctaaggttgcattatccagaatcggagcggcgtttttatagagtatgttgtttctttcaagaaaatataagaaacagcttgctcctatgcgtttgtttccatctgtaaaactatgatttttgacgatgagatataacaacatagcggctttttcttctaaactcgggtaacagtccgcaccgccaaaggtttgatatatctgacagaccgaactttcaaagctatcatctttcggatttgcaaaaacatctgacccgaactctggtttcattttatcaatcacatttaagaactcttttttatcaataacaactgcttctttgagtgtttttccttttgtatcaagggttttgttatcaaaatcatcaagtagggttaaaccttcggcaaaatctgccataatgttggttaaacgttgcgcgtcatctaaattttttgcatgattttctatactacggtttaataattctattgcattttgtagcttattgatttgttggcgcgaagcttgcaagattttttcattaagggcgtagccgtcttttagatattgttttaaaatttggctaacccattgacgaaatgcaatagctttcgttgaattaactctgtatccaacagcaagaataacatctaaactaaagagttctacgggtctatctgaatttggaatgtgcattttttgcacattgctttctctatttacttctcagaacttgccaactaccaacgagacgctgaatactataaacagcaatatgaatttgaaaaagcaagagctgatagactagcggaggatgtgggcaggattagattaggaatgtaataatgctatattagtttcaattgttgaggatttgcattttgttgagggatatctatttttatatcttctgaaattggttgtagaattttgtcattaaatttatagacaatttttgtagaaactacctgtttagaccgaagatttttgtcagatattgttctatattcaaaatatactaatatttcattatctagattactttcttttaatggagataaacacgtttccaaagccgaggtcttctcggttgcgactggaacactttacataggtacattatggaatgttatggctgaaacttgtttcgttgtttacttaatatattcaaaaaaacgctatttcttgcatcagcatctgcaataattgatttcaaatcaattaccgtaacatgtgctcttttttccttaaaatacgtataatatgcttttccgtcctctgcattagaaaatagcggttgatatctatcctgatttttaatacttctttcaaattcatcgtctatatcagttataatgtatccccatattctattacattctggaatattttgtcttattgtatcaatattgttaggtagttcaatcaaggatttatctttttcgtcttttgaggcataagcacctttcaattccatcaaaatagcatctttttgattatcatctttattataaaatattgcaatatcaggcctatccgaactcctatatatacgttcgtatttttcacttatatcagttatgatttgtttcattgttctatcactagcagcgtatgaatatgtcatgaatttatcatcaaacaaccaaaagtttgtaaaataatgcttatcgctcttatcaacatgttcgcttatagatattttcatttgcataattatatcatgaatgtaattttcttttttatctctatctgatagagctttcttgagtccttctattatttgctgtctatataaaatatactcccctaattcttctaatgctactttattgagttgtgcaatggatgccttaaatttttcagggtcaatattcttttgtcttaacatgcgtataaacacattactagcattttgtttctctttttcaaagacctcttttgctcgtttaataacatccttcttctttttgattatagatttatcttcttggatatatgctgttagataaggagcctcttttatagctgcatctaactcttttttattttcctttgatatatttggatattgcttaattagcagtgtctctatattgtctttcaatgcttcattaattttagggaaagataagctattatcaatatcctcattattttgttgtttttctattataaatccatttcgttcatcattaaccttactatccaaataatttgacgttagtaacattataattgaatcttgattatttaatttacctaaagaaatggtctctggaaattcactcactgttctaccatttgcacagtaaaataaatctttttgattgagaccatcgtctacaaaattataataaagcttaaaatcttgcttatttttattataatcttcaatttgaaaatcttgtttttttaagtcggttatatcatcgttatcaattactttcttttcgtttccaatttttataacaattcgaaaatctacattattttctttcaacaatgccagctttactaataaatgtttttttattttaatgtatattttatctatatcagccttttctctaatatcgtaaatgttaccagttttctgttcttttctataaaaattctctgtaacatctctaaaagttaatttagttatattttccttattttgaacgttatttttttgtataggaataatattacttgaatcaaaattttctgaaaaacaaaaacttatttcacgattttgtattttacttaagatatcaatatgtttataaacctttaaccaagtgagccttccgacacctttacaacctaaactttttttcgttgttgtccataattccccaaatgattctatatttgtatctgtaaaaccgtcgccatcatcggttatagtaaaaccatttattctttccggctccgaaatttctttagatatattcgtttgtaagttatctgtgctaaattcaacacatatattttttgcattcgcttccaaagaatttgatattgcctcataaacaggttgtaaaaattcaaccttgttgtttaatttagatagagcagttttaacaccaacttggaatcccatgataaaaatccttaaagcttcatattttatccttattacaaaatatttaatttttcaacatagttattaaaatttatttcttcgctagttcaatacctcaatttttaaccatggataacattacgacacataggcttttatagatttgccatgcatattaacaattttgctatgttttcaggaaagttattgattttttaacatttgtatgctatataatacataacaggagtaaatccttgcggatggggttctgaatgttcctcgtaaatagttcgtaaggtttcctgtatttttttatttaaatagcaaataatcttcaacaatgaatttttttatcatttcataataactttcgtcattatgctcgtatttttggaatattccccaagatagaaaatctacaatttgaagacatttatgctttgatgatgattttatttctaacttcaaatcaattctatttttgacttttgttgtaatgtagtctgtaaatactttgttcaaatatttgtttgtatccttttgtgatgcaacaaaatatatcggctctttgatattacataacttcttgctgataattctatccaacaaaatattggtaacataattatagaggacatttttttcattttgcaaatcagtgtatactttagacttgtttaaacgaattaccataattgaaaaatcttgcttttctttcagtaaattatacaatttcattttagttttagggtgttcatgacaggcatgaagcgtcccgcaatgatttttttgtttatccggcggcatagaaagaaatgttttctttacaatcttttcaaatggacttggattatcgcaaaagaaaaaggttataagaaagttttttgaactacgagttttactcttatcaaatcctaaatctccgctttcatccataaaaa

SEQ ID NO: 349 - DNA, 23471 bp, synthetic construct
  misc_feature 1..23471: note = Synthetic
  source 1..23471: mol_type = other DNA
cattttgtggtctttggtgtcttcggttttgaccggcagaaaagttccggcgccgacatgaagagtgacaaaaactttttctattcctttctgttccagcgcctgaaagacgcggtcggtgaaatgaagtccggctgtcggtgcggcaaccgccccttcgaaacgggcatagatggtctgataattttctttgtcgttatatttgtcccaaatgccgccctgcgaaggcttgtcgcgtttaatgtagggcggcagcggcatcaggccgtatttctgcaggttgaaagcgagggcttccggtgcgcagtcaaagctgatcaggacgccgtcatcttcttttttttcaataacgcgggcggtaaactcactgtcttcggggttgacgtcgtcggtataaaaacggatcgaatcgccgggatgcaggcgtttggcatttttaacgaacgaccaccagcggatgccgtcaaccggacggtagagggttacttcaacccgggcttcgccgcgggcgccgtacaagcgtgccggaataactttggtgtcgttaaaaaccaacacgtctccgggttgtaaaacatccggcaaatcgtaaaaatgacggtcgctgattttgccttcttggctcaggtcgagcaggcgcgagctgtcgcgcggatcggccgggcggtcggcaatcaggctgcggtcgagttcaaagtcaaaaatatctacttgcatggcggtggtccttttttgaggcagttatattacaggaaacgattatttgcaagcgattagggtaaagaaaattttaatgacggaagtttgtttgcaatattgccgccgcggttgacaaaaaatgcaaaaggaatatgatgcggcttatcgaatttaactaaaaacaaagggaaaaagatgagcaatattgtgactatgataccggtacggatggcttcgagccgtctgcccgacaaaccgttgctggacattaacggcaaaagcctgttgcagcgggtttttgagaatgttaaaaaaacggtgccgggcgacgtgtatgtggctgccggcgatcaggtgatcgttgatgcctgtgccgaattcggcgccaaggcaattttgaccgatcccaacctgccgtcgggcaccgaccggattgccgccgctttgaaagagatcgatccggaaggaaaatatgacatcgtggttaattttcagggagatgcggttaacgtcaatccggaaatcaacaatcagctgattgaaatcgttgaacgcaccggctgcgatattgctaccgtcggcatggtttttgacaagcccgaagatatcgaacagccgagcaacgtcaaaatcgtgatgggattgcgcgaaggagaggacgaaggccgctgtttgtattttacgcgggcgaaggcgccgtttatccgcaatccggaaacctgcaaaaatcaggatttctatcatcatatcggtatttatgtttatcgtgccgattctttgaaaaaaattgtcgaattgccggtcggtgtgctggaagaccgcgaaagactggaacagttgcgcgcgttggaaaacggaatgtatatccgggccaaactggtcaacaatctgacgctcaacaataaggcgccggccgatattgacactcccgaagatctggaagaagcccgcaaatggattaaatagcggtcaagaaggatctgctttcagtgtcctgattatcaggacactgttttttttaggagaaacaaaacggcgagaaacagtctcatcgtgttggcggtgttatatgccaaagtttataaaatatgaggggataaaaatgtatggcgacattgttattttaagcggtgccggaatttcggccgaatcgggaattccgacttttcgcgacagtgacgggttatggaacaatcatcggattgaagacgtggcgaccattgaagcttacgagcgccatccggaacaggttcatgatttttacaacggcttaaaaattgatttgcagaaggcgcggcccaatccggcgcatctggcaattaccgaattgcagaacggttatcggaacggcactgtcagcgtggtgacgcaaaacgtcgatttgttgcatgagaaagccggcaaccgcaatatttatcatattcacgggcaaattgaccaggcggtgtgcatgaactgcggccggataacggatgcccgcggcgaggtgacgaccgaaaccctatgtgccggttgcggtatggcggcgacgctgaagccgaatatcgtttttttcggcgagaatctgctgcggatgaacgaagtggacgctttgttggacaagtgccgattgctgattgccgtcggaacttcgggggcggtatatcctgccaacacttttgcccgcattgcccgttatcacggcgccgatacgatagaatttaacctgcatgccacagtcaacagttacgattttgatcgccatgtgatcggtcgggccggcgaaacttttccgcggtttattaaggaactgctggcggaaagctaaactcatgcttttttgattttggcattgcgttcccaaaaaacgccgtcggcatagccttggatctgcggcgcgctttcggcgcgttcaagccgtttttcggcccaaacgcaatagttggggttttgttcaatgccgacaaagcgtcgtcccagttttttggcggtgaccgaagtggttccggaaccgagaaacgggtcaaaaacaaggtctccggggttggaactggccaaaatcagcttggcaagcagtttttccggtttttgggtcgggtgggccgtattttccggcatggaccagtaggggatcgagatgtcgtcccaaaagttggaggggcaggtgttgcggaacttgccgctttcggttgcttcccagtcgcggggacagccgtcgctccggtacggagcaatcactcttttgcggattttgaccgcttcgagattaaaggtatattgatcgctcagagtggcaaaccaaatgtcttccatgccgtttttccagttatgcatggcgccgcggcctttttcgcgctgccaggtgatgcggttgcggatttgaaaatgttttttcagcaccggtccgatgatgaggctcgatttccagtcacagcaaacatacaccgaagcggtcggcttgagcagcggtttcagtttggcgatccagctttcggtataggcttcgtattccgaatcgccggtttcggcaaatttgttgccgtgataatctttggtgaggttgtaaggcggatcaatgatcgccagatcggcaaaagccggcggcagcaattccattactttcagcgaatcgccgttaatcgtgcgattgacgacttgttccgccggtcggcgggcggtaagggtaagacaacgctccagataccggcgtccttcgtccaggttgaggtcgagcgttttgttgcggggtgatttaattttttgcgacatcattttcctcttggggcatttatagcaaaaaacgcttaaaaagcaaaggatttgtcacagcggcggcataaattttaaaacggaataattgtgtttcgtcattgcaaaataaattaaagccgctaatatccggcctatgttgattttttgcaaacggagaccaaaatgtattatagcttgtttgagatttttgcggtgggaatcggcccttcgagttcgcatacggtcggaccgatgaaagcggcgcggcgctatgtggaaaatctgggacagcaaaaggggttggaaaacgtcggtgcggttaaagtcgatttgtacggttcgctggccttgaccggtgtcggacacggcacgctcaatgccgttatctacgggctgctcggtttggaagccgcaacgttggatttggaagaaaattatatcgggaaggtgaaagagagccggcagttgaaattaggcggcggcaaagaaattgcttttgatcccgaaaaggacatccggctgcaaaaagacacctttttgcccgaacattccaacggtatgaagttcagcgcttttgaccgggaggggaaaccgctgctggaagaggtatatttttcggtcggcggcggcacgattgcgcgacaggatgaaatggcgcgccgggtcgaacgcgagccttacgacgtgccttattcgtttgacagctgcaacgagatggtcgaactttgcaaaaaacacgggttgacgattgcggacatggtgctgaaaaacgaggaagcgctgcgcagtccccgcgaagttaaaagcggaatattgcgcctggtgggaattatgcaggaagccgtgactcgcggcattcatgccgaaggcgtgctgccgggcggtctcggcctcaatcgccgggcaccggaaatgtaccgccggttggaggaaaaattttttgaaaacgacgttgatccgttgatgattgttgactgggttaacttatgggcttttgcggtggcggaagaaaacgcttccggcggtaagattgtaacggcgccgacgatgggagcggcgggaatcgttccggcggtgatgcgttattatcagcgttttgctttgtcaaaatcaccctatgagcgtgaaaaagccgatattatttttatggccacggcttcggcaatttgcagtctttatcgcgccaacgcgtcgatttcgggggccgaggtcggctgtcagggcgaggtcggcgtggcctgttcaatggccgctgccggcggttttgggcggcagtctcagccaaattgaaaacgcggccgagattgcaatggaacataatttggggttgacctgcgatccggtgcgcggactggtgcaaattccctgtattgaacgtaacgcgatggcggcgatcaaagcgatcaatgcgtcgcggctggcaatgcgcggaaccggaaaccatatggtcagtctcgacagcattattaagacgatgtatgaaaccggtctgaacctgagcaccaactataaagagacttctctggccggactggcggtaaacgtggttacctgttaacaggcaaagggagaaaaatggcagatttttggtatgatatgaccgcggaggcgttggaggaagcgattaagctgtttccttttttgctcgtgacttatctggtgctggaatatcttgaacggcgggtgggtgacggcacagttaacctgatccgcaaatccgggaaaatcggaccgctgatcggcgctttgtgcggtatttttccgcagtgcggtttggccgctgccgccgccaatttttatgcggcgcgggttatctcggcgggaacgttgatggcggtttttatttcgacccccgatgaaatgctgccgattctgatttctaatgcggtaccggcggcactgatcgtcaaaattttggcgctgaaagtatcggccgcggtgtcgatcggtcttttgctggatgttgtcagtccgaagatttctctgcttaaaccgcggaaccttgacgtcgaaaccctttgccgcaatcaggactgcaagtgcgaagcgggtatttggcagtcggcgttgcgccattcgttaaaaatcactttgtttgtgtttgtaatcagttggctgttcagtgtgatgatggccgggatcggcgcggcgccgtttgcccgttttatgaacctgacgattgtcggcccggcagcggccggtctgatcgggttggttcccaactgttcggcgtcggtgattgtgacgcaattgtatctggaaaatgcgatcggtttcggcgcaatgatgtcgggggtgatgtcgggtgccggggtggggctgctggttttgttccgggttaatccgcggctgaaggaaaacttgctgttggcggcggttttgtatttttccggcgttgtcacgggtaccctgattgatctttggcgttaaagcgaaaaaaattataaaactttacaatatatttataatattttgtaaaaatggcgctcatgattactatatcgaaaagcgatgtctgatgctgcggtcatcggcatggtaaaaaaagttgaacaaaggaaaaaagcaatggcattgcaaacaaaaaaagttttaaaaaaaatggtttcgtgggcggggttgttcttctttgccttggcggcgtacatgctttatcgccagctctccaagtacagttgggaagatatcaaaaacgcgttgctcagcattccgccgcataatttgtggatggcctgtctcgcctctttgggcggttatgtcgccttatcttcttatgattatctggcgttgcgttacattaagcgcaaactggcgccgtggaaatggatttttgccggttttatcggtttttcggtcagcaacaatgccggtcacgcgattgtttcgggcgggaccatccgttatcgtttgtatacccgctggcgttttcacggcgccgaaattgtgcggatggtaactttttcgggttttacctatttagtggcctgtttctttctgattatcgtcggatatgtgattacgccctctcacgcctttggagccggttcggtgtccaagctgaccaccgaagtggtgacgcttggttcggtgttggggttggcggtctatttcggcctcagtctgttttacaagaaaccgttgatgattaagggcgtgattttcgaaatgccgtcgtttccgatggcgttggctcaggtggtgatcggggcggccgacattttgatggcgtcgctagttttgtatttttccctgattccgtttgtggagatttcgttctcaacgtttatcggtgtctttatcattgctcaggttttgggcgtgttcagtcaggttcccggcggtttgggcgtttttgaagggttgtttatgtacatcattcccggggaacataatcaggcgactttgtttggagcgctgattgcctatcggattatttattatctgctgccgatggttgtttcggcgatcatgctgttttcgtatgaagcctatttgaaatatgtcaaaaaacagcggttggaaaaattgaagatcgtcaacaccgccgagatgaatcgcaataaaatctaaatcaaaagccggaaatttccggcttttgatttggaaacgaggctaacgcggcaggatgctgattatgaaggcagcaaggataaataccatcagcagggttccgacaatgatgacggcggggttggatttggtttctttgcgcagtttccagttggcgatgaaaatgccgaggtagctgaccagataagcggcgctggagagattgacgattgaactgaaatcaaaaaagatggttaccagaacgatcagcaaggtattgagcgcggcgccgagagatccctgtcgccaaaattttttgagcataaaatgcggaaaaacggtttgttgggtcagagaatcggaaatgcggaagatgctgaaaaaagtggcgttgattcccgaaacgaaagcaagaaccgcagccacgtagataaagccgtagccggcggtaccgagcagtttccgggcaacttcggccaccgaggtttcggcatttgcttccagttcggcagtcggaatatagtttaagaccacccaggcaagactgatatagagcgccataacaatgaaaagagtcagataaatggcccactcaatggtttgttgcggttttttgacgtcggaagtggcgttggtaatgacaccgtaaccggcatatgcgaaaaaggtgacgccgatactgcgcaaaaaatccattgactctccgctgaaagccggcggatgaaggcgggcgccgggttggaaaagggcggcgaacaccagcgcgaacaggatggccactttgatgatgacaatgacggtttcggaacggccgacgtcggaagcctgcatcatgttgaggagagccaggccgatgatcaaaacggcagccagggtatttacccacaaatcggaaggaggaatctggttaaaaagttcggtaatatagatgccgaacgctttggcaatcatggaaattgaaattgcctcggtaaccagatagatggcggaaagggtgccggatacgtatttttcgggaaaagcgatgtgaaaatagtcggtcagtccgccggaactgtggtagcgtccggccaatttggcataagagtagcccgaaaaaacagcggcgattccggcaataaaaaaagcatggtaggtatgatcgccggccagcagaatcacttgtcccagcaaagcgaaaatgccggcgccgacaatcgaaccgatgccgagcgaaatgacgttaagcagacttaagtcttttttggatgtggaatgcattgcttttctccgtttttgtaggagataatcgcggatgttgcaaattcaatgcgctgtcgggggaaaaacttgaaagagcggacggaattgccggtttgcaggacagtcggaattgccctgccgtgccaacgcatacatcccggcaatttgcgacggcagccggctaaaaccgccgggcgtcgcggacatatatatgtcataactttcacaaaaactgtcgaacagggcacaaaaaaacgcctgtgtcaaacaggcgcttggagttggtcggattgactggactcgaaccagcgacctctgcgtcccgaacgcagcgttctaccaggctgaactacaatccgataacgggagtatatttaccacaaaaaaaatatatgacaacatatttttttaattgaatacaaaaaaaaattccgttaccctcgccgatagttaatttattaggaaaatcaaaatgtataaaaagatttcatatttcattgcaaccatgtttggggtcggatattgtccgtttgcttccggaacggcggggtcgctggcgacgattccgtttgcttttgccgcggtctattacggcggaatggttggggttttgacgacgacggcgattgtcttttttatcgggacggcggcaacgcacgaagtgttaaagtataccaaacacgatccttccattgtggttattgacgaaacggccggccagctgctgacctttgcgctggttgcagaccgattgtccggtgtggccgactggcgtgcttatatactgtatgccgcgggttttgctctgtttcgcctgtttgatattaccaaaccgcagccggcgcgttgggccgattcgaaagtgatgaacgcctggggcgtgatgctggatgatatttttgccggtatttatgcggccgtggttttgtatgtcatttccatttatttgtaaacggctgtaagaatcggggcgttttcaaaaagtttgatacgggacttgttatgccggtgttacggcatatataaaaacaagaattaacgtatcggcgagggaacacggaaatgtgggaacaaaaacactggaaaattgccgcggttatcgtgttgttgattgccttgtcgttggcactgtttaactgataaggggaacaatatgaagttgtggcattggattgtgattgcggtttttatttttgcggtggtgatttctctgtttttttagaaaagttgtttttaaagcttgacatcgccttataaaaagcgtatgtatgcactgtcttgagcgccgacagagcgcaacagacatttatcgcggggtggagcagcccggtagctcgtcaggctcataacctgaaggtcgtaggttcaaatcctgcccccgcaaccaaaaataaaaaaccgtccttttaaggacggttttttatgtgaaaaatggcgattttaaatttgcgaaaaagcaggttccgtgcaagcgaaagccagacggagtaggtggttggcatatgcccatgaacgtagcgtagcgattgagtgaagcgtttctgtaaccaattgtttttgtaatgagttattttctggacacaataatgggggcaacggattgccccctcattttacggcattttcagccttattatatatgcattgaccgtctgattaatctctgaaaatatatcaaaacatatatcactttcagtataattatattttcgttgaaatgtcaatcttattattataaattgttaaatattatttactacaattaaagtgagagtgacttatgaagtatcgtcttaatcttgatttgggagagagttcaatcggaagcggcttgattgaactggatcagaacaaccttgctaaagatattattgacggcggggtacgtatttttgaaatttcggaaggggcagaagaacggcgccttaaaaaaacagcacgcaaaaatttggttcgtacgcgtaaaaggttggaattgttggccaaaaagctttttgaaaacaatctgtgggtgaacgaaaccccggaaggaaccgaccgattgaaagcaaagtctccttataaaattcgtcatgatgccctgtacggcaagttggaaaatcaaaattacatcggtcgggcgatcttgcatatggccaagcatcgcggcgccggttttgtttcggcggcggaggagttgtcggaagaagttctggaagaaggcgaaaaatctaagattaagaaatcttcatatgaccggatggtacaatatttgaaagataccggttcaaaaacgatcggcgcctttttttatcagcgtctccaagaaaaagaaaatccgcaaaatcggattatccggcaaagaaaatacgctttggaaaaaaatatcgtcgattatgcgattccccgttatctggtgaaagacgagtttaaccaaatatgggatcggcaggcccaatattttaaacagatgcaaaaggacggcctcaaaaaagaaatttacgacattttgttttatgaacggccgccgatgccttatgcgaccggaaaatgtatttatttcagagaagaagaacgcctgttaaaagcgcacccgcttgcagaaatgcggcggatatacgaagaagttaacaatgtccgggtgatcagcgataccgataaacgccgtttgagcctggaagagcgtgacaaaattgtcaatgagcttttattgaaaggtataaatgccggaaaacagtcgattaagaagaccttgggtctttcggcacaacagaaaatttctttgttggacgaccgggtgatcaaagcctatttatatgcgcggccggaatttgccgacatagaatatctgaaaaatttgtcggaaaaggagttggcgacctttgtcgactttttggccgaacccaaaaatccggacgacaaaaacgggcgtttgtacagtgaggacgctttaattgagcacctcaaacctattttcaaaattgacgatgaaaaagaaatcggtgcgcttttaaccaaacttcccaaaggaagagggatgcttggacaaacggcctccaaactgattttggagcaaatgaagcaaaacgtgctgtctcatcgcgaagtcaccgatgcgctggcaaagaccgatccgcggtttttggcggaagaagaagtggtgcgggcaaagcagggaaaatatctgcaacttccgtattacggcgaaattttgcaaaatgatactcagccgttgccgccgttgctgattaaaaacaatcccggtttggataaagacgaagttaaatggggtaagattgccaacccggccgttcacatgattctcaatcaaatccggttggtggttaacgatattatccgcatttacggacgcccttatgatattaacattgagttgggccgtgatatcggtttgtcggcaaagaagaaaactgaactggaacaaaggcagcgtttgaatgaaaagctcaatgacgaagcgaggatgtatctgcagcagcataaattgtatgttaacaataaaaatattttaaaatacaaactggccaaagagcaaggcaggaaagacgcttacaatccgaccctgagcattgatcataggtttatcggtgttgagattgagcacatcattccgcaagccaagggcggcagcgacacttataacaatctttgtctggtgaaccgttccgacaatttgaacaaaggcgatcgttttgcctatgactattttgccgaaaccaaaacgccggagatgatgcgggaaattctgaaaaatgcccgggaaagaatgcctgccaaagcctggcggtttgagcccggtgcgcgggaaaactttgaagagaccggtgatatcgatgaaacaaaccgttatctgaccgatacccggtatgtggctaaaatggctttacgttatttacgggtaattattgactgtgaggacagtgatgaagtggccaaaaaccgtattttggcggttaagggaaaacaaacggctcaactgcgccggaactggaacttggaaggggtggaatatgaactgatgggattgaatgttccccgctatctgccttgttcaccctattggtcggagataaataccggcgagatcagaagcggggttgaaaagccggatgttgacggggactggaaattttttaatcaggagaaaaacgaacaatggttaagcaagccgcggattgaccatcggcatcatgcgctggatgccattacaatcggttgcattaaccgatctttgcttcaaaaattaaccaaccctaatgatttgccgcatttcaaactgccgcttcctctgagcagtgtggaatcgttggcggattttcgccgcaaagttgtcgagattctgaaaaaagttaatgtttcccataaacccgagcacagcaaagccggacaatttcataaagaaaccgggcggaccgttttgtgttcaaatcctgacgatcccgacgcgttggtaacggtttataagcggaaaatattgcaggtcgttaaatcgaaaaaagatttaactaaattgctgatcccggaaacgatcaaaaatgaatggcatgataaaatcgaagaaaataaaataaagcaggaaaagctggttcgcgattttgaattgtatatgaatgcggcagagcaagttttgattgccgaaaatgagcaggccgtcgcggaaggaaaaaaggagatcaaaattaccgaaagccggattattgtcaaagcttttcaaattattcaggaaaaaggactgtggaaaggagatcaatttaaatactacgaaaacagccgttcgctggtttgtattccaaagcacggggtggcatacgaagcgcaaaataatcatcggattgacttttatcggaaagatcaaaagatcggttgggaagtgattcgctgttttgatgtcaaccagccgaattttgttccgcaatggaaaaaagacggtgggaaaatcgtgtggtcaatccagcaacgcgaccttttggaactggatacgcctgaggaatggaaatcttataccaatgatgaaagatgtctggctaaggtaaagaaatttagtgccggtcggattgctcttgactttatcagtgatgcacgaatgacctcgccgcaggataagacaaaggattatctgctggttgatacgttggaacggggcctgaagtatttgaaggatcatcatgcccggaaaatcgagttgacgcctttcggaaaaattaaaaaaaagcataaggtgcttaaggatggcgagaaggcagcgacttgaaactttaaccggttggtcgatgatgtggattatctgtatgtttgatattccggtgcggaccaaaaccgaaatgcgtaaagcaacgcgtttccgcaatttgctgttggacgaaggttttgtgatgaagcaattctcggtttatatcaaaccggtaaagagtttaaacgtcggacaaacggtaacgcggaaattgtcaaagtttattccggacaattcctcaatatcttttttgtatattacggataagcagtatttgatgactgaaaattatcttgggaagaattgcgaagaaaatgaggaagatgttcgcgaaaaaaatgggcaattgttgttgttttagccgggttttttaatgattttattctcaagtaatgccttgaaatgtgttctatttcaaggcattacttaatgagagattttatcagagattaatcagacggtcaattataactattttacattagaattagatagggaacttattttatcagagattaatcagacggtcaattataacaaaaaagccacggtcgacatttcagtcgtcattttatcagagattaatcagacggtcaattataacacaatcaacggcgcgctgttgttggtattaattttatcagagattaatcagacggtcaattataacataccctctaccaattcttttccggcagcaattttatcagagattaatcagacggtcaattataacgaaacctctgaaataaaagcagatgtacagattttatcagagattaatcagacggtcaattataacggaaaccatggattctcatcataatttattattttatcagagattaatcagacggtcaattataacaatctgtatgaaatcatcgcaatagacacaattttatcagagattaatcagacggtcaattataactaattatcaaactgatgcgaccgttagtgtattttatcagagattaatcagacggtcaattataactaaacggtcaacggcatccaccaaaacggcattttatcagagattaatcagacggtcaattataacactgttgtaaaccatggcgcattgtctataattttatcagagattaatcagacggtcaattataacatttattaaaatatagttaattttattctaattttatcagagattaatcagacggtcaattataacaaaatcaaaatagcatcaataagattatttattttatcagagattaatcagacggtcaattataaccagtttattcattaagaagatacagaagaaattttatcagagattaatcagacggtcaattataacataagtagtcaagatttgttgaaaaaaattattttatcagagattaatcagacggtcaattataacgttgaattctcatcaaactcatactcatcaattttatcagagattaatcagacggtcaattataactacttgagcagcaactcatccaagccttttattttatcagagattaatcagacggtcaattataacccgatttcctgctgattagcaatttgtcgcattttatcagagattaatcagacggtcaattataactaatgtaaaaaaaacggggctaaaccccgtattttatcagagattaatcagacggtcaattataacgaatagcagtagttccttttctaactttatattttatcagagattaatcagacggtcaattataaccgaaacataccgaggtcgaagattggagctattttatcagagattaatcagacggtcaattataacagaggcctgatattcgttataggcgtctatattttatcagagattaatcagacggtcaattataacatgagtggtcttggttcgggcatcggtagcattttatcagagattaatcagacggtcaattataactaaatggtggtggtaatccatcacaaatatattttatcagagattaatcagacggtcaattataacagtctgctcacgaatatatgctttgcgagattttatcagagattaatcagacggtcaattataacagcacgcagacgtaccgcaaatacggacgcattttatcagagattaatcagacggtcaattataactgtagggccttttaagggcttgtagaaaggattttatcagagattaatcagacggtcaattataactaaaaaagatgaaaggtcgtaatgcggctgattttatcagagattaatcagacggtcaattataactcagcgttttaatgaaataacaggagattaattttatcagagattaatcagacggtcaattataacgaaggaaccgatataccggttgtaggtgctattttatcagagattaatcagacggtcaattataacacgatgcagaaggctttttttgataacgggattttatcagagattaatcagacagtcaattataaccagctggtatgaggcctgtcaaatggtgtcattttatccccgcttaatcaggaagccgttttgacaactcctgtaattggatggttgggtattgcaggaccacttttttgagttcgaagcttgtgaccaagctgcttacaaagtcattaattccttcactgagggaaacgcatcccttgccggttaaaaccggaaaagtaataattttggttaagtttctttttatttcgggagtcaattcgatttgttcgatgttaaccagttgattgagttgttcaaacacgattttgtcggcgatggcgcggaaaggctcgattaaatcgtcgaccaacggcagcggatttgatttggtgcaatgtttcagccccaaatagggcaacaatccgttgccggcaatcgaacgcgccaccatggcccgcaaaacgatataagtatagttgagcagaatgttggcattgttgcctaagcggtctcgaacaaagttttttccgaacaaagatttgaaataaattgccgcggcggtaccttcattgtttttagcgtcgttactgagcgtctcacgcgccagttgcttgagccgggccaagcgcggatgttggggaaagaaatattccagtatcttggcttgattaaagattttattttgaacaatgcttttccacaaatttttttgcagcggtttggagcaatctatttgtcggcgtacccgtgaggagatcagccagtggccggtatagggggtggtgagagctgacggaaggtaatttttgtcgcagaatatgatatttccgccctgttcggcaatggcgttgattatatttttggtgacggatacattgtttgccgacaggatcaaagccaagatattatccaaagggatttcggactttaatccttgatttttgttttccaccaccagaaatccccggtagagcgaaaggttaaatccgtcgtttgatatttcgataatttgtcgatccattagggtggcctgtggttatattttgtatcggtattgttttgacgtttattcctcggtatcggtatcgtcggtttcttcggcgatgacgttgatcgaaaaagacgatttgtcttctccgtattgttccagcagtttatcgatgaagctcatcacattttgggatgacagattcaattcgatgaaaattccgggtttttgctcaatttcgtacggcgagcacatattgtcgcgtttgcagctgagatagcaacgtttgcatctggggttgagggaaaagttctgtcgggccagctgctccaaaatgccgggatgtcgttgatccaagatccgtaccatttccaacagcatcagagcgtatttgttttgccggtagatttctcggtcaaatttgaaagtaaccagttttttgccggtaacgtcgctgtaatcattaagcgtaatcgtattgacaacatcaaactcaatactgtcgtcggtaacgcgttcgatatcatatttttgcatcaggatttgtgccaggcggccggaacggcttttaatgctgtcaatattccaactgtctttactcagaacgtcgctgttgaggataaccgctttggagttttcggcaatgatctttttcttttcggaaaagcttttgtttgacagttccgaattataacccgaaaccgacaaatttcccagcgtatgcagatactgttcatgatcttggtcggaaatatgtttccagtcggagctcaaggcctgcggcatgatgtgttcaatcgtcagagtttcggtattgagagtttctttgccgttgccgttttcaatttccatcaataaaaatttgcatagggagaggtttccgtacaagttgttggttttcagcgctctttcaaaatcggttgtcgacggcatggcgtctttggaagtcatggtaaaaagaaatttgttaatagcctgataatatttctttttgttggcgctcactttaaatacgcggttgtagagatagataaacaaaccgcgcaaagagttggaaggaatgccgcaaacggaacgacggaccaaataagaaaggatcaattccaacgtttggcgcagcgtatcttcgttgatcgtgccctgtttgtagtcgtcaaaaacatggattaaaaacggatagcttgtggtttgcttcaattgtcggagatttttcagaattttgcgtatcggtgccggatagtcggagcactcaaagacaaacgcgcgaaaaatgtcggcatggtacttcagttctttcaggcagctttcctgagtgtatccgccgtctttaaacaattttacaaacttttgatacaaagagcccaagtttaccggtgcgctggttttgtaaatgacatattgcataaaaaacagattgaggttggtataatcggtaccggatttgagggctttttcaatagacagccaatatttctcgtacagttcctcctgtttgtcggcgttcatcagcaaaaagtttctgatgaggtcggcgcaggaaagttcgagtccggtggaattaatgctttcgaagatcacctggggatcgtcttctcctttggtgagggagatttcgacgatttccagtttctccagcgccgtatgaatttctgaaggcgtgatgccggaggcaatccatttttcgaggcgtttacggcaaatttcataattgataaagatgtgcccttcttcgtccaaggcatcggtattgtttttcaacagcgccaaaaattgttcgttgtcggacttcaccggtttcagtttgattttgaattgttcctcacagtggcggttgtgcaaatagatttcctcgatttcctcatagcagccgtcaccgtttttctgagcgaggtcagacaatgctttcagcaaaatcatcatggtcgtcagccgttgttgaccgtcgatgatgatatattcttttaatgaaaagccgccgccgatcggcatataaacgaaagttccgagaaaatgcttttcgccggtatcgataatttgtttggtgtcatccagcagtttgttgcagttgacatcggaccaatcgtaatttcgctgataaaccggtattctgaataaaactttgttggttcctataaaatcctgcaacatccatagttttccggcgtccatcgcattttccagtcgtaaaaagtttggtctaaatttgtttcactttacacggaatatttgtctttttcaataaaaataaaccgttgggaatcggcttggagagactaaataaggtttgatttttggagtggtttgcattaaacaggggagaaacggcgggagaaggggactgccgtgacacaaaatttaacgatattttttccggtgagtttatgaagaagaatacaaaattgtttttgtcgtacgtgttaccttcgatgatcgggatgctgatcgtcggttcttacagcattgtcgacacgatctttatcggttggagcgcgggagaactcgggttggcttcggtcgcggtcacctggccgctggtgatgctgtttggcgctgtcggcgatatgctcggtaccggggcggcaattatcatttcgcagtcgcggggcaacggcgatcttcggcgggcccgtcgcagttttgccaacatgctggtgtggcaggtggttttcagcgcggcaatgacggtgtcggtttatatgtggctggttgatattttacggcttttcggcgcttcggacgaattgattccgggagcggtaaggtatgcgcggattttgattgtcggcaatttggcctatatgctggtgacggcgatgttgtcggttatccgcaacgacggccgcccggtgttgtcgatgtggctgatgatcggcggcctgctgctgaatgtggcgcttgactatctgtttatttttccgctgggcggcggcattgccggtgccgcttatgcgaccgtggtttctcaggttgtgatagcggtggccgggctaacgtatttcacgaccggctataccgagctgcggtttgactgggcgatgttcaaactgaagtttaaatatctgaaagatattctggtcaacggttttccgtcgttgggcaaccaactgtcgatcattgcaatgcttttttttcataattaccaagcgttgaaatacggtcaggtgaacggtctggcggcgtatacttttgtcggtgcggtggaatctctcggttctcttttaatgaccggactttctctcggcgtgcagcctttggtcgcttatttgtacggcggccgtcgctatcgtcgtcagaacgttatcggcaatatggggtattatacggccttcgggttggggattgtgatgacgggcgtttcggttgccgggcataacgtttttccgggatggtttaatcttcacggcgaggcggcggccttagccgcgcacggtttgattatcagttcgaccgcatttgtcttgctgggcgtggtgcgggtggccggttattattatcaggcaaccggaaaaattattgattcgtcgctgctgatttacggcgacgcgtttgttgccctgccgttatgtctgtttacgctgcctttgtggttcggcatggacggcgtttggctggcgatgccggtatcacgggttttgctgttcttgtttgtctgttatttgtggtttggcaaaaaggccaaaccgcaaccgcggcggcatttttccggcaaaggtttctaattgcctcatgccggcccaaaacccgcccggttgcaaaaaagagatgacggaaataaaaaaacggtttatgttattgagaaattcagcggcattataaaataaattaggaaaggttatgtgatgttgaaaaaaagcaagttgtttaccggactgtttttggtgttggccctttgcgcctgcaaagaagaaaaagcgcggcaggcgtctgccggccaggaaatgatgtcggtggaggtaatgaaagtcgaaccgcgtgacgttcccctcagttttgaattctcggcgcgcgcgcagggatacaaagagaccgaagtgcgggcccgggtcggcggcattctgctgaaaaagaattatgtcgaaggttcggaagtgcgcgaaggcgacgttttgtttgaaattgatcccgagcaatatcgtgcgcagctgaacaatgccaaagccaacttggctaaagccaaagctcagcttcaccgtgccgaaaacgattgggagagaattgccaaactgtataaacagcaggttgtgagcgaaaagtcccgtgatgaagcaatggcagaactggaagcgcaaaaggcagcggttcagatggcagaatcggaagtggaaacggcgcagcttaattttgactataccaaggtaaaagcgccgatcagcggcgtaaccggcatggaggcccagtcggaaggcagtctgatttcggccaccggacttttgaccaacattacccagttggatccgatttatgttattttttcggcttcggagagcgagatgatgtcgctggccaacatggttgataacggattgatccgcaatccggaaaacaaaagcgaaattacggccaaagtaaaattcagcaatgataccgaatacccgttggcgggacaaatcaactttattaattcggggattgacgaaggaaccggaaccatcaagctgcgggcggtttttccgaatccgaaaaagcgtttaaaaccgggacagtttctgcgcctggtgatggaaggcctgacccgggtcaatgccctgatcgtgccgcaggaagcaatcatgcagggtgccaacggttcgtacgtttatgttctgaatggtaaaaatatggtggaaatggtcaatattcataccggcctgatgacgcgggaaggaggctggattgtcgacagcggcctgaaagccggcgatcgcgtcattgtcagcaatctgatgaagattcgtcccgggatgacggtgcgtccggttgagaaatccgaaacgctgagcaagtaaagcgaaaggaaataccatgttttcaaagttttttattgaccggcctatttttgcgacggttgtctcgctgatttttatactggcgggactggtatcaatgaaggtactgccgattgagcaatatccgaatattgtgccgacagaaattcaaatcacggcaatttatcccggcgctacggccgaggtgttggcggataccgtcgccgcgccgatcgagcaggaaattaacggtgtcaagaatatgatctatatgtattccaacgccacttcccaaggctatctgaccatcggggtggtttttgacatcggtaccgatcccgaccaggcgaccattgacgtcaacaacaaggtgcaggcggccacttcaaaactgccggccgaagtcaccaaacaaggcgtcaaggtcgaacaaaagtcgaatgcgattttgcaggtggtgacaatgaagtcttcgtcgccgcaatacgataccatttttgtttccaactataccttattgaacgttttggatgaaatccgccgtatcaaaggggtgggcagcgcgtcgctgtttgcttctcaggattattcgatgcggatcttattgtcgcccgacaaactggccgatttcaatctgacgccgcaggacgtaattgccgcggtgcaggaacaaaactcgcagtttgccgccggacagttcggacaggaaccgctcgacgagtatctgccctatacctattcggtcaacaccaaaggacggttggtcgatgaaaaggaattcggcaacatcattcttaaaagcgatgacaaggggggtattttgcgcctgaaagacgtggcgcggattgaactgggcgctcaggattacagtgtcaactccttctttaacggcgaaccggcggtcgcttttgcgatctatctgcaaccgggggcaaacgcgctggagacggcagggttgatcagacagaaaatggaagaagtttccaaaagttttcccgaaggaatatcttatgaaattccttatgacaccactgtattcgtcgatgtttcgatcaatgaagtgattcatacgttttttgaagcggtgctgctggttattgcggttgtttatttgtttttgcagaatatgcgggcgaccctgattccgatcttggcggtgccggtatcgattatcggcgcttttgccggtatgtatgtgttgggtttttcgatcaatctgctgactttgttcggcttgattctggcgatcggtattgtggtggacgacgcgattatcgtgttggaaaacgtcgaacgtctgatgagcgaagagaaactgtcgccgcgcgaggctgccgtcaaagcgatgcaggaagtgtcggggccggtggttgcggtggctttggtactgtcatcggtatttttgccgattgctttcttaggcggcatgaccggcgtgatgtataagcagttttcggtcacgattgcggtttcggtgctgatttccgcttttgtggcactgacgctgacgccggcgttatgtgccctgattattaaaccggtgcgtgaacacaagcagccgcatggattcttcaaatggtttgacaacttttttgatgcggcaaccgagctttatctggcaggggttcggtttttccttaagcaccgcaaaacggcg

SEQ ID NO: 350 - DNA, 23471 bp, synthetic construct
  source 1..23471: mol_type = other DNA
  misc_feature 1..23471: note = Synthetic
caacaatttacaaatttatcaaatcaattgacccagctaaaggcgtcaattgatttggcaaacaatgaattagaagaaaaaaaagagcaactacatcaagccgatataatgcttgaatatccagcaatagaaatgaagtatattcagtttcgtaatgatgcagaaaattactcaaaaattgtagagcaaaaaaaggtagaaatagatagattaacagaaattagagacaagatatctcaagaaatccctaaaataaaaaaagaatataaagatgaaatttataaattagctcccattgtaaaaatgctaaatgaagctgattttgtaaatgaggaacatgattattcatttaccccgaagaaaggtaaagagtattcaataaatgaaactattaattctatttatactcattttaaaaaccaaaatagggttcttgaaaagagagatattgttaactatttggtatcaataataaataatttttttattgttttttatggaaagcctggggtcggaaagacatccttagttcaagaaatagccaatagtcttggggcaaatttaaacaaaatatctgtcaataaagggtggacatcgccaaaagatttattaggatattacaatgcattaacagggcattttatagatgcagaaacaggactacgtaaatttataaaacaagctgataaaaataatcctttcgaatgtttatacattacattattggatgaagctaatctaagtcccttagaatactattggtctaattttttaagtgttgctgatgaccaaatcaaaaagataaagcttcaatcagacaaagctccagatgaaattacgttatttgatggattaaagtttatagcaactattaacatggatgaaacgacagaagcattatcgccacgcatcataaatagatcctgcgtattctatttacccaatgaatataaaattcctagcttagataattattttcaatcagatcattatcctatatcatatcaatcattgagaaaaaattttggctatgaaaatattcttcaaaacaatcacaacgcagaaaaatatggacaagataagctagatgccatatatgacctactaagcaaaaataaaagtagaagtaccatatctatttcagcgagaaaacaaaaaatgattcgaatgtatatagatacaatgactaagattggtgataataacaatgatttaggttatgacaactcagatgttctagattttgcaattgctcaatacatcttaccggaaatacgcggagatggtgaaaagtataaagaattactgaaattacttctagatgaaatatctccctatacattttcaacctcaatacttcaaaaaattgtagaagagggacaagagaattatgataatttcaacttcttctacatctaatctcatcaaagattttgaactagttatctccaaaagcccaaacggtgaagagcgtaagtctcttaaaagctccacaccgcacacaccgcgagactattgtactattaacgatacagatcaaatatattttaatgcaacattaaatacctgtaataaaaatccctgttatttgcaaataggtgacatattaatagcgggaacaccacgtggacaagaaaacattgaattccgatttcgtggtaacggtgctttttttcaaaatttttgcggatacgctcagctaacactgcaaatatatacctccaatagaaaagaagaaaaaaactattatttgcaagtatgtacagataaaataaaaaaagaatatattgaggatatcctaatatatttagatagcaaaattgaaaatattttttttacagaaaaaaccattacttacagttcaagtataaaaaatcaatcaaattttcaaaactacaatcaacagataattgttgctgaagaattaacttcttttttctcaggaattaatctcaaccacatgaactacaacaaaatatctgaaataaaaaaaatatccaatataaacaaagcagcattaatagacaattcttcaatattgtggttatcacaaaatacttcagaaatatataaatcaacaaataacaatataaagataggacaaaacaaatatcaattaaacaaaattttaaatacatccttaaacataaaaaaagatatatatgagaataatatcattctttcatacatctcaaatataattacaacaataagtaatatattacaaaaaatctcagcagaacaaaaaagaaaagaatcagacagtaatgtaattccaaataattcatttgaatacttatatagagattatttaataaaaacatatgggctaaacaaaaaaaagtgtataaaaataatatcgaatctaacatcaattagaaaaaaattagctaaaatttacggcaagactacgatatacaatttaatttcaaagccccatatgacaatgtgctttaaaaacaatttcttctatcaaaaaatatatccgttattgctaaattggtggaagtgttcaaatgtaacagcccttgaaaaaaatgatataccattagaaaatatagctaaattatatgagtatctatgtttattcaaaatttttgatgctataaatagtgtactaaatattactccattaaaacatgatagtacattacttctaaagtcaaaacaatatatttggactttagaacaaggcgaaactattaccctattttacgagcctataatatttagcattccaaaggaaacaggtctaattcgtgtatccaaaactcaagatgaacgatacaactattatactccagattttgttataaaatattgtaataaaggatatgaaactttctgtattttagatgctaaattttcaaacgtaaaaattgacaatatatttaaatattttaccgatataactaatgagcaattcaatcgagataatataatattgatatcaataataaaaccagaatttgctaatacagcatataaatataatagtctttatataaatgatattttttctaaaaatgtgacattgcctgaattatcagagatatacttatctgcgcctaagtcaaaaactaaattacaagatataattcagatatttataaaaatatctaaagagaaatattttgagaaaaatcccatatcccgtaaaaaatatacatacaaatcaagttctatattagatgatacaaaaatttctctaattaaaggaatgatccttaggggagacaatttacaagatatagcattttggtttggagtaaacttaggtagaattagtgaaattaaaagtggaataaaatacaatgacatcctccctgcggataaaaacaatcttcctccacaaggaccatatccatctttatcagaattattcaagcaataaagctttaatatcacagataaaaaacaggtattatgtttacactttctgtcagtggcagataagtctgagctaaacaaataacagccccttctcccacttgaagcccagctttttttaaaacatcaaaattttttatgtctttcttatctggattggtctttttctttatctcaataggataaactttcccgttttcttccaaaataacatctatctcttttttatctttatcacgatagaaagaaatattaggtttccttccattatggatataacttttcaatatttcagcaacaacaaatgtttccagtatttcaccacttttagcacctgtttccaatgtttcaggagtattccatttagttaaataacaaactaaccccgtatccataaaatatattttaggcattttggtcatccgattgctaatatttttagaaaatggatacaacaaataaattagcccagatgtttgtaaaatagatacccaacgttgcactgttgatacgggtttccctatatctcgtgcaacatctgaaaaattcagcaattgtccgcttcttgcagctaatgctgttaaaagttccaaaaactgcatttcatcaccactatcggtcaaatcgcgaatatcacgttcaatatatgtctgaacataagaactgtaaaaatcttcccaatcaatattttcatcattatttaaggcaggataagagcctcgccaaataatttcataaagttcttttaaatctaaactttgggcttccttacttcttgttgaaatccattcaggtgtgggaacaaatttatcatagaaaggtttttccgccaactcaggtaaagaaaagccttctaaattaaggattcccacccttccagcaaggctttctgatacaccttgcattaaatgaaattgttgtgaccccgtaatccaaaacattcctttttgctttttctcatctacaagggctttaatatacggtaaaagttcaggagcatactgaatttcatcaatcaataaaggagcttcaaaacgttgtaaaaataaagcaggattctctttggccagtttacgattttccaaagtatccaaagaaacataattacgattctcttcacaacatctaaataccgttgttttaccaacttgccttggtcctgtaattaatacaacagaaaaagaagaattcatccgttttacggcgttttcaatagttctttgaatatacatttacaaactccgactaatttatcatctaatattaaaatagtcagaaacaattaaaagtcaagagaaatgcgactaatttatcatttgatgctaaattagttggaatttttatcattttcattttagaaaatgcctaatattggggattttctaaaataaaataagaatttcataaatttcctcatcggtaaatttgggaatttttgaatgtcttttgaagaaaaaatttccctatcggtaaaattttgtaggttaagcacaatatatcagttactgtattgtttagtaatctccgcaaaccaaaatatagtaataaaaaatgtggtgattaagatttaacaaataatatgaatgccaaactaatcaaaatttgggacctgacatcattctcaaaatagcaaaaaattaaatggtaagtgatacagagagatgatacaataaattttatttgtataaattaactcattgatgcaattgcgaacactcttgatgctcgccgatgttattggtgtgatttgaaagatataattaagcagactaagaagcggttgttatgatatccaattttggggtattagaccttcattatttttagaccaatcagctatttccataatattttcaaaatttccccatactttgggatctgcgtggtcaagaacaatgatttggactttctcttttgtgctatttatatattcattaaataatttaaatatctcaatgacgcttttaatgtcatctttattgctacgagcttcgagttctttaaggtcttgcggcatttcacttggatttggaaaaaatacttggcttggctggtcaaacattatgaaattaaatacattgcaattattatttgcaaaatatttatgaaaagcaagcaatattgctaaatggtatgctagccagtttgaagcgcttcctgtttctgataagtaataaggtgtttcattatcactttttttaattttaactgttaagtcattaacttcaaatgaagatacatttttaaattccacaaaatcaggcagcaaatttcttgtataagtaataattttattcaatgcttcataaggctttatttctttatacggatatttgcttaaatccttttttatattatttattttttctaatagtgcttcatctttaactttaaagaaatcaagtaagtttttagcttttgctatatcagaaatgaagtcctcaatgatatttacatttttactcttatctaattttttatacatatctagaattttgtttatatcatcatttgtttcggctattttctcatctacttcagccaattctttatagtttcttgattggtttgtgatacttatatagttcttgttttcaatttcttctagatttttacatagtttgtctatattagatataacaacactatcttggctattattaaggcaaaagtttttgataaattttgataattgaagcctttctactctatcattagataagttgatagtattttctagtaaattaatggttttaagaatagactgctttttaagttcataatctttaagtttgttataaagtggacgtaattctttttctaaagtcaaaatttctttagcaatcttgtcaccaccatcaaatgataatgatatatctgttattttcttttttataatttcttcaagtaaacttctaatatttacgacattatcatctaaagctttctgctttatgataccatatttcattgcttttagaattatatctttatgttgtaacaactgttcagttaaatattttttatttccctctaattctaactctaattttgcttgttcttttttaagggcatctgatttaatcttgttaaacatattttgtgaagtttctaagcctaaagcgacattgaatattttctttaatctgtccctgtaatccgataaatcagacttatataaaaggcaattagggtttgcaacaagagattgggtttgaaagttaaatgcgactaaatctctaaagcttatacggctgctatatgttccttctttattttcttcaaaaaaaggtatacccataatattatttataaattttttgaactcgtctttgttatttacattctgtattggttctatcggagtttcaagatttttacctttttcaaactgcatacagaatccacttttaggcagattttttctaataaataacatttcttcgtcatcacataaaagtttgataccaaaccaatcaacactatctcttataatgccaataggaattttgttttcactggcacataaacaataatcggttatatggactattgcagattttcccgtttgagataatccgtgaataacatttactttgccttcaacaaaatttatagtttttatatcaagctctttattttgaggccataatattatttctttaagttgtatattcattatagactaactcccaaaaaattgagaaaacgaaacaggtcaccattagaaaataacattcctaaacgctcagcatttataattaatttatttttatgatttggtaatttttgaacagtgatttggatatcaccttcatcatttatagatatcaaattaagcctaatgcaaaaaagcagacaagtcattgtatactctttatatcttaatatgtttgtttgatatgttccgaacaacttatcattctcatttatttcttttatcagagagtctaaaacatttttcctttttatacattttcgaaaattactgtttattataatgggcatcattgaaaaaatatgaaagatactaggaaagctgttattggtggcatttcttatgtatgattctacaaattttgcaatgatatatgctcctaaggcagggttctgaaaatcattgcaatatctatcataaatgttattattgctcatttaatcgtaccttgtagtctgggtgccaccctatagaatactctatatcatcatcttgattagctagaaagttgtatgcccctcttgatatacatttttcattaccttgtatagatactccagatatatacactttttcttctaaacagtctaaataaagtgctttacctttatcttcactattcaatgtaggttgcatattcacacgtaacttcttttcattccaagaattatataagtttgaataggtattattgagatcttcttgtgaaaatcttccatctctgaaatcattgtttcttaagtattcccaagataggtaatcagttgttgcagaatcgataatatttttatccatatttataatttttaattgttttatatatctgtctgaataattattatggtttttacaaatttgttcttgcgttggatagttgataatttcgacttctccatttaattttaagcatttttttaagaaatcactgtatttaatttctattaagctaagttttttatttttctcatttacggcaagtctgaaaaaccaacctataatttggtctataaaattattaaagcggttagagcttattttatctgataaattttttattataagatcatttagctcattttggagttctttatgaggtttgtatatttcgaatatttttagtatttgtatagtttcatttttgtgggcagtaaagaaatctctgtaaccagtatcttttatatttttaattctttgtattagtttatgataagcttcttcacaatcctccatattttttgcattgttaaatagaattaaatcgtcatcaacttcatttctacagaccaatgtcagaatacactttgttctttcattaaatttatcttttttattaatatataaatttacccaattctttagtgttttcaaaaaatcaggagcggtaactctaaatataactttctctttctcctttacttgctcaagaaagagatatccatagtcatctgaaaccacaacatcatcatctttttcaattaaaactgttgatagcttatcaattagataacctaatcctctatatatttgattagcatatcctaaaaaaccatcaacgctatcagatgggttatttctcattattattgcctcgttaaaattctattattagtctataggttcatttgaaaaagtcaaattaattttactaatataatatgttatatatcaatgggttaataaaaaattgtcaggtaaatatctgaactttgttttctgtttatgcgggattttttattgttgtttgcattttaaaggcgtgctggcaaagagtttatttcacaaattcaaactattttagcatcaggtaataaaatagtcgaaatttttatgatttgaacgtaacactacctgcattagcagatagatgtagacattccaaccatgccgtaaggcttgcgtagctttagtctgtgcaaatgaagttcgaaatggttaataccacttgcgtaaacaggtagaagtttatcgttcatcggtaaaatttggatttaaaagtaaaaataataaaattaagtgcgattctctgcaaaaataatacaaagaactgcacttattaagacaaattattcaaaataatttaatttgaaacaggagaatttgtttcgcttgcaatccaatctcttataaaattttctgttttagagatattttctttctttttctctttggctgaaccatcaaccttatttgtttcagtttcaatccaacaagttaaccaatcccgagttttattagacatctttttttctcctctttcatttaagattttagtattttggttttccattatttttctccataaaatttcgttatttctttaattatttttgtgttataatcgtttaaagcctctatatcaggcatcttcattgtgttatgtcattgtctgccctccgttaaattttcattatttccatccgtttatatcaatggtttcatccctaacggagttcaacaattcgtcaacttcggagcaccataataaaaacagacccctaacgggtctttttttttatggtaaaagcacttgctggtttgtaacgccgcaacagtgagctaaaaaatgttacaaatactttgacaaaagcaaaattattgaacctaacggcgaaatttacgggtagaacataacctttacagtctcctaaatttgataggcggtaaggtttttatgatataatttaatttaaaattaaaataatgggagcaacaaattgctccctcatcttacggcatttccagccttattatatatgtgttgaccgtctaattaatctctgaaaaaaattacgtcattcacataacacccaacattatgccgatattattgttgaaatgtcaatagttatattatagcctatatcaagttgcttgcatatacgggagatagccatgaaatatcgtctaggtcttgatttgggtgttggttcaataggaagtgcagtaattgagcttgacaatgaaaataatgcaaaagatattattgatgcaggcgtccgtatttttgaaatttcagaaggcgccgaagagagaagacttaaaagaacagcccgcaaaaatttggtcagaaccaaaaaacggttggaactcttagctaaaaagctttttgaaaatggcttgtggccgaatgaaaatcctgaaggaaccgataaactaaaaagcaaatctccttataaaatcagaacagatgccctaaacgaaaaattggcaagcccttattatgtcgggcgagccattttgcatatagccaaacatcgcggagcaggttttgtctcggccagtgaagaaacagaagaggaaatcttagaagagggtgaaaagtcaaaagctaaaaagtcttcttatgatatgatgctgcatcatttaaaagaaacaaattccagaaccatcggtgaatttttttataataaaataatctccggcaaaggaaacgacaaaacggttcgtcagaaaaaatatgctattgaaaaaaatattgtagattatgcaatccctcgctacctggttaaagatgagtttaataaaatttgggataaacaaactgaattttatccgcaaatgaaaaaagaaaatctaaaaaaagaaatttacgacattttattttatgaacgtccggcagcgccttacgctacaggtaaatgcatttatttcagagaagaagaccgtttgttaaaagcccacccgttatcggaaatgcgtcgtatttatgaagaagtcaacaacatccgcattttaaacgatatgaacaaaagaaaattaaccttggaagaaagagattctatcgttaataaactattgctaaaaggacaaaatgcaggtaagcaagcaataaaaaaattgctcaacttgtcagctcaacacaaaatttctttggttgatgacagagtaattaaggcctatttatattctcgtcccgaatttgccaataacgaacatttgcggaatatgaacgaaaatgagctttcatcttttattgaatttttggccgaacctaaaatgtccaaggataaaaatgctcgtttatacaacgaagatgcgttaatcgaatatcttaaacctattctgaagattgatgacgaaaaagaaatcggcaaccttttaaccaaactgcccaaagggcggggaatgttgggtataagcgccaccaaaattattctcgaaaaattaaaagaagatgtagtaacacatcgtgaaattaccgacaaattagcagaaacggataaacgatttatggcagaggaagaaattgcccgccaaaatcagggaaaatgttttcagcttccctattatggagaaattttacaaacagatacggctccgcttccgccgttaatgataaataacaacaaaagccttaaccctgatgaagtaaaatggggcaaaattgccaatcctgccgtacatatgattctcaatcaaattcgcttagttgttaatgaaattattaaaatttatggcaagccttatgatatcaatattgagcttggtcgtgatgtcggtatgtcaacaaagaagaaaaaagaatttgaaaaccgacaaaaacaaaatgaaaaacttaatgaagaagctaaaaactatttaaaagaacataaaattgccataaacaataaaaatattttaaaatataaattagccaaagagcaaggctggaaggatgcttacaatccgacacaaaacatttcttctgtgtttacgggtatggaaattgagcatattattccccaagccaaaggcggaacagatacatataacaacctctgtttagttaactgcaacgacaacttaaacaaaagcgaccgatatgcctatgaatatttcgaagaaacaaaaacacaagaagaaataagagaaatcttaaaaaatgcccgttcccgcacccctgagaaatcctggcgttttgaagcagatgcccgtgaaaagtatgaagaaagcggcgataaagaagagagcacgcgttatctgacggatacccgctatgtggcaaaaatggcacagcgatatttgcgggccattgtcgattgctctgattgtgacgaagttatgcaaactcgtattttggcggtcaaaggcggacaaacggcaaaattacgtcaacattggaatttatatggtctggaatatgatttgatggggcttgatattccaagatatgtcaattgccctccttactggctggaattggatacaggcgaaattatagagggaataaacaaacccgatattgatggcaaatggaagttttttgataaggcaaaaaataaagaatggcaacccaaaccccgtattgaccaccgacatcacgccatggatgccataacggttgcttgcgcaaatcgcggattgattcaaaaaatggcagaagaaaatgacattaacaaaattcattatcctttgcccttaacttccgttaagtctgtagccgatttcaggcgaaaagttatttcctgcctaaaagatgtcaaagtttcgcataaacctaatcacagcaaagccggacaattccataaagaaacaggtagaaccgttttgtgtcaaaaccctgatgacccaaattctttaatcaccgtttattctcgcaaaattttacaagtggtaaaatcagccaaagacttaacgaaactgcttattcccgaaacaataaaaaatgaatggcacgaagatattgcagagcataaagctaaacaggctaagttagtacaagattttgaactctatatgaatacggcggaacaaatcttaattgccgaaaatgagcaaggcgtagctgacggtaaaaaggaaatcaaaattaccgaaggaagaattttgttaaaagcgttccgcattattcaagacaaaggcttatggaaaggcgataaattcagatgttattccaacagctcatctatgataaatattcccaaacatggtgtcgcttatgaggctcaaaacaaccattgcgtagatttttaccaaaaaaacggtaaaatcggctgggaagttattaaacgctttgatgtaaaccagacagattttgagcctcaatggaaaaaagaaagcggaaaaattatctggtctgtccaacaaggagatattttagaacttgatacacctgatgaatggaaacaatataccgataaagaaagatgtttggcaaaagtgaagaagtttagtgatggaaaaattgcaattgatttgatcaccgatgcccgtatgacttctcccaaaaataaagaacttaagtatatgtttgtaaatactatttcagataaaggattaacttatctaataaatcacaaaacacgtaaagttgaattgacgccattcggcaaaatcaaaaagaaacataaggttctctggaatggcacgaagacagcggcttgaaactctgacaggatggtcaatgatgtggataatctgtatgtttgacgttcctgtccgtaccaaaaccgaaatgcgtaaggcaacaagatttcgcaatctattactcgataacggtttcgtgatgaaacaattttcggtatatattaagccggttaaaagcttgtctgtcggacaaacaaccacgaaaaaacttgcaaaatttattcctgataattcatcagtgtcattcatctacattacggataaacaatatctgatgacggaaaattatttaggcaagaattttgaagaaaatgaagaagagattcgcgaaaaaaatggtcaattattgttgttttaagcataaaaaaatgtgtttttaaagctaaaataaggccttgaaattattttatttcaaggccttatgctattaaataaagtatcagagattaattaaacggtcaactataacaatgctacctttattaaacaggttccgtcgaaagtatcagagattaattaaacggtcaactataactgtgctgtttataaacaaaacgacgatggcaaagtatcagagattaattaaacggtcaactataacgacaaaccagcaagaccggccatctcgccaaaagtatcagagattaattaaacggtcaactataacaaggtaccgtacaaccagtcagtcaaacgaaaagtatcagagattaattaaacggtcaactataaccgcaaacgcttaacctgattaataggtttaaaagtatcagagattaattaaacggtcaactataacacatgaaggtcaaatcattttgcgcggcggaaagtatcagagattaattaaacggtcaactataacaaattgaataatttcccggtaggttggaagaaagtatcagagattaattaaacggtcaactataacattcagattgataaaactgacgcagatttgaaagtatcagagattaattaaacggtcaactataaccggtgcttctgacagcaattctccagaaataaagtatcagagattaattaaacggtcaactataaccacattccaacatgaacctgataggttttcaaagtatcagagattaattaaacggtcaactataactatgtgtcagaagaaattatcgtaaaattgaaagtatcagagattaattaaacggtcaactataactgaattttatcgtaaacgttaaaagttttcaaagtatcagagattaattaaacggtcaactataacactcggccgcgtcgtctatatcctcaacgcaaagtatcagagattaattagacggtcaactataaccgtcggcctgaactccagcacatagcgaataaagtatcagagattaattagacggtcaactataacaagcgtcatctacataaattttaacgctcaaaagtatcagagattaattagacggtcaactataactgactataaccagtgtatggcactgtctctaaagtatcagagattaattagacggtcaactataacctcggacgatgtgactgataatgttctgaaaaagtatcagagattaatcagacggtcaacaccctcatgtctaatttattttgacaattcatattgaggatatttaagcaatacttttttatcttcaaagcttgatactaagctgccgacaaaatcgtatatcgcatcattcaaagtaacagctcccttacctgtaatcgccggaaaaacaataagctttgctaaatttctttttatttctgcatttaattcaatattatcagtattgataattttatttacttcatcaaaaactaatttatcggctattgctctgaatggttcaatcaaatcatcaaccaagggcaacgaattagtttttccgcaatgctttaaccccaaataaggcaatagaccattgccggaaacggctctggccaccatagcccttaatatggtataagcataattaagcaaaatatttatatcgggattcaacctgttgcgcacaaattttttgccgaacaatgatttaaaatataaggctgctgccattccttcatgattgcgggcatcatcgcttagagtatctttggctaaaatttttaatctttcgatatttttgttatcaggaaaaaaatattccagaacagaggcttgatttaatattttatgctgaacaatactcttccataaatttttttgcaatggtctggaacaatctatttgctgctttattcgatgtgacgttaaccaatgtcccgtatatggcacggctatcgttgacggcaaatattttttgtcgcaaaatataatatttccaccctgttcaataacggcattgactatatttttagatataacggtattatctgccgacaatattaaagataaaatattatctaaaggtatctcttgtttttgtttcttctcattttctataacaagaaatccccgatataatgataagaaaaaaccattatttgaaatttcaataatttgtctgtccattatttcaatctcctgttatataacgcaaaatatgcgaaaattatgagtgctattctccgcaaaagtcaatatgtttcatttaattcctacgttaaacgccggagccgcatctctgacgaagttcaacgattccacaaccccagagcaccatactaacagacggctttcgatttttgttgaatattcggacaaaaagactacaataaacggaaatttcgcatactattgagattattaccatattgtctaatttaaaattattactgtcatgggatacatggatttcttagaacagagaattattatcattccgccgggaatgtggtcttttctgccgcattggctttccctcgattttatcgggaaaaaccgccgggcacccaaacttttgcaaacacggctgccgccggccgatgccctgaaccgacgccattgcggacaatcgcagcaaagcgccgtcatcaaacgccgggaacgtcttgccaaaagcaaagccttgggaaccgaacgcagaaaacatgctaaaatcaaaaagaaaaaagccaaacaggtagcggcggcgtacagtttcaaacgaaaaggaaaataatattctcccaagaacgcaaaaaggtttctgatatttcagaaacctttttttgatatgtataattgcagagaaaattagacttccgcacaattttccgctatacttaccccatgtcaaacgatttgtcaaaattgctgttgagctggtatgataaaaacggccgccgcctgccttggcgggtcaggggcggcgctcatcccgatccatacgtcatccttgtttcggaactcatgctccagcagaccaccgtcaaaaccgtcattccctactttcggcgttttatggagcgttttcccacggttcaaagtctggccgaagcgccgctggaagaagtttacttttactggcagggacttggctattatacccgagcccgttcgctgcatgcgacggcaggcatcatcgtcagccaatacggcggaaaatttccccaaacccggcaggaagtgctcaaactcaaaggcatcggcaattacaccgttgccagctttttggctctggctttcaatcagcccgaaaccgtcgtcgacggcaacgtcattcgcatcatctgccggctctataatctgaccgaacccgttgacgaaatcgccggactgattcgccaaaaagccgaagcgctgaccgaccggacatgtcctgccgactatgcctcggcgataatggatcttggcgccggtatctgcacaccgaaaaaccctcagtgcctgctctgcccctggcaaaacttctgccgggccagaggccttgaaaatctggaaaacattccccggcgcaaaaaaagcggcaaaaaagaaaaaaccggcttcgtctatcttattcataataatcaaaatgaaatccttatccgccaaaggacagaaaaaggccttctttccggactttacgaatttccatggagcgaagaaaagctttttgccgaagcggaagacaccggactggaagtttcgcacgtctttacccacatcaagctcacactgcgaatatgcctgaggcaagacaacaatgttttcgacaacggtcgttttgttccgaccgccgaactctccgcctaccctttctcaaccctgatgaagaaagtctatcagaaattctcagcccgctgaacgaatttccgacatacatacctgcaggtatataatttttgttgcaatctgaaaaccgcaagctaaaataaagtcataataagttccgataaaactggaaattaaccgccggaagtattataattatattgttcacatcttagggagggccgcatggaagtagaaaacatatcactcgaaaacctgcgtattcagcatgctcatttagatgctgtcattaaggaagaagaatcccatatctggaaaaactgcattaagattgaagaactcaaaaaacaaaagctcagaaaaaaagacgaaatgctgcgccggattatgcaaacagcagaagcttaaccaaacgcatactttctcgaaacggcttctcggcaaagagcagccgttttttaatggatatttaaatacgccaatgctacattaaaagtaagataaacaatttcaggaaaatgccgatgccgatactgattgccttgctgattgccctcaccggtttcaatgctgccgccgatgtccgcttcattaccgaaacggaaaacaccgccgactatgaaaaatttcagaaactcaatcccaaatatgccccgcaggccgacaactatgcgctcgacgacgaaagacgctgccgcgcggaaggctatacctaccaaaaatgtgacgacggcatgcttctggccgatccctgcccttatgaccgcagcctttacgccaactgctgcccggacacttaccgctattcagccgccgaatgccgggccatgggcaaaggcctcggcgaatattcctgcggcggtttttataaatgccagtaaaaaaacacaaatctccctcaaatgtataaatcggcaaagacactgacttaacagtctgtctaatcagtttataaatttcaaaataatgtaaattgataaaatacctaaaatatttgtcatttttttcttaaatttttgtcaaaaatacgatatatttaacttaacaaaaaaattatgaagtttattattagcaaactgacatttgtaatttgattcgctcaaattatacatttttagctaaaataataaacttcccaattaaattatgtttaactaaaaattataaattatgagcaagaaaacagcaacagtactgatcattttgattgtactcgtatttggatgttggagagtatctcaagactcctttgtcaaagttaatcccggacaaagagccgtaaaaaccgtatggggacaaattaaggattcatcctatgttcccggtctggtatggtacatcccctattctcggcacatgggaaacgaagttcaaattgtcgatgtccagccgcagaggtatgaatataccttcagcgttcggacaaaagaccttcaaaaaatctccctgaaatgtgccctgttgtgtgaaatgaatgactctcaagtacacaagatgtttgaaaaatatcagggatacaaacagtatgaagagaaagtcatcagagacatggtaaacagcacaatgctgactctatctgcattgacagacatttggtcgtttgtcggaaatgaagaaaaaatagtcacggaagctgttgaatacatcgtccgggaccagttgctgaccgaaggacttgtcaaagtcaaaacatttcgtttactgagctatcaagcttcccctgaattcgaaaacttaattgaacagacggttcaggcaaaacagggcgaaaagcttgaaaaatataaaagccaaatggccaaacaggcaacagccagagttaaggaagaagctcagcaaacttacgaacgcatggccgcggaagccaaagctcagggaattgaagttgagctgaaagcaaaagctttgaaaaacaatccctttgtggcgcaatacgaactggccaaagcgattcagaaatggaacggtgaactgaatttgcctcagactttgacaatgatggagggagcaaacagcagcggaacgattattccgtttctgaaaataggtaaataatgtttaatttaaatcaaattgcatatggaattattagcattatcggcaataatcacaattttgcttattgcctacaaaaaagaaatcctttctggagtaaaaaaactttctgtcgaaataaaaaaaatcaaaaaagctaaaaaaactcctgaaaaacctacagaaaaagctattaaggagtatattataaagatagtagactacaattactcttttgtgaaactttcagacggtgcctgcatcaaaaaagatgatatatggaatctctgtagctataatgacaaagtcagaaaaatcatctacccatcgggaaaagtagaatacacgccggtatttgaaaaagacagaaaagaatactaaactccagaataaaaaaaccgccggcaacaaccggcggtttttcatttaaaaattctaaaaacttagaatccttcagtatctaagcgcttccgcagctgcttacgggcacgtctgacagcctctgcctgacggcgggctttcttctcagaattcttttcgtgatgacgtcttaacttcatctcgcggaaaatgccttcacgctgcattttcttcttcagaaccttcaaagactgagcaacgtcattaccgataacagtaacctgaaccacttaaatcaccccttttcaacttatcttaaggttaaacattgaattgtcttgtaccacaggcttttttattatgcaacataaatttataaagaagcctcaaaacagtttttattaagaatgaagataattagacacattctttaggcgatgatattcggcataatcttagcctcaacgctcttaattttggtcttcagaccagaacgaagcgtattaagctgttttgcctgaaaaaagtcaatcgtctgatttttggcaactaaatgtctgatatccgaacaaacgcggcgctcctcgagtctcagttcacaaagctggtgctggagtttgcctaaattgtcgttatttaacattaaatagtcccttcttgaaaaaaaaacgatgaaaacaaaaactttttgctggaaataatttcctaaaatttgtattagattatacagtatatttaagaaaaaagcaacaataaagaaaactaggagtttttatatgagcactaccaaaaaaatcggcattttaaccagcggcggcgactgcgccggattgaacgccgtcatcagagccgtggttaactctgccagcaggctcggctgggaagtctacggtatcaagaatggtacggacggcctgaccgaaaagcctctcgcctacgaaattttgaccgttcataacttttccgataccccgtggccgagaatcagcggctcttatctgggttcgctgaacaaaggcgtcaaaatggaatctctggaagaagtttccaaacgtttcggcgaaggcgtcaaaactcttggtttggacgcaattgtcgttgtcggcggcgacggcagcatgaacattgtcagcaattactgcaaaaatgccggcgttaaaatggtcggcatcccgaaaaccattgacaacgacacgccgattaccgaattttcagtcggtttcaactccgcctgtcaggtttgcacctcggccatcgacagcctggacgccactgcccgttcccactcccgtgccctgattctggaagttatgggccgcgatgccggacacctggccatgcactcggctctggccggcggcgccgacgtctgcctggttcccgaaattccttacaagattgattcgattatcgaaaagctcaaggaaatcaaaacttccggacgcagccatgcagttctggtcgtatccgaaggcatcaaaaccgaaaacggcgaacatattaccggcgccaaaaaccttatcggcgaaaacgtttacggcggcgtcggccagtacctgagcgccgaactcaacaaacgcctgcccgattttcaaacccgcgttaccacattgggacacctgcagcgctccggcattccgaccgctttcgaccgtatgttagccgccattttcggagccaaggccgttgaacttctggaaaaaggcgaaaccaataaaatggttgtctgggaagacggcgaagcaaaggcttattctttggaagaagtcgtcaagaaaggtaccactctgttggatgttcatggcgactatgttaaagccgcacagaaaatcggcatgtatgtcggcgaaataaaagcctgacaaaaaacactttaagctcccttcagggagcttttttttgagacaggaaagccatgcgcttagtgcatggcttttctaatacaaagacagcctctccgaagaggggctgtcaactttaaccagaaacggcttatttaacgctgtcaatctgtctctggatttcagcaccgtcaatggtctgaagctgtttgccgttcaggaacagagccggaacaccgttaacctgaattttgccggccaaatcattaatgctgctcagagcattgttgactttggcagaattcatgtcagccttcagtttttccatgtcgacaccggtcgaagcaaccagttcgtcaactttggcttcatccggtctgccttcaaattcaaagatagctttgtaggcatcaaagaacttgccctgttcgttggcagccaaagccgctttagctgcatactgggaaatcggcgcaacgaaagtcagcggcttgaaaacgattttgatatccggattggcttcggcaatcttcttaaccgccggataaaccttgtggcagtaatggcaggaaaagtcaaagaactcaaccagaaccgtcttggcatcggcagcaccgataaacggcgtgttggcatcattgttcaaagccggcaggttggcctcaatcatcttctgagcttcggcagcagcctgttctctcattttctgctcatagttctgcatggcattgatgataatctcgggattattgttcagggtttcttcaacgctgagcgactgtttctgagcgcagcagtggatgcacatacccagagcaaccagagctacgaccaaagccagcagcgaaacgtaaagtgaattcattttactcattttagtatccttaaattattatataataaaacacctaataatttagccaatctgaaatatatttacaagtctaaatttatataataattttcgttttccgttcaaaatgctaaagcttttttcataattaagacgtatgatattttaaaaaatttaaattaaggaagcggatatgttccatataaaggtatctttgtttgcacgcaccaaatcgcttgaaaacaaaattgacttgtttcatgataaaatcattgacgcggccatgacgttcaaaaaggccatccgcgtatttctgaacgagaaacgcagcgagaactatcgcaagctgagcaaacagataaaaaccattgaacatgacgccgacgccctgcgccgcgacatcgaaaacaaactttatatccaaaatctgattcccgacctgcgtgccgacgtgctgcatctggttgaaaatctagataaaatcatcaacaaatttgatgaagttacctacaaattctacattgagcagccggacatccctgccgaataccattcgcgggtcatcgaactctgcgaacaggtttccgactgcgccgaaaacatggccattgcctcccgtgcctttttccgcgacttcagcaccgtccgcgactactcgcagaaagtttacttcattgaacatgaatccgatttgacttcaggacgcatgctggaagccattttcgattccgagctgccgctggccaacaaactgcaactggattcactgattaccgaagtcgccgatattgc

SEQ ID NO: 351 - DNA, 23468 bp, synthetic construct
  misc_feature 1..23468: note = Synthetic
  source 1..23468: mol_type = other DNA
gaacttgttcgttacaagattgctcaattgaaccgaatggagaataatcttccgcgttcaaaagcgctacgtttggctaaaagaattcgcccgattatgtccgccgcatcaattgacaaactgcggcttgggttacacggtaaacctgacggcacaaaattttgggtcgaaggcggcggaattttttacaccagctacattaagtgcgccgttccgttggcaaaggcggaaaacttggaaaaagtgacggaaattgttacgtatcacgggtgcgcgtcttgcggcaatattgtgccgtcggtgtatgaagtgttagcgcaaattccggaaaacctcagagatacggtaaccgcgtttgagctttatgccgatgccgattcgtgttttgatgtgtataattccgagcttgacaggcacgtgcttaattgcattttgtaccgcggtgatgttccgctcaatgtggctttaaagccggttatgtggtgacaatcgcgtaattgttactcccgatagtttgcactatcgggagttttgcttttaaattaacctaatggtcagattaaaaactttgttatcatatttatattgtttttgccttgagtgttaagcataaaggtttggttaatttgtttgaaaggaaacaatatgaaacagagttatgacaataaaaagtcgggtgccgcatggaaaaccgttaaaaatgcatcgtcaggtaaaaattgcggctgcggttgcaataatatgaatgatgatgacgatgatgaaacggttgaaattgaaaccgcggaatggacttcaaaataaataaaccttctttttttgtaataaaccgttttctgaaatgtaataaatcgttttctgaaaacggagagcaaaatcccgaagattgcgaggcaattttcgggataattctttatcgggtagtaattttttattaagcttttagtgttttaatagactaaaatgaaaaatattataacggtgtaacgcgattgttatggcggtatgtgtatgctcaaatttttttataaaaaaacaattgctttaattttaagcaatattttaatatcggcaactgccgttagttcggcgcaggcatatatgaggccgctttctccgtataattttaatgaaatgtataaaatggcggcgcgcggcgatgtggcttcgttgcataaggcaattagtcgcggattaaacattaatgctatggatgcaaacggcgacaccggcgtttgtgtggcggtaaagcgacgcgatgccaaagcttacaacaccttcagagctgtcggcgcttcaggttctccgcattgccgatggaatatttcgcattgggacagttttattgattcagcaccggtacgagccggtgccaaatggcgcagcgccgattatacaatgccggtttatgccggtgccgctgaaaaatctaatatgtggtggtggataggcggcgcggctgcacttggcggcggtgcggcgcttgctttaggcggcggtggcggcggaggaggcagtgataataagccgaagcctgccatttgcgatacgacggaatacccgataaccggcagttgtcctgataacggggtttgcggtcaatgcgtcgattcggcgggcacgcattataaattaaactcgtgtaatgacggttataccttaagcaatgataaaaaatcttgtatacaaaatcaaaacccgacgacatgcgatacgacggaatatccgataagcggaagttgtccggataacggggtctgcggtcaatgtgtcgattcaacgggcgcgcattataaattaaattcgtgcaatgtcggctatattatggcggaagacggaaaatcatgcgcgcaaaagcagcttgaaccttgcgataccgcggtttatacgatgacttcatgtccggataaagcttattgcggagattgtaccgattcaaacggaaaatattacaaatttaacggttgtcagagcggctactttgtgggagcagacggacaatcatgtgtggaaacaccggaacaagtaatctgtaataccgcggtttataacttaaccggatgtccggagggagcgctttgttcgccgtgtacagatacaaccggcacctattataaatttacggggtgtttgggaggatatacccaaaaacctaacgaagaaacttgtgttaaagtcacggaaagctcagattctgatgttgccaatgataaaattttggttattgatgagaataataaagtcagtgacggcgataccaaaattatcgggttttcaaatgccgacagtccaaactcaaatttgtttaacgctaaaaccaaagacgctttaataacaattgacgcggttaataataccacatttaagaatcatgatttggtgggactcggtccgattaatgcgggcagtgtgcaaacggttaatgcatatgatggcaaaaccggcgacattgttatcaaaacctattacggcacacacagtatatacggcatatacggaagcggcactttgtataattcattgaacggggtgggtaatattgagattaactcacagggggaacagcttaacagcggcacgcaaataagcggtatgcattcatatgattccgacaagtatttatataacgctttcggcggcaccggaaaaattaccattaaggtggcggcaggttatattaacggtatgaaaggggttaatttaattaatgcttataatggcggtaacggcgagataaatataacctcgaaagccagagatgttgtgcgtgacggttatattcgcggcatggctttcagctcaaacaacggcggtttggttgccaatgcttatgcaaatgatgattcggtaacaaccggtacaattactattaataatacggacagtagagaagccaaaggaatcagcggtggcaaaagcttgattgattgggatttgagttatcgtaatatgctgatatacaacgcgtacggaaaaaacagcaccggtaaaattataatcaacgggccgggcgccggtattgcggttggttatacagacaatcaggtttataacggagccaacggcggttacggttatattgaaatcagcagcgacagcggagcttattattccggtaatattggcggaatttttttatataatagcagtaattacggatataacggcagcagcggcggcaccggtgaaattaaaatttcatttccgaacacgatttatgaccaatatgatgataaaaaaatcatatacggaatatatggagcgatagacaacggctcaccggacggaggcaagggcataatagacattaatgtggcggataatgaggcgattggcgtatatggcggcggtaactataaagattcaagcattaaagttgtaagcaaaacaaattccggaacggtaaaaggtataagcaatgtgcgacatgtgcagagtggcaatacgaccgaaattaaagaaagttttgccagctcttatgtgaaccataataacgggacagtgacggtggaagcaaaaggagctaatgcaaccggatacggtatttattcaaaaggagttaacgcggttaatgatgttttgggtaaaatcagcgtttcaagcacagattccggtaatgcttatggtatacgtaccgaagccggtaaggtgattaataacggaacgataactgtttcttcagaaagcggcaacgcgtatggtatttgggctcgcggcggcagtgtcgaaaataatggcagtattacggtaaatgcgcctacagggcgagcctacggcatttgcgctcttgggggcgcgacggttataaatcgcggagaaattatattaaacaatacgccatgtgagggcgtctgcgacggttctgttgccaatggcaattatattaagtttgatgattattctacgttaagtaacgcttcattaatttcagccgccggtgcgcttgattttgatgccatgggcgggcgggtgatgcttgcggaaggcgggcggtttgccgccgatgagctttccggcagattgtcggtggcggcagatattacggccaaagggtttaaaaacgaatatactgcagctgacgcgatagcttccgctgacgtatcaagacttaatttgcagtcgcaatcggcgttgtttgatgccaagttggcggaaaacgggcgcgatgttaccttaaccatgaagtcgtttaatgaagttgttaaaaataaatcattggcaaatttcctgcaaaataattatgccgctcgaaacaatgaaaatttgttcagcagtcttaaatcattagaaaatgttgagcagataaataacggtttgaacaaatttgccggtcaggatttgttctcgcgcatggcgtttgaagatttcaccatgctccgcgaacttaattttgatatgaacgagcagatgttcggcggcaataaaaacgagtatttcagcatcagcggaaacaccgccccatttgcgtttgaaaacaataacggctcaaacagcaggtggtcgcttaccggtaaaaaatcaggcgataccacctatgccttgggctttgcctttaccgatgtttacagcaatggtgccgataatcaaaaccgccgcgcggaccggatgtttaacataagcgcgccggtcggctacaagcttggcggcttaaagatggtcagcacgccgcggttcggttacgcttacggcacctataaccgcaaaggctttaacaatcgcgattataaaggcacgctcagcaagcagatgttcggctttatgaacgaggcgcgcttgccgtttaaggcggcgggatggacgttggctccgtcagcggaattaaacatggtaaattatcgcacggaaggcgctgaagcggataatctgccatacgctttgcgagtaaaagagcagaataattactctttggaagcagggctcgggctgcatgcgggtaagcaggtaaactttgatgaacaaagcgccttgagttttaacttgagcgcggctgtatatcatgagtttggcaatccgtatgaaatcaaagtgacggtaaacggcatgagcggcaattttgcggtaaaagatgaaaaccgcggcgccaaccgcgcggtgttgcgttcgaactttgagtttacgcgcggcggcgcaaaattaagcggtgctctgatgtcatactttgaccgctcgcttaactccaaagcctcgcttaatctgaaatacgggttttaagttgtaaattgtttatatgttgtaagtttatgcttgcaaattaagcggattgtcttatattttgcatagttaattttaattgtttaaggagaaaactatgcctttgatttctatgcgtcagattcttgaccatgccgctgaaaacggatacggtgttccggcatttaacgtaaatgatatggaacaaattatcgctgttttgcaggccgctcgcaaagttaatgcgccggttattttgcaaacttctaccggcgctcgcaaatttgccggcgatccgatgttgcgccatatggttgccgccggaattgaaatgtttccggaattgccgatttgtttacatcaggatcacggcgcttcggttaatatttgccaatccgcaatcgtaaacggttattcatcggtaatgatggacggctcattggaagctgacggcaaaacaccgtcttcatatgaatacaatgttcatgttactaaagaagttgttgctcgtgctcatgctgtcggcgcatcggttgaaggtgagctcggcgttatcggttcattggaaaccggcaaaggcgataaagaagacggtcacggcgcggaaggcgttattgaccgcaagcgtttggtaaccgatccggatgaagcggctcgttttgtggctgaaaccaatgttgatgctttggcggttgcggttggaacttcacacggcgcatataaattcacccgtaaaccggacggtgatattttggcaattgacgttattgaaaaaattcataaaaaactgccgaatactcatatggttatgcatggctcatcttcagttccgcaagaattgcaagatttaatcaacgcttatggcggcgccattccgcaaacttacggtgttccggttgaagaaattgtccgcggtattaagtcaggcgttcgtaaagttaacgttgatactgactgccgtatggcgattaccggtgctatccgccgcgtatttaccgagaatccgaaagaatttgatcctcgcaaatatttgaagccggcgattgaagagatgcaaaaagtttgcgaagctcgctatattgcattcggcgctgccggacatgccgataaaattaaagttgttccgttgtctgaaatggctaaacgctattaattgacggctctttggtacttaaaaaccgcgggattttgttccgcggtttttgttatgaaaaaggctctgattttcagagcattgaaagtttaaactaaagcttagtcgttcagttctatatttaatattccggcaacattgcggcgatattcttccgcccatgcaatcatggaatcaataaccggtttaagctcatagccgagttgcgttaatgaatagtcaacacgcggcggaatttgagcgtaaactttgcgaaccaaaatacctttttgctctaaaaggcgcaaattggaggttaaaaccttttgggtgatgttgccaagttcgcgtttaagctcgccgaatcgtttggttccgtcaagcaaattttgaattataagaactttccaacggtcgccgaccattttaagagtcatttccgcgagagcgtccggaagatattcagacattattttttactccaacactatataaaccggcaataggtacacaccggatactatcgcactttgaagtgcgtactttatttttatatcactttggcgtaatttagcaagcaaaatttataacatgttaaaaacaaggacaaaaagtaatgaaaaacttaaaaatttcagcaatggcaatgctcatgtgtttaggcgctgcaaatgctcatgccgcaggttatcagttaaacgaattttcaactaccggcttgggtcgttcatttgccggtttgggcgtcgtcggtgatgacttttcggcgatggcttataaccccgccggtatgactttggttaaacgttccggttttcagctcggtgttgccgcaactgaaattgcttctaccgccaaaactaaagaaggcgatgatgaaatggacttttttgtgccgttgccgagtatgttagggcaatacaacgttaatgataagttgtttttaggcgccggcgtttatgttccgtacggtttggccacccgctacaagagcgacagtcatgttgccgccgctgaggcaggtgttcgccgctcggagttggaagttattgacaccaatctttccgctgcttataaggcaagcaacaaattgtcattgggcgccagttttattttgcgccgcatcaaaggcaagctgacctctaatatcaataaagatgttcctggaatgggtatgaccactttgggtaccagcgacttcagagttaaaggttggtcaacatcatggcacttgggcgcgatgtatgaatttgatgaaaacacccgtttgggcttgtcataccgctttaagagcacccaaagcccgaaaggtaagcactacattgattactatgctaatccgattaccgccgctttgggtattactccgggattgcataaatatcactctatgtcggatccggaattgccggcaagctggattttatccggctatcataaatttgccgaaaaatggggcacttcattcacggtaaaatacgttcaatggcatcgtttttatgaatttccggcaaattcaaccaatccgatttcacccgacaatggtgttgaatatcgttggaaagatgcttggacctttgctttggggcaggattattacttaaatgacaactggaccttgcgcgttggtaccgcttatgaccaatcgccgtcacgcgacaatgcgtatcgcaccaaccgtattccggatactaaccgcgtttggctttcggccggtgccagctatataaccggaaatcatcagtttgactttggttatgcccacttgtttatggagcatggtcgcacccgtaacagcaatccgaactcagatcaatacaaagatgcgcaggcaaaatattacagccacagtaatatgattgcgttgcagtatcagtataaattttaataactttatttaatccaacaaaaagtccttgtgcttgtctggttgcacagggattttttgtggcatgaagccatagatttatatgcaaaggtattggtttaataccacataacgaatatgagtataaaaacaaataaaggataatttgaaaataattgacaaaattttttatagtggtaggctgtaagtgtaagcataattattaacactaaaaattttaagtatggaacttattggaattattatcatcttgttgctttcgtttattcccgcgcttattgccggaatagcaaagggctttcagcgggcgatgctcgtttcaatggtagttaatttggcggttttagtcattttctgttgctttgtgattttttcagaagtgacggacgaaagctatctgttctttttgccatacgcttgttattttgcggtaaaactggtgttttatcgcttaaaatacggcgagttgtggccgatgtatcaaggcaaagatccgtttgaaaagatataaggttctttgcagaggtattataaaaggcacaagttttataaaaggtgcctgtttacaaaattacaaaaggtggcggattttccccaccttttggtgttttaaaaaacttaagggaatttttataaatacacagtatcgttataattgtttaacgaaaggaacaactatggataggcaagtaattgaaattatgaatgatggctttatgctgtcattgcaccgaggttttattgtagttgaaaataaagagcagcaaattaaacatgaagttccgcttgataatgtgcttgcgttggtgctatcggccaacaatgtggtggtttcaaaaaatattataaatgcaatttgcgagcagggcagaaatgttattttttgtgataagacttacctgccttccgcaattactatgccatataccggacattggctgattgctccgcgagttaggcagcaggttgaatgctcaaaaccattacaaaaaaacttatggaaaagtattgttcagcataaaattttgaatcaagctttggtgttggaatatttttttccgcagcatgccaatattgaacgattaaaacaattatcaaaagcaacgctaagtgatgatgccagaaataatgagggaatcgcagcgtctatttattttaaatcattattcggaaaacattttgtgcgcgaccgtcttaataatgatgtcaatattttgcttaactatacatacacggtattgcgcgccgttgtggccagagcaattgccggaagcggattattgccatatttagggcttaagcattgcacaaagtctaatccgttgccgttggttgatgatttaattgaaccgttcagagcagtggcagataaaattgtgtttgaagagttaaataagttggtggatataagcaatattgaattaactcctgaaattaagcgcaatttggcaaaagttattacatattcggtgcaaacggctaaaggctgtatgtcattaaatgatgcgctttgtgattttgccggtactttagttgccagttttgagcaaaagaaagtagcgttaaaatatcccgatattttgttttaaataaaataatgggggtaactaaagtcgccccctcatcttacggcattttcagccttattatatatgtgttgaccgtctaattaatctctgaaaaataagccaacttatataacaatattagtatataaaaaatttaattgaattgtcaattaaaatattgtaccgttgcttatatttctattaaaattataggagcttgctatgaaatattgtttaggacttgatttaggcgttggctcaatcggtagcgtggttgtggaattagataaaaataataatcctgaaaatattgcagatgccggagtgcggatttttgaggtatcggagggcgcagaagaaaggcgaacaaaacgcacggcgcgtaaaaatttaatcagaacaagaaaacgtttagaacttttagcacaaaaattgtatgaaaataatttatgggttagtgcgaatcctgaaggcacaaataatttaaaatcaaaatctccttataaaattcgttatgatgctttaaatggtaagttggaaaatcaaaattatatcgggcgagcaattttgcatttggcgaaacatcgtggtgccggttttgtttcagccgctgaagaaatggaagaagaagttttagaagaaggcgaaaaatctaaagctaaaaaatcttcttatgacatgatgctttatcatttaaaagaaacaaattccagaactgtcggtgagtttttttacaataaaataatctccggtaaaggaaatgataaaacggttcgtcagaaaaaatatgccattgaaaagaatattatagattacgcaattccgcgctatttggtaaaagatgagttcaatcaaatttggaataaacaagccgaattttatccacagatgaaaaaagaaaatttaaagaaagaaatttacgatattttgttttatgaacgtccggcagcaccatacgcaaccggtaaatgcatttatttcagggatgaagaccgcctgctaaaagcgcaccctctttcagagatgcgccgtatttatgaggaagtcaacaacattcgtattttaaatgatatgagtaaaagaaaattaaccttggaagaaagagattctattattaatgagcttttgctaaaaggccaaaatgcaggtaaacaggcaatcaaaaaattgcttaatttgtctgcgcaacacaaaatttctttggttgatgacagagtaattaaagcctatttatattctcgtcctgaatttgcaaataacgaatatttacaaaagatgaatgaagacgagctttcatcttttattgagtttttgtcagaaccaaaaatatcacaggataaaaatggccgtttatacaatgaagattcgttaattgagtatcttaagccaattctgaaaattgatgacgaaaaagaaatcggcaaccttttaaccaaactgcccaaagggagaggaatgttaggtataagcgccacaaaaattattctggaaaaattaaaagaagatgtattaacacatcgtgaaattaccgataaattagccgaaacagataaacgatttatggcagaggaagaaatagcccgccaaaatcagggaaaatgttttcaacttccgtattacggggagatcttgcaaacagatacggctccgcttccgcctttaatgataaataacaacaagagccttaaccatgacgagataaaatggggtaaaatagccaatcctgccgtgcatatgattctcaatcaaattcgcttagttgttaatgaaattatcaaaatttacggcaagccttacaatatcaatattgaacttggtcgtgatgtcggtatgtcaacaaagaagaaaaaagaatttgaaaacagacaaaaacaaaatgaaaaacttaatgaagaggctaaaaaatatttaaaagagcataaaattgtcataaacagtaaaaacattttaaaatacaaattggccaaagagcaaggctggaaagatgcctataatccgacacaaaatatttcttccgtatttacgggtatggaagttgagcatattattccccaagccaaaggcggaacagatacatataacaatctctgtttagttaatagcaatgacaacttaaataaaggcgaccgatatgcctatgaatattttgcagaaacaaaaacaccggaagaaatcagagaaattctaaaaaatgcccgttcccgtacccctgacaagtcttggcgttttgaagctgatgcgcgagaaaaatatgaagaaagcggcgataaagaagaaagtacccgttatttgacggatacccgctatgttgcaaaaatggcggcacgttatttgcgagctattgttgattgccctgattgtgatgaagttatggacaatcgtattttggcagtcaaaggcgggcagactgcagagttgcgtaagcgttgggatttgcaaggcttggaatatgatttaatgggcttaaatatcccgagatatattgattgcgcgccatattggcgggagttggataccggcgaaataattgacggagagcaaaagccggatattgatggtaattggaaattttataattgtgtaaagaatcctgaatggtcgccaaagccacgtattgaccacagacatcatgcgatggatgctataacagttgcttgtgcaaaccgtggattaattcagaaaatggcagaagaaaatgatattaacaaaattcattatccgttgcctttaacttctgttgaatctgtagcagattttagaagaaaagttatttcctgtctaaaagatatcaaaatttcgcacaaacctgatcacagtaaggctggacaattacataaagaaacaggcagaactgttttgtgtcaaaaccctgatgatccaaattgtttaatcactgtttattctcgcaaaattttacaggtggtaaaatctgctaaagatttaactaaactgctcattccagaaacaatcaagaatgaatggcatgaggatattgcagaatataaagccaaacaggctaagctagtacaagattttgaactttatatgaatacggcggagcaaattttaattgccgaaaatgaacagggtgtggcagaaggtaaaaaggaaattaaaattactgaaggaagaattttgttaaaggcgttccgtattattcaagataaaggcctatggaaaggtgataaatttagatgctatgaaaataattcttctttggtttatatcaaaaaacatggtgtggcttatgaagggcgaaataaccattgtgtagatttttacgttaaagatggtaaagtcggttgggaggttattaaacgatttgatgcaaatcagcctgattttgttccgcaatggaaaaaagacggaggaaaacttatttggtcagttcaacaacgcgatatgttggaattagatactcctgatgagtggaaatcatataccgataaagagcgctgtttagctaaagtaaaaaagttcagcgatggagaatttaatattgattatatggctgacgctcgtatgacatcgccaaaagataaaaacttaaaatatatgtttgttaatactttaagaaaggggctggcatttttacttcagcataaagcgcggaaaatagaacttacaccgtttggcaaagtaaagaaaaaacataaggtgttgtggaatggcacgaagacagcggcttgaaactttaaccggatggtctatgatgtggataatatgtatgtttgatattccggtcaggactaaaaccgaaatgcgtaaagcgactcgttttcgtaatttgcttttggataatggttttgttatgaagcagttttcggtttatataaaaccggtaaaaagcttaaatgttggacaaacagtcacgaaaagccttgcaaagtatattccggataactcttctgtctcttttttatatattaccgataaacaatatttaatgacggaaaattatttgggaaaaaattatgaagagaatgaagaagagaatcgcgaaaaaaatgggcaattattgcttttttaagggtgtcttttagcgtttttataataaacaaaagccttgaaatgttgtcatttcaaggctttgcgctattagatagcatatcagagattaattagacggtcaactataactatttcgccctcaatgtatcgatattttgtagcatatcagagattaattagacggtcaactataacgcttggttctgcgacgtctcaaggacatttagcatatcagagattaattagacggtcaactataacacagtaccggcaatgttgtatagtcgtcacagcatatcagagattaattagacggtcaactataactgccacccatgagcccgcttgctatttctagcatatcagagattaattagacggtcaactataactagctgtcaatagcttttttattattttccagcatatcagagattaattagacggtcaactataactaatttactgtgctctttttgctgaataaaagcatatcagagattaattagacggtcaactataacagaagtatgacgagtactcagaatattataagcatatcagagattaattagacggtcaactataacacaagctgcaggataggcttattcagcaaagcatatcagagattaattagacggtcaactataacatgttttgctcaataacagttttgttaactagcatatcagagattaattagacggtcaactataacgctaaaatgttagcgttggtctttattgacagcatatcagagattaattagacggtcaactataactatccggacatattatacatcatgtcaccaagcatatcagagattaattagacggtcaactataacaattttcggacggtgtcggcgcataagtgaagcatatcagagattaattagacggtcaacttataaccaagtattgttatagcctttcgcttgtagtcggtctggcttgtaagctctgcctaaaggcaatcgctaactgcgctgcggtcacttgttttgtaagctcgctgcggttgctgtcgctttccttgctcgcgaacaaaactacgctttcggcgataaaaaagcagataacagcttttttatcttgaaactcactccgtgagttcgaacctctactttcactcattatttacaacaaaacccgccacaagggcgggtgttgttgtaaatggcggatagagtgagattattccgctgcgcttcattcactgtgctcatcggctatcgccgaccggcgtactcccgtccgcctttcgcttgtagtcgaactcacttctcgtgagttcttatcttctgaatatgccattacaaaaagccccataaaggggctttttgtaatggcggatagagtgagattcgaactcacggtaccctttggaggtacacacgatttccaatcgtgcgccttagaccgctcggccatctatccatagctacaacttctaaatcgttttttgctaattggcaagcctttttttctgctatttggatttttattatattcttaaaattcggaatgaaaaatgttaattccgttttttaaattttttatcagattgctcaaacttttttgttgatgttgttccggtttgggcgcaaaagcgctaccgtaactgacggggatttttatccgaatcgatgattttcttaaatttacgggcgttatttgtttgtagttcttgaaatcggttttgccgttaaagcctaattcttttaaaaacgggcttaaaattgttttgtatgtatcgcgtttatctctgaaaataatattgtcccaaaactcttgaaatttggagtttttgattatgttatgcttaaaaattataaaccgcccgttatcttcgggaatatggttatatttttccgtcatgccccaaaaatcataattttgaaatttaagatacgctgaaatattttgtaaatgattaagcggagcataagtgttttcattgcaaaaaaccacttcatcatattcaagcagtttttgccaccctaagtgataaattaaatattgccatgaaccgtaatcattgccattatgaactaccgaatcggcgtaaactatacagtcttgcagtttttgcaattcagatgccggcattgttccgttatttaaataatatacatcgccggtttttgttaatctttgtaataaaaaaacggtataatcattaagaatattaccgttattgcgtccgaccgcaaggtaaattctgctcatctttattctccttaatacaaggaaatataagaaagagcattattttttaaacctcgcggccgtgtttaaatcagtatttataaccaattatttagcttcatcggggtcacgcagaacataacctctgccccaaacggtttcaatatagtttttaccgccggaagcgtgttcaagttttttgcgcaacttgcaaataaagacgtcaataattttaagttccggctcatcaataccgccgtacagatggtttaagaactggtctttgtttaaggttgaacctttgcgcaatgaaagcagttccataatgccgtattctttgccggtaaggtgcaaagctttgccgcctacggttacggtttgcgtatctaaattaacttcaacctcgccggttctgatgatggaattggaatgtcctttagagcggcgtacaatagcttgaatacgcgctaacaattcagctttgtcaaatggtttggttaagtaatcatcggcgccgtatcctaagcctttaacctttttatcgggctcggataaacctgataaaatcagtaccggagtgttgactttggcgttacgaaggcttttaagaacttcatatccgttcatatccggcaacattaagtcaagaataatgatatcgtaatcatataatttaccgatttccaaaccatcttcacccaaatcagtggcatcaacaatcataccttcttttttgagcatggtttcaatgctttgcgaaacggcgtaatcatcttcaactaacagcactctcatctttttatccttccgttgttttttacaatgatgttaatactataacgccatattttttatttgtgaatcattttaaacgcctgttaataattattaacaagaaattttgatgctaatgctaattgattgatattaagcaatattttttggcaaaaaatgtttattgcgctttttcaagcactttcataccggcaagataggtatttaacagcaattcgcataaactgtttttgttaattttggtaaaactgtcaagagtatcggtggttaaaaaagagcttaacgaaaacagtgagagccataaaacctgaattgagagcaggcgttccggcagtggaatttccggaaacagcgccttaaacgagctttcgactaattgggtaatttgcactacgcgtcgcaggtaaacttttgaaaagcggcggttattatttaaaaggtgaaaattgtgcaccaaaaaccacagatttttattttcaagcacaaaattaataaactcacgggcatacaaattgagccgttggtatggcgtgccggaagcctgcatatgcgccaaacgaatgtacaggctgtctaaggtaaggtaattttgaattaagataaaattatccatattgccgaactgattgtaaatggtgccgacggaatagcctgaagcttcagagagtttgcgggcagttaaaaattcagcgcctttttctttaatcagctcgcggcctttgttgactaaattttcttggatattatctttattcatggctaattcttatatctaaattaacaaattcagcttaatatagcagaaaaatgaacagtgttcaactttttttcttcaatatgcaaaaggagaaattttatgaaaaaaatgtggcgatttttaacagtgttaggattttttatgcctaatacatcctcggcggcagaagattttttcggcgatttaatggtttcagagcagatgaagcaagaggcggtaagcgaatcgggacaaatggaagccggtaaaattttagacagacgtccggcggtgcttaaaattaaagctaaaagcaaaaaaattgaaaaggttaaagatgttaagccgcaagtaatttatgcgccggctccgttcggattaagttggctggcgccgcgtaaagatattgaggcattaaaggtttatttaactccgattgagcttaaagacactccggaaacttacaaagcaattaatttgcctaagccggtgactgatttcagagaaattgacataagtttcggtgataataatcaattatggcggattattgcgtacggtaagccggttcaagacgatacttcggctgccaacggcttaaaactttatcggcaatattatcaaatgctggctaaaaaatacggtaatgctcagcaattttatactccggcggcgcttaatgtcgacgaaaccgatgctgatggcaacacggtcaatcgcgtggttgaaatgccgctcggcgcggaaggatttttacaaaaacttgcaagcggcgaagctgttttatattcaacttttgaaaacggtaaaatcggagtaacgttggcgttgtatgccgatggcaatgaacagacctatattgtggttgattataaggatttgcataccggcgagcagaaacttgaagatatttatgatgcattgtaaaggaatttgaacgatgaaaaaagttagtttttgcggtatttcaggcagcggtatgagtgctttggcacaagttttgaatgcgaacggaattgaagttcgcggctctgaccgaagttttgataacggtaaagatgaggctaatcgtaatgccttaaaacaagtaggaattaaaatttttccgcaagacggttcggccgttaccgatgatttagattgcctttatgtttcaaccgcggtggaaagctctattcctgatgttaaagcggcaatcgataagcatattcccgttaaaaaacgttctgatttgcttgcggaaatttttaatcggtcggcgtacggcattgcggtgggcggcaccagcggaaaaaccacactaaccgcgatgataggttttattttagataaatcaggcaaaaatccgctggttattaacgggggtttgctcaaaaattatgaccatcaggccggcattccgaatgtgattttaaacaaaggtgatatttgtgtggttgaagctgacgaaagcgacggttcaattgaaaaatatacgccgtatgtggcggtggtaaacaatattaccattgaccataaagaaattgacgagctaaaaaagctgttcggcgattttgtgcaaaaagcaaccggcggcgcggtgattaatgccgattgcgctaactcgcaatgtttgaaacaatgcaatccgcatattaaaactttttcggttaaaagtcgacaggccgatttttatgcatacaatattaagcctttgccgcaaggtataagctacgagcttgccggcaaaacgtttactttgccgataatcggaatttttaatgtggcgaatgccattgctgcaattgccgcatgctcatatttgggggttgataaatttgaagcggcgaaaattttacaagaatttatcggtactaaaagacgcttagatgttatcggcacggtaaataatattacggtaattgatgattttgcgcataatccggataaggttttggcatcaatgcaggcattgcgcgattataacggccgattgttaattatgtttcagccacacggatttgcgccgatgcgaatgatgggcaaacaaattatggaaagttttgctaaaaccatgcagcctgacgattgtttgtttatgccggaaatttattatgccggaggaacggtcactcgcgatatttcgtcggctgatttgattaaatacgcctgtgaacttggggcgaacgccaaattttatcaaaacagagatgaaataaaaaatcaaataatcgcaatggcaaagtcaggtgaccgaatcgtgattatgggagcgagagataataccttgcctgatttttgccacagtattttaaagggagttaaagcatgactttattgcgggcaggtgataaaattgctttagcggcaccgtcaggttttattgcgccggaatcgataaaaacaggcgccctgtggcttgagaagcaaggctttgaacttgagtttatgccgcatgtttttgcgcgatgtcattatactgcgggtacggattttgaacgggcggacgatgttaatgaagcttttgcgcgctcggatattaaggcgatattttgtgtgcgcggcggggcgggaagctctaaaattttgccgtatcttgattatgcgctcatcaaaaaaaatcgtaagccggtgttcggcttaagcgattcaacagctttgcaaaatgctttgtttacttgttccggaaatgtgtcatacaccggatttttgccgatttttgattttaaaaacggttcgcttgatgaaaaaataaatcaatcactgaatatggtttttgccggcagagagcaaaaagcaagcggcggtaaatgcttaaatagcggttcggcgcaaggaattatggtaggcggttgtttgagcgtgctgaattatttatgcggcactccgtattttccgtcattgcagggcaaaattttactgattgaagatgtcggagaaaaaacgtatcgaattgatttaatgctcaatcagcttaaatcgcaaaaagacttttccggcttaaaaggcattgtgttcggacagtttttgaattgtgtcgaagcggatgaaggtgatggctcggttgctgaaattattgctgattttgcgcaagatttggatattccggtaataacggaatttccgtacgggcatgttgccagccgttatgtgctgccgattggtaaaaaagtttgtttagatgccgatacggttacggtaacttattagaacaccagattcagcacatattttaagttttgcagattgagtcggttgattaaatcaaaatacagcgatacgccctcccaaccgcggctgttaaaggccaatatgctgccgatggtccataaattggcagatggcaaaaacatccagcaaaatttgtaagatactttgggcaggtcggtctgcttatcattaatttgcgaaccgacggtatcggtatgataacctaaaaagtagcctaaaattccgttcataattaaattagaaggcattatgcccataataatcatataaattaagccgaacagcggaaaaaagtatggcgcaatgattataagccagttgccttcgcccttaaagcccatttcgccgccgctgttgtcaggttcaagtcgaatatgttcaactttatgaaaagtaatcagagcaaaaaatgaatgagttaattcatgcgcaataatctgcatagaagttttaaccgacgaatcggccatggtgcgggcaatgaaatacataaaaaatccggcgccgagcgctaaatatttaaatgatgcaaaagaaaaaaagtcaacagacatacaaagcgccggcaatgagagcagcatataaaccgctatcggccatttaaacagattgatgattttatctaaagttgcagacatagctttcctttcagaattgcaatatacatcggtcataattaaatttcagcaattttcggattctattaacatttactttaaaaacaacttgacaaagcgaataaaagcctaacattaaatataaaaaaagcaaaattgcgagggtgtcatgaacaaatatgaacaaatggtggcggaatgccataaggcgatggagtgcgccattaatgagccgtttacggcagatttgctcacattgcgcaaacgactgattaatgaagaaacagcagagcttaatgctgaaatagataatataatcggcgagttgcagcaaagcggtaaagctcaaaaagaatcggtgcttagaatgtataaagagttggctgatttgcaatatgtggtcagcggtatggcggtttgcttcggtatcccgtttgaagaagtgtttagtcgcgtgcatgaaagcaatatgtcgaaattggttgacggcaaacctttaaaacgcgcggacggcaaatttttgaaaggcccgaattataaaaagccggatttaaccgatttatattaaaaaacaataaaaaaggcactgcgttttaattgcagtgtcttttttattgttttttgcagctagatgtttacgtcttgccaagaattgatgctcggatcgattcttatttcgtggaatacttcatgcagttcttgcgacgttgttgaaacagatgaaataccattattgctaatccgcatagagcaggttagcaaataccttttggttaaggtacctttttcttggtcggctacctcatcgattaatttgagctctggcggcagtatttctacttcaggataaatacttggcatgttgtttccgtcaatttcagctctatcaagcgtaaaaaataccggaaccgaaagcttatcattaaatttaaagctgtaatgcatataataatgggtggtaacaataccgtcagcgtttttctcatagcttttgatataggcccatgctttatctgaaacagctttaaatttcagactgttaatgtctgcattaataaccaccggcttgctcataaccgaatcaacagccgctgcatacggaagatcaatgcggtatgtttcttggttatataccaatgagctggtgtaataaccatcatgtgccacaatttcttttttgccttcaggcagctgctctgcggtagtgtaatctttgttacaagctgtaataagcatcccgcttatcatcagcaaaaaataatattttttcataatttctttatgtgttttatgttgttataataattgtgttattaagtattaatatacgcctttttattatttttgtcaaagtaaaaaaaagacgaccttttgaagtcgtctttggattaaatttattttttgtttccgtagaattgcgtttctgaagatacggaagtatcaccctgatggataacaatctgctggaacggaatttcaattccttcttccataaagcggcggttaatttcatagcgcaactcgctcggaatgttccaaccgacccaaatgttgcttgaatagcatcgaagttcaaaatcaagtgaactggagccgaaatctttgaaaataacgtacggcgccggagtttttaaaacttttttgttattgcgggcgcactctaacaaaatgtcggttactttatttacgtcggtaccataggcgacaccgacgcttacggcttgtcgggtccaattattgccgtgggttaagttgattagtgccgatgaaattaaagtggcgttaggaataataacgctggtttttttgaaggtttccaattcggttgagcgaatattgatttgcttaatttgtccttcctcgccgttaaataccacccaatcgccgacttttaccggacgctcaaataaaatgataatgccggatacaaagttgttgaaaatattttgcagtccgaaaccgataccaaccgataaggcaccggcgataacggcgaggctggttaagttgccgcccataacaataattgccaacagcgaggcaataacaaagcctacaaagctgactcccgatgacagcgagtgtttaataccttcatcaatgtc

SEQ ID NO: 352 - DNA, 23273 bp, synthetic construct
  misc_feature 1..23273: note = Synthetic
  source 1..23273: mol_type = other DNA
gatggtatggataaaaaagaagctatggccgctgcgattaaatatgctgaggaaaaaggttttggtcaggctaaagtaaatttcaaactgcgtgactgggtattctcccgccagcgctattggggcgagccaattcctatggtctattgcgaacattgcggctggcagccgattccggaagaacagcttccgctgaaattacctgaagtgccggattaccgcccgaatgataatggtgactctccgttggctaatgctacggaatgggttaaaaccacctgtccgtgctgtggcggttcggctcgtcgggaaactgatgttatgccaaactgggccggttcttcttggtatttcctgcgttattgcgacccgcacaacgacaaggaatttgcttctaaagaagccttggattattggatgaatgtggattggtataacggtggtatggaacacaccacgctgcacctgttgtattcccgtttttggcataaattcctgtatgattgcggatatgtaccgatgcctgagccgtatcacaagcgtacatcgcatggtatgattttggctgccaacggcgaaaaaatgtctaagtcccgtggtaatgtggtaaatcccgatgatatagtttctacttacggagccgatacgttccgtttgtatgaaatgtttatcggtccgtttgatcaagtggcaatgtggtcagaagaaagtctgaacggcgtatatcgctttgtcagcaaggtttatgctttgtttaaaaaagtgtcgaaagaggctaagccgacagccgatgatttgagagctatgcataaatgcattttggaagttacggacagaattgatactatgaagtttaacaccgcggtttcttcgctgatgatttatgtaaactatttggcagatatggcgcaaattccggcggaaatgtatgaaacgttgattaagctgctcagtccgtttactccgcatctggccgaggaaatgtgggcgcgcttgggacatgatactttggttattaccgaaatttggccggcaggcgatgctaaattggctgaagacaatatggtaaccatgggcgtgcagttgaacggcaaaatgcgaggcactgttacggttgctaaagatgcagctcgcgaagatgttgaaaaagccgccttggctttggataatgtggctcgtcagttggaaggccaaacagttaaaaagattattgttgtaccaaataggattgtaaacattgttatataaaaaatgtataatagcggcggcagttttcggacttgccgcctgcgggtttgaaccactgtatgtggaaaaaacatccggtgatgatttatggtattataataaccaatatgataccgatattgtgcgggaaatggcgcaaataaaaattgaaactgtgacggacagaataggccaactgataaaaaatgagctgatggatactttcaatccgcatggcactccgaaatgcgctaagtattttttgaaaattcaaccggctcagaccaatacggtgcagcaagctttgcgtgatgatattactgctacccgcgaaaaggtaaagtacacagttaattattctttatggagcaaggaaaacggtaggcttgtcagcggtcgcagttgggtttatcttagctatgacttgttggataacccttattctaccactatggataaaaagaaggtggaaaaagacggggccaaaattatagccaatgatatatcgctgcgaatcggtgcttatttccattcggttaaaactaaacgcggtaatccaaatgaattttaaacaagctcaaatagagagtttttgcaaaaatcccaatccggatgtgaagtgcgtgattttgtttggcagcaatgaaggtacaattgctatgctgcagaaaaaatgcgctgaagcgatatgcggagatgtgcaggacgcttttcgctatgcatcgctggaaatgagcgagatttctaaagaaggacaagaaatttatgctgaatattatgcgcaatcgctcatgggcgggcggcgcgccgttgttgtgaaaaatgccgataataatttggcttcagtgttaaaaaatttgataccagatacaaagtcggataatttgctgattgtttgttcgtcatcgcttaatacaaaatcttctctgataacttgggcaaaagaccgagccgatgtggttattgtcggttgctatgatgacagagaagaaaatattgccgaatccgcagcagcgcttctgcgggcgcaaggactgatttttgatacggcaactctgcaagttttatgttcgcgtttgtcgccggataggaaagttaatcagagcgaaattgaaaaattggcaatgtatttgggcgagcgcaaaaatgtggcaatagccgatgttaaagctgctgtcagcgatgttgccggcgctaattatgacgatttttgctattatgccgccggcggagaagtggcaaaagccggagcgatgtttgaccgattgctgaaagagggcgaagagccggcaacgattattcggcagttaagctatcactttaataaaattttgagctgcaccgcacaaattgaaagcggaaaatcggtggaagatgccattaaatctttgcgtcctccgttgatgttttatcgtaaagatgcttttaaaaaccagcttaaaatttggacgcgtgagcgtgtgttaggggtgctatctatgctttatgactgtgaacgtgactgtaaaactactaatttaccggcggaacaggtggcatcgtattgtgttatgcgtatttccggagccgccagaaagctctcaacacaacgcgcctaacggcacatctaaaggcaatttacgttcattcagaaaattcatgtactattatgtacactaggattttcttcagaactagagttgcctttatctgcactattattcgcattgctttatagtatttgttgctggtttgtttttatttgtacacatcacttaaaaagtacggcgcattaagctcattctctgagtttttttatggtttactgttttaaaacttgacaaaaatggcgaaaaatattactgttgcagcaaatattttttattatgtttaattatttaaaaccttttaaatatggagaaggataaaaattttgtatcacaggcaaaaagattttgccgaatgataaatgcgtttatactgatttgcctgttctcggttattttttacagctgtgaagataatcacaatctacagaaaaagtaccatgactatgtcagctgtctgacaaaataccgtgaaaaaaatctgattgatgaaaacaaatatcagaggtttaaaacaagccctatggatttggaaaacgaatcaactgctgattgggatagtattagttcccaaattcaaaaaaactttgctgtacaagacagtttagaaaatgttctgactgaactgcagcagctagcggctagtaaacctaaaggacatttcaaaatcaagcggatatggcaaaacagcgatactcagccttggacttattggagctatatgcacatctatctgcgcaatacaggcggttcgtctggaattttgactcgctttggcagaataggacagcgaaacggagatctgtctttacagattgacggcaaagctcaaggtgcaggagaaaaccgtttagattatatcaatgttgttctagccgataattcgttttatcaattttctattaaaaataatccggaatggcttttggtacaggaaggtgatttagtagaacgtaatgaaaaaaacgaacttgttccattgtttaaaaaataagttattatgagaaagatttttattattagctcagctatctttattgctgttttttcacagattacttttgtttcttgtgaatatatccccatgcagtctgtacctgataaatataaattttatctgagtacctataatccagaaactaatggttataatacttctgtgcaggctataaaagataagcaaaaactgcttgatagctatagggaatgtctggaacagcagaaaaggcttaaacctaaagttgaaattgtacgagttcttcgagcaaattcatcttttgtgatgaacagtccggcttcttttaaccgtgatatcagcaacaacacgattaaggaaaatggacacggcgccgatgaagaagatatttacatgctctatctgagcgatggtaaaattatcaaagccagtccgcgcgacaaatcgcaatggctgggaaccaaagtcggcgaaaaagtacgtaaagttacttcacttcagccacggcagcataataatgcttttagtttggatacaatagttgattatcagccgttgtatgaataagcaaaaaagagttcgctcatttgagcggactctttttgtaacttaaaagtgtagtttattttattttcttgatttttgacttgcttttacaaaataaagagattataaaaattaacgtctggtgttgcaccaccggacgttatgttaacctagaaggggttaaacccaatctttaaccaattctaagttaaagataacctatttttgctaaaatgttaagacccaaagtcaaaacatggcaaatttaggtgtggtttatccctttcccaaccgtctgtatagactgaaaggataaggtatgataggggatttaatataggtgctatttatactcctcaacaaaatcaataaaatcataagatacgcagatattttttcgccggtgtagcgaggactacagcaagaaaaaatatcaagcagattggattttatttttgccctttgggtttgtctaatatagcttgctagtttgtcgtcaagccttgccaatacgctctgtattgcctgcgtttgtctccgcctatcaaattatattaggcaaattgagaaatataaatagcacctatattaaatccttaagtcaaagttttaagaatacttatttatcttcttgaaatcatcatccttatattaaagtaatatagtatgatgaggcggagttttcaagcttcgccctttgatatttgaaaaaagccaatttcattttttgtatagctggattgtgtttaattccagttcgtgttttaatttgttcatagtgccaagatataattcaataagtattgagcgatattgtaaagagggcgtagtcattttccggaaaaataataatattacctttgtattttgggaggcttgagacatatttctatgtctataaattttgtaacgataaattgtgcaaaggtagagaactttattgatataaaacaatatccctgcaacattgatgctcagggatattgttctgcttgattgtcagtctttaactttgcggctcattgctaacaaatagaaagcacaaagcagcatgaccgcaatcgcgccgtgctgattgtttgcaaagtccgaggcaatgcccatcaacagcggaaaaatcgttccgccgaaaatacccataatcattaaaccggaaacttcattgccgtggtgcggcatagttttcattgcttgtgaaaaaacaacaggaaagatgtttgcgttgccataaccgatgcaggctatacagatataaagcatttctttgctgttaaatataaaaataccgattaaggctgcggtcatcaaaataacgctgcctaaaaaatatttgtggttagagtattttgctaaaatataagcaccgctgaaactgccgatagtgcggaaaaagaaatatatgctggtggcatatcccgcttgttccaaagtccagccaagtttttgcataagcagtttaggtgtggttacatttgtgcctacatctaaacccacatggcacattacagccataaagcagagaaaaaccgtgccgtttcccagtaacattgcgcattctttgaaaccggaagttttgccgacttctgtttcctctattttttcacgagacagcaatacaaaagctaatattgtttcggctaaaaagaatggaaacaaaatttgccatttgtcaaaatgaatcgctccccagccggctaaaatcggcgcagcaaaggaagcggttgctttaatgaattgtccgaaagtaagggcgctggacattttgtctttggatacaatatttgaaaccagcggatttagcgaaacctgcataatagtgttgccaatacctaaaagcgaaaatgaaatcatgattattatcatattatagtcaaatatcggcaaaagcaaagccagcatagtaataaccaaactcagcagcacggttttgcgccgtccgattttgttcatcagcaagccggtaggtactgaaaaaatcaaaaaccaaaaaaacgtcatagaggtaaacaggtttgccatggtatcggaaagggcaaaatcaacttttacatagttggtggcaatgccaacaaaatcaacggcgcccatggcaaaaaaggcaaacattatcggtatcaatttttttaataaatccgttttagtcatagcttttctccttttattgattattcatattccggccaggccccgctttgggtgcagacaaaggcggcggtggcaacggcttgtttatgggcatcgcgcatggatttcccgcttagaagtcccatgatgaaaccggcggaaaaagagtcgccggcgccgaccgtgtcggcaactttgactttaggcgtatctaaatacgatttttcgccgtcggctgaataaacaatgctgtatttttcgccggctgtaaaaatcagatagcgcaagttatattttttgataaaccattggcagacttcttcattcggcaagtttaacccgaacagctgctgtacttttatcatttcttcatcattgattttaaatacattagcttcttgcaaaagctcgttaatcagttctttagaaaaataattgctgcgcaaattgacatcaaaaagcttatatgcagtctgcggggcatttttcaaaagtgtcagcacggctttgtgagtttgccgcgagcgcagtgctaaagtaccgaaacaaaccgcatcggcttttttcactacttcaatttctttttgagttgcttccatatagtcccatgctacgccttcgacgattgtataagtcggaataccgttattcagcactacttcgacagtacttgtcggataattgttgcgttccaaaatatgatgaatatggcttttttcaagctctcgaatgatttcatcacccaaagcatctttgccgacagcactgatagcgtatccgtcggcgccaagctgggtggcattatatacaaagttaatcggcgctccgccggcacgcttgccttccggcagcatatcccacagaagttcgccgattcctacaacaataggtttggtcatttttacctcctttgctaataatatagttctagtttagcatattttaaggcaaaaattcaacaaaaaaggcggtataaaatcgccgaagttgttaaaataaatctccttcaatgcgccaattattatcataaaccaaatgaaatgccgcacaattttgtattttagtaaaatcatagtgcagataattgaggaggctgcccatggttccaccgtggatggcaattccgcaaacgccatacggctcctgccgcagtttttcaatttggcgccaaactctttctagcgatgcttttttgctttcaccatgtgggtaggcaatatcccaaacttcaggattgttccagttattataaatatccggatattttgcggcaatttccgattgcagcataccttcagcatcaccgtaaaagcactcgcgcaaatcttcttttataataagcggacagccgaatttttgagccacggttttggctgtctgtacagctcgtatcagcggactggaaaaaactgcttccagtttataagcggctaatttatcagccaaagcaacagcctgttcccggcctttatccgttaattccatatttatgccagagccctgttggcggtgttgcaggttaaattccgtttcgccgtggcggaaaatataaaagtctttacgcataaattaaagtgctttcaagccgactttgttggcaactatgcggaatattttttcttcatcttccggtgttaaaagtccgtaaagcggtaagcagaacggagtaaaatcgccattatgtttttgcagaaagttatatttgtagtcaattcctttctttggaatcagaacaataacgcggcgttctttgccgcagcattttacaatgcgttcttcgccgacttcaatatctttccacgccacaggattgttatggtcaattttgatggtatcgtcagtgataactgccataacttgtttggcggcgtatttataaatccaaattaaaagagacaaaattaacagggctaacaaaacctgaaattcccaccaataggcataggataaactgcaaaacagacatgaacaaagcgcggcaatagccaaaatgttcagtacaagccagacataattttttttgaagtgatagtaaataacctcgttcataactttttttcctaattggtaacatcaatttttattataggtattttccaaaaaaggtaaagcagaaaaatataactaattttagtcagaatattttaacctaacttgtaaattgtttaataatatttttataacttataatatattttatatgtagacaactataggaaggaataattatggatagacagattgttgaaattatgaatgacggctttgcgctttcagttcatcgtggttttgtagtaattgagcataaagaaaaacaaataaaacaagaaatacctttggataatgtactctccttggttttgtcggcaaacagtattgtggtttcaaaaaatattgtgaatgcaatttgtgaacaaggtggcaatgttattttttgtgataaaaattatttgccatcatctattacaatgccttatgccggacattggttagttgctcctcgagttaggcaacaaattgaatgttcaaaacctttgcaaaaaagtttgtggaaaagtatagttcagcataaaatttttaatcaagcgttgattttggaatacttttttcctgagcataaaaatattgaaagattaaaacagcttgctagggcaacattaagtaatgatgctcaaaacaatgaaggcgttgcagcgtcgatatattttaaatcgttatttggaaaacattttgtacgtgatagacttaataacgatgttaatattttacttaattatacttatatagttttaagggctattgttgccagagcaattgccggtgttggattgctaccgtatttagggcttaaacattgcacgaaaactaatcctttacctttggttgatgatttaatagaaccttttagagcggtggcggacaaaattgtttttgatgaacttaataaaattgtggatattactagcattgaattaacaccggaaattaagcgtaatttgactaaaataattacttttccaatgcagacatctaaaggctgtgtgtcattaaatgatgctgtttatgattttgtcgggacgttggttgcaagttttgaacagaagaaagttgcgttaaagtaccctgatatcttattataagtaatgggggcaacgcatcgccccctcatcttacggcattttcagccttattatatatgtgttgaccgtctaattaatctctgaaaaaattacgtcttacacataacaaatttattatataaatatttctattgatttgtcaagtataatattgtaaattatcaaaagttgtaaattatccggagtgaagtaatgaagtatcgtttgggtttggatttgggtgttggttcaataggcagtgcaattttagaattggacgaacaaaataatgtgcaagatattgttgatgccggtgtgcgtatttttgaggtgtctgaaggagcagaagaaagacgtgcaaaacgtacggcgcgcaaaaatttggtcagaaccagaagcgtttggaacttttagctcaaaaattgtgtgaaaataatttatggattagcactaatccagaaggctctgataatttaaaatcaaaatctccttataaaattcgttgtgaggctttagacgataagttggataatcaaaattatgttgggcgagcatttttgcatttagcaaaacatcgcggcgccggttttgtctctgctgcacaagaaatggaagaagaagttttagacgccggcgaaaaatctaaaaagaaacaaaccgcatacgagttaatggcacagcatttgaaagatactagttcaagaactattggcgaatttttttataagcgtattttagaaagttatgacaaagatgaaaatggagaacataacaaagtaaatttacgaacggtaagacaaaagccgaatatggttgattacgctttgcctcgctatttggtaaaagatgaatttaatcaaatttgggataagcaggccgagtattttccgcaaatgcaaaaagcaggattaaagcaggaaatatatgatattttgttttatgaacgtccggcggctccgtatgcaaccggtaaatgtatttattttaggaatgaggaccgcttgctgaaagcgcatccgctttctgaactgcgccgcatttatgaagaagttaataatatccgcattttgtcggatactaataaacgcccgttgactttggaagaacgtgataaaattataaatgaattgctgctgcaaggcgaaaatgccggaagtaagtctattaaaaagctgcttaaattatcggcacagcaaaaaatttctattgacggcgataaagataagccgattaaagcttatttatattctcgtcctgagtttgctgaaattgaatatattaaaaatctgtcagaagctgaatttgctgaatttatagaatttttagcgaatccggtaaatccgaatgataaaaacggcaggctttataatgaagatgaattgattgcccagcttaaagtaattttgaaaatagatgatgaaaagaatatcagcgatttattgataaaactgccaaagggcaggggcatgcttggtgtatctgcaactaaaattattttggaaaagctaaaagaaaatgtggtttcacatcgcgaaattaccgataaattggcaaaagaaggccctcgttttatggcagaagaagaaatagctcggcaaaatcaaggaaaattttttgaattaccttattatggagaaattttgcaaaccgatacgcagcctttgcctcctttggttattaaaaacaataaaagtttaaattcggaagaggtaaaatggggaaaaattgctaatcctgcagtgcatatgattttgaatcagcttcgtttggtggttaatgaaattgtcaaaatatatggtcgtccgtatgatattaacattgagttagggcgagatgtagggctttccacaaaaaagaaaaatgacttggatataaagcagaaagctaatgaaaaattgaatgttgaagctaaaaaatatttgcaagaccataaaatttatgtgaatggcaagaatattttaaaatacaagttggctgaagaacaagggtgggttgatgcttatgaccctacaaaaaaaattgatagaaaatttgccggttttgaaattgaacatataattccgcaaagcagaggcggaacagacacctataataacttgtgcttggttagtcgcgcggataatgaagccaaagggaatgattttgcctatgattattttgtaaagtcaaaatcacctgaacttttgcgagagattttgaaaaatgccagaaataaatttaaagacaaagcttggagatttgaagctgatgcgcgagaaaaatttgaagacgagggcgataaagaagaaacaactcgctatttgacagatactcgctatgtttctaaattggcggcacgctatttgcgagctattattgattgtccaactgatgaaaaggtttcagaaaacagaatattagcggtaaaaggcggacaaacggcagaattgcgtcgccgttggaatttgttggggcttgaatatgatttaatgggtttgaatattccaagatataataattgcgagccgtattggataaatttggcaacaggagaagtagttgacggagagcaaaaaccggatattgacggtaattggaaattttataattgtgtaaagaaccctgaatggtcgccaaaaccccgtattgaccaccgtcatcacgctatggatgccataacagttgcttgcatcacgcgttctttggtgcaaagattgtcaaatgaagaaacaataagacatcagtcaacgccgttgccaatgacaagtgtgcaatcagtcggggaatttcgtcgtaaagtaattgaagttttgaaaaatgttaaagtttcgcacaagcaagaccacaataaattagggcaacttcacgaagaaaccggtaaagtaaagctgtgtgaaaatcctgataatccaaacaatttgattacggtttattcccgcaagatttttaaggtagttaaaacatataatgatttggacaagctcttgattcctgatagcgtcaaagatagctggtatgaaggaattgccgaaaatcgggcaaagcaagcaaaattggcagctgattttaaacagtattggaatgtagctgaacaaattttacaagaagaaaatgaaaaagacgtggcagaaggcaaaaaagaacgtaaaattacagatggcttaattgttgctaaaacatttcatttgttacttgagaaaaagttatggaaaggcaataaattcaaatgttatgaaaatgtatcatcgtatgttgaaaatcacaatttggtgtataaaagcggaaataatcattgtgtggatttctttgtaaaggacggtaaagtcggttgggaagttattaaacgatttgatgtgaatcagcctgattttattccgcaatggaaaaagaatggcggaaaacttatttggtcggtgcaacagcgagatatgttggaattggatactccggctgagtgggcttcttatacagataaacctcgttgtttggctaaagtgaaaaagtttagtgacggagaatttaatattgattatatgacagatgctcgcatgacatcaccaaaagataaaaatttaaaatatatgtttgttaatacattaagaaaaggattgtcgtttcttattcagcataaagcacgcaaaatagagcttacaccgtttggaaaagtgaagaaaaaacataaggtattgtggaatggcacgaagacagcggcttgaaactttaaccggctggtctatgatgtggataatttgtatgtttgatattccggtcaggacaaaaaaggaaatgcgtaaagcgactcggtttcgtaatttgcttttggataatggttttgtgatgaaacagttttctgtttatataaaaccggttaaaagtttaagtgtcgggcaaactgttgtaaaaagcctatccaagtatattccggataattcctcagtgtcttttttgtacataacagataaacaatatttgatgactgagaattatttaggcaagaattatgaagaaaatgaagaagagaatcgcgaaaaaaacggacaattattgcttttttaatagcgttttttagtgtttttattttacaacaaggctttaaaattgtttgatttcaaagccttgttgtttatatattatatcagagattaactagacggtcaactataactgtagctgttggctgttttacccatagtgcattatatcagagattaactagacggtcaactataaccgcatctgccctcgcctttgcgacaaagcaattatatcagagattaactagacggtcaactataacggcatccggtgccatagcatagctgatggtattatatcagagattaactagacggtcaactataacagacagagtaaagacagttaaatggtgcggattatatcagagattaactagacggtcaactataactgtcttgaagcttctaattgctcttgaaaaattatatcagagattaactagacggtcaactataactaaaatcgccaagtggtctataaacataatattatatcagagattaactagacggtcaactataacagataggtcgttagtgttaacattttgtagattatatcagagattaactagacggtcaactataactggcacaaaggctaatactaacttgcagaaattatatcagagattaactagacggtcaactataactacctaaacccaaataacaaacttcattgaattatatcagagattaactagacggtcaactataacactgatttacgagggggatattgttaaattattatatcagagattaactagacggtcaactataacgtcatcgcaatcatattcttttaacttttcattatatcagagattaactagacggtcaactataacttcaatacattactggtaatgatgaagaatattatatcagagattaactagacggtcaactataacaaagacaagttgcggaaaaactagtaaaagattatatcagagattaactagacggtcaactataaccattaaaacttcgttaaaattcttgacaaaattatatcagagattaactagacggtcaactataaccataaattaaaaggtttttattcatattgattatatcagagattaactagacggtcaactataacgtcattattaagcgtatcaatttagccttaattatatcagagattaactagacggtcaactataactgattggcaagataagaatagtcaaagattattatatcagagattaactagacggtcaactataacggcaaataaatcagcttatggcaaaattagcggggtgcctaagatattagctccaaaaactgacagtttttttgataactcatgtttataggggcgtacagcctcttgatcatttgcgtttgattgaaacgtttgaatgaccgcttctataaaatacttatgagtttgccgttcttccggcgtatagtagccgtattgatttatcattttataggcataaccctttttcaggatgtttaaggatgtgatttctgctgttccgaggtttgtggctcgataagcctttagggttttgtcgcaggtatacgcccaatcatccaagccaaaagactgagttccgataattttttgaaattcgttgcgcttacccgcccatttgattttgcgggcaatagtttggcatggattaaccatagttttgagatatgacacgtttttatcaatgccgtttttttcgtcccaataactcattagcccgttaaaggagataaactgtatgatagtattatcgtcagactgaaagttgtttaagccgtccaaggtgttgataaaggcttttacatcggctttagaaagcggcgtagttgcggtggctgtataatgtctggtgcctaagtcttcttttttaggtttggcattgatggcaaagtttttaaccggaatttgctttacgatgtcttctataaattttttcttaaagcgtatcggcggcatattgtggcgcggctgtgttttttgcggaaattccaaagaatttaagccttcgccgaaaatttgcggcatcaaatatagatataaacccggcgaaacaaattctatatccggaatttttgctaatttggaagcaatttttttaggaaattggtgtttggtttcttttatgcccggtaaatctaaaatttttccagagagtcccggaagtgtgtgcaaaaccggcccgatatagggataaaattccggcggcagacggcgtatatcgcgtaacagagcctcttcatccggattgtctatgcgtttttcaatgttgccgaaatttttgatattttggtcaaactctttatcaaaaaccggcggaatgttccagctaaaatcataatgccagtcataatcgctgatagcttgctgatattcttcattcagtctccaaaccaaaggaatttcttcatcgggattaacatcaaataaatgctcatattccttgatttgagcttggcaaggaacagaaaataaaaagatgatgaataatataataaaacgcatatgtttctcctgtaacaaactttaaacgatatttgttaaaaaaaagtgtcaaattgctgatttttagctagacataaatcaaataattttgtaaaaatcaaaaaaagataatttaaggagatttttataatggcttggacagaagaaatggttgaagggctgcgtcaaatgtggcttgaaggtttgaccgcaaatgaaattgccaaaagactcggagtttcaaaaaattctattgtcggaaaagtgcaccgcttatgtttgaaggccagaccgtctccgattaaaaagaaggaagatgaaacggaaatcgaaacagctacggaagctgcagcagaagtaactcctgctgaattggccgaagatgcaaaattggtggaagaagagccgattaaagagaatacagcagttaaaaaacataaagccgggcatcacgtcaaattggtggagctggacagtcacacttgccgctggcctttgggcgatccgcgcgatgaagatttttgtttttgcggaaaaaaagtccgtatggggcagacttattgcgaagagcatgctaatatggcttatgttaaagcaacaaaaaaataaaaaagttttgaggctgtttttttcagcctcttttttttgatgaatcaacgcttatatctctcattagtcaaaaaaacagaggatataagttatgaaaagaatttttatcgtgacattaggactgctattgctaagtcaaaccgccaatgcggcgcagtcgtctttaggcgaagattatttatcattcaaaaattggctgaataaggaatataacattgactacagcttgacctattcgcttttaggacagaggacttctccgagcggacataacaatgcggtgcaatcttacctgtatccgtctgtgatgtggacgacatttgataatgaatatggtacgggggttttgaattttgcgtataatagtatttattacggaggacattcggcggaagacattcaaaaccgcagcggtttagtgacgccgataaatgattttaatgcccatgaacaaagttttgccggactttattatacatatcaatttcccaaacaatataattggctgacaatgggagccggtcaatataatttgtttatgtttgacggcacggattatgatggtaatcagcaagtaaattttttgaatttttctttatcgcagaacggaagtgcgacttattcttcggcaggattgggcgcctatgtgcaggcaacgccggataactggtcgtttacggccggttttcaggacgccacaaatatagaggcgccgagtattcgggttaatcgactgaataaaaaacattttaccacattcggacaaatcggctataatccgaccattaaaggcttaggtgccggacaatattcaattatggtttataatcagccggctgttaaagaacagccgcaaacgacaaacgggtggtcaatcaatattcagcagaatcttaatgaaaagttggctctgtttgcacgcctgaacggtgtcagcggacacgttattaccaccaacaagacctatgcggcggggttagtttataataatccgctgaaccgcaacaatttagaccaaatcggcttggcttatgcttataataaagttgataaaaaaaccgtcggctctgagatttatcataaagccgaacaagtggttgaagcttattgggcgtggggaatttctaaatgggcgaccataacgccggactttcaattttattttaatccggcgcttaataaaaaatcagattacggcagcgtcagctctttgcgattgacagtatttttctagttaaaagcttaataaatgaaaataccggctgttaattagtcggtatttttatttttttgctttactttaggcaaaaaatagaggattactaaacctacaatatttttttatttttgaggtggatatgttaaaattaaaacacattttgtttgtgttggctttggccggatgtacttcttccgaagttaaaatggctccggggattgtaccgaatacggcaaaagaaaaacaggtggtgaaagttatgcctaataatgtgattggtgaagtggaaccgatttatctgttgccgatgaaatctccgtttatgtcgcgtattgatacgggagcgacaacatcttcgcttgatgccgaagaaataaaacattttgagcgcgacgggaaacgctgggtttcatttacagtcgtgaatcgcgccacaaaagaaaagtatacatttgaaaaacctttgttgaaaaatgctaaaatcaaacgaatcggtgaaagagaaaaacgtccgatggtggaaatggaagtgcgtatgggcaaagatgtgttcagagcaaattttacaattgccgaacgtgaaaaatttgaatatcaaacccttgtcggacgcaatgtgctgtatggccgtgctattgttgatgtgacattatcaaatactctgaaataggttaaaaggcggaatcttattctgccgttttttatttgaggactggaattatgctgaaaaaaattatctctgttcgcggaatcttgacaatattattactgctttcggttgcggcggcagctgtggctacttactataaaattgtttattgggggtttagttttcgtccgcaagagcgtacggatgtttggacggtggacgcccatgtttcattcaaacctacaggcgacccgatagaagtttcgctttctaccccgcgaatcagcaaagaatataaaattttgagcgcagatgtcgtggctccggggtatgaggttaaaaccgatgaaaaaaatcatcgtgtgattatgaaatccgccgctcgtgccgtgaaacaagatgtttattatcgtattatgatttatgataatgaagataccagcggcaaagaaatcagcgacagacctgctgatgtaaaagttcgctatgatgatgaacagcaagaagaaatggtgaaagctatttggactttggctaatgatgaagaaggtgaaacaaaagctcagaaattgatttctgtgcttaataagcagcctttgccacctgaggtagattcatttttaccggtgcagaagaatccgcaaattatggcggaaaaaatcatctttttgttgaatgcaaaaaatattccggctcgtgtggtgcgcggtgttaaacttagtgaaaataaaagagctaccggcgccgatttaatggttgaagcgtatgagggttctaagtggaaaatttatgatatcaacaccggaaagtccggtttgccgaaaagttttgtgatttttcaacgcggtggcaattcgcttttggacgttgccggcgggtatgattcaaaagttaagttctcggttataaaatcggtggtatcttcatttaaaatggccggcagccgcgctaaatatgaaaacagccgctggtttgactttacgatttataacttgccgtctttggagcaaaacaccttgaagtggctgatgatattccctttggggattttgctgattgtgctgatgcgtaatgttattggtattcagacgatgggaacgtttacgccgatgctgatttctatgtcattggttaaaaccggatttatcccagggctggtatgttttggactgattatcggaatcggtttgttaatccgcaccatgcttacccgcttgaacttgctgctggtgccgagaatttcctcagtagttatctgcgtgattttgattatgcagatgttgacgattatggggtatcaatataatttcagcattgcttcttcggctgtattcttcccgattattattacggcgtggattattgagcgtgcgtctatcacatgggaagaagaaggcgtaagaaacgcagttcgccaggtggtaaacagcgtttttgttgctgttgtgacatacggagttatcagcaatgaatatatccgccatattatgtttgcctttaacgaatggaatttggtaattttgtttgtggtaatgcttttgggtacatatactggttatcgtttaacggaactgaaaagattcgctccggtggccgctaaggagaaatgaaatgtttgattttttcaaaggctttgtttcgcccaaaaaactgcgccaagccggtgtgctggggatgaatgcgcgcaactataatatcatagctaaattcaataagcgctctctatatccgttggttgatgacaaagtgcagactaaaaagctggcaaacagcatagatattaacactccgcacatgattggcattgtggaacatcagtatgaagttaaagacttgttgcagctgattgaaggacaaagcgaatttgtgataaagcccgcacacggcagcgagggtaaaggcgtgctggtggtggcgcattatgaaaacggcatatttactactccatcaggtaaggtgctgacttttaaagaagtttatcagcatgtttctaacattttgagtggtttgtatagtttgggcgggcaatatgacgtggcgcttattgaagagctggtgcattttacggacgtgttcaaaaatttcagctatcaggggattcctgatgtgcgtttaattgtttataaaggctatccggctttggcaatgaccagactggcaactaaagaatctgtaggacgtgcaaatttacatcaaggagcggtaggcgtcggtttggctatcaaaaccggcaaggcagtgcaggctgtcagccataatctgccgattgctttgcatccggataccggtgcagatttaatgcagctgcaagtgccgttgtggaaagaacacttgttaatcggagcgcaggcgtatgaaatgaccggacttggttatttgggtgcggatattgttttagaccgcgaccgcggaccgatgatgctggaattaaatgcacgtcccgggctttcggtgcaaattgccaatggtataggattgcaaccgattttgcagaaaattgaagaaacttatccaaaaaatttgactccgcaagaaagagttgagtttgtcttgaataattaaatgcgacttcctaaataggatattagaaaacgaaaggaagcataaaatgactgatttattaggaaaatctgatacaaaacatattgagaaaccaaataccaaacatctggaaaataaagatactaaaaagctggaaatgagtgaaaccagagcaaagaaaattaagcattcttacaatgtaaaggatgcggaaaatgctttgcttttgaaaacaaaaaacggcgatattgtgattgaaatgtttccggatgatgcgccgaaacatgtggctcgtataaaagaacttgtgcgtgacggtttttataacggcttgaaatttcaccgtgtgatagatggttttatggcgcaaaccggcgatccgcgcggtaatggcaccggcggcagcggtaaaaagctgaaagctgaatttaaccgcaatcgtcatactcgcggcacggtttctatggctcgtgctatggatccggactctgccgacagccaattttttatttgtttcggcgattgtccgtggcttgatgggcaatacaccatctggggacaggtaacttccggtatggagtatgtagaccaaattaaacgtggtttcggtcctaacggaatggttgccgagccggatgtgattgtgtcgatgtctgtcatcgctgatatatagggggactcgtctaatggtctactacttttaactttttgtgcttgtgtactaatttgtacacggcgcaaaaaagttaatgcgtattagcctcattatccaaatccctgcgagttagtaccggttgttagaaattgcagccggtatttttttaaccaggctctttgcgtgagaggtcacagatttatctgtaaaagatgtggatttgttaaactcaaccaattgatattgtggtaaaaaatttatcttaacataatcttttgaagttgctaaaattctaaaaccaataagcaaaaatcggttccaattacacaagatgtgcaagcattttgtatgtcggatagagtcatattgattaggcatttattgccattggtacatgaagaatcgccataataatattcgtttttgctttgattcgtaaaaatccaaatatattgtaaagaagaatgcagaggttgggcaaagttactgataaattcacggcaaagcttaactgaaaagttatcagatctaatattattgctgtcatcaaaagagtgtgttccgagttctatatcataaaccaaatgattatcgcgagtaaagacagtaactgtgctgcctgtagtatcagtcaaaatttggttttgtatagaccatccttccggaataagattcaatcctttgattgtttctagcaagtaatgtttacgggtatcatcagttggttgcaaaactctcaaattatcgatatgttccatcaggccttgagttaaataactgtatccttcaagagttttgttaattttccatttttccagtgcttgagaatagccggcaattcctactacgctcagcactgcaattatagccagtacacccagcatctctatcatgctacggcctttttcccaatttttatacatttttcaaactccgtttaatgttacataaaaacaaaacccgctttgaagcgggcggatgttcgaaaaccgtgaatcaataaataaaaaacggctcggcttattcagcacatggccttattcaccgacatccgtccaaaaacagaggtcggcataacaaaatagagtcgctatgcacagcggctatttattgattcaaagggttttcgacgccctaaaagcactattgtgctttcgtctctaaaatatcggcaataatgtttgttgtaaagatatttttacttaattctttgctctttgatgtttttgtgagaaaatttaatttgtatcagaaaaactcacaatgatattttataagtattttcgtaaaattcagaaggtaaactgactaacaaatgaagaacaactggagaaggatacaaaccatactccattgaagttttgcaatttcctgtgcccgtaaacctgccttaaaacttagcataaaaattaccttattgcgaagcggatgccgtgtcacctctaagtaggttaatgttaagttttgctgcttgtctgttaaaatttttgcctgttttcctatcgccattattttgtc

SEQ ID NO: 353 - DNA, 23271 bp, synthetic construct
  source 1..23271: mol_type = other DNA
  misc_feature 1..23271: note = Synthetic
aagaacaaactcaccaaataaaaaaaacgatattcgggtgggttattttgttataaacgacctgattttttaacataatatataaatttacgataatattggtcgattttttgccaagcaatagtatattttcttataccatcagaaattgaatccatatcaaatggcatattttcttcaaaggcactcataaactgcgttgcaaaccacaatgcaagatatgaatttttaatatcttctttatgagtccatcttctttgttttctgctacgaataattttaagacatagtttataatttctatgtattaatcatcatcataaaacgcaaaatataaaattaaggatacgagccaaaagggcattgagtacctacattcttttttacatctaacatgagtattataagaaataggtatgtcaaaaatggacatattaattttgttaattaaattaatatttggtaacccctcgtgaaaaacaaatgaataaaccgatgtttgattctgattttgaaaaatacgagtggttaatgaataacgggtgtaccaatcctgaagataggaaatggctcgcagattatattagaagtaatgaatacaacaacttatatggaggttagtagatgaaaacaaatgtatttgtaaaaacaaaaaatgtaaaaggctttgtagcactaatgtcagaattagaaaatcttccactaaaaattcccaaaatagcacttgtaacaggcgattttggtctcggtaaatcagaaacaattaaatggtggtcatttaaaaatgattgtatttatgtaagagcgaatcagggaatgtcgagcagatggctattatctgaaatagctgatgaattgggcgaagaatattattggaattcacaagctacatttaattcaattgagaatcatcttttacaagaaccaaagacaattataattgatgaaatagattatttaatcgaaaaaaatacggttgaaactttaggagatattcacgatagaacgggttgcccgatggtgcttgtcggtatggcaaatgcggacaggaaacttgcaaaatatcctcatttggtagacagaatttataaaacatttaaatttgaaaaatacacaactgaagatattaaattgattttacaggatttgactgacatagaaatcacagaagatggactgaattatttaacaacaagagctgatcagtttcgtcaaattgttaaattaataaataaaatagagaaaaaagcactcataaatcaaattgaagttttagatgaaataatattaaaggagctattaaatgaaagacaaagtattgcgactgtgtaaaagactcgataaatttacattggatgagattggaacaatatctgaattgaattctgaagttttacttccgttgttagaaatgtttgttaaaaataaaaaactcatcaaaaaaggtaagatttatcaatataataaaaatgcaagcagttatttggctaaaaatagactacctcaaagatatcagcaccactcaaagcaagataagtaataattttttctctatatgagcgaaaattgtcaaagtcaaattttacatctcgcacttttgattcaattttatcattaaaatttgtaattgtaatttctacgctgtcgccgcgaagatattttataagcggtccgacttctgttttaaccttttctagttcaaagaagtccaggttattataataatcttcatcagctaatgtttttaatagttctcttttatcaaaaacatctttaatacttgcttttgtaagcagagcttgagctgtttttaagagttgaacttgttgcttagaggagtcaactttatcgtctaacagcgacaactgcataatacataaacgaaactctaaagattttgaatatgtgtcatcagttgtgtcttggtctataagctttaataagttaactcttatatcgtataaatctttctctgtaaggcattctaaagctttttctgtcttatatttatcaacataatagagccttgcatttacatcaattctgttagtgtctaagtctgcaatcttttttgccaaatacctttttagctcggtgtgatatgctttgtaattaggttgttcttgataggtaatattttgcaactttgttaaaatatcaagcttcgtagaataaattttttgattgagatttagctgatttgatggatctttaccttccggattcatgtcaaaatattcaaaattattacaataatcgaagataaagaagccttgtttgtcgcaataatccatacgagtatcgtccatagaacgaccttcaaaataatctctcgaaggcgttataacgtgcaagtttttacaggttcttgtgccacgtccccacatttgatcaaatttaattcgagataaaacgcgcttaaaaaatacaaggttgactatctccggaatatctacacctgtgtccatcatatcaacagaaacaacaatttgcggattagagtctttttttgcaaaattgtcttgtctcgttttatttttctttatttgcgtatcaataacctggcaaaattcatcaccaagcgccggatatgtcttcttaaagacctcgacaattttaaccgcgtgattgtggtcgacggcaaaaattaaagttttaccgattttatttccgttatcaacccttagaccatttgcgaataaatcagaaaacatctttttaatagtatcttcattaaaaagattctttctaaacttacttccatctacggcatcaggtatttctccttctggagttaaaaacagctcttcatattcaaccttttctttgtcacttaagtcagcatattttaagccgttcttcagaatattagaggttttatcaaaggcacgatagctaacaagatattcaaggttaacagcttcttcaaatttaacttcaaaagtcggctcatctgtatttaaatctaagatttcataagtagagcggtcaattgctgtgcttggcgttgcagttaaaccaattacgaatgagtcaaaatactcaaaaatggcacgataaacattaaacaaagagcggtgtgcttcatctacgataattaagtcgaagtgtccgaccgaaaattctttctttggcttatttaagaaattaagcattgaattgtaagtacagatgcagacgcgtgccgtagtatctctattaggattctcagccgatatatcgctaacaacaccatcaatatattgcataaacggctttaaggcattagaaacaagattattgcggtcagctaaaaaaagaatattttgcacccaatcattattgattaaaattttgcttaatgcaacggctgttcttgttttgccgacaccacaaggcaatacaagcaagccttttctgcgcattttgccaccgacattcgtagaatcaatcatttctttaattgcttcaatgagtttactacggttaataattgtttcgtcaacttccttatttacaatagcattacgagtgtctttagttcccggcttctgcctttttatcattagctctaagtcatctaatgatgcaaagttaccaacttcacgtgccggatacttgatgctatttgctcccgatatagctttgaagaaaaaaatactctgatgaaatctttattaattccgataatatcatttattcgtaacgctttgcaaaatgctccaaatgatattacttttgaatatccggtaaaaatactggcttttcccactaacgccttactgccgcttgatgtgcaaattactgctcctattaaatctaaaactaaatggagtgatttgtttgatgattttgcggaatataagcgaggttttaagaaaattacagaaacaaccatcaatcagaatcggggatatttagagacggttttttatttgatgaaaaatcctgttcttgaagatattacctataaacattgcttaacagtatgtaagttaatcagtaaagttccgttgaggtggaaagaccgttataataatgcttcattattaaaattggttaatgaagttgatgaaaaagggtatgaaactttatcaacggcatctattagaaatcacttgatgacatttaaggaatttttacgatttgcgaaaaaacgacggtatattacagaagcatttgaatatgatattgatattcctaaaaaagaaaaaggtaaagaaagagaaagtttttcgggtagtgaattagttaaaatttttaatgtaagaacttataatatttagcggcatcattattaatttcacagctaaggacataccaaaacaacttattaagatttaattttatttccttgtccattatgatttcctttctttttgcttttttaatatttttcttaacagcagtgcctgatgtagaatatttcctttccgttctaagtattgtgatttgtttataacttcggctaaaaaatcctcatcatttccttttaataaaggtcgtgtaaaagggttttggcactcaatagccagagcgagtttagaaaaacgtttataatcgcaaccaagcaattttttgcatatttcataaagttgttcttgatataaaagcttgccgttggttaaagaaaaaatattataaaaattatctggaatgttggatatatcttgcggagaaacatttctagtccatctggatattcttagctcggcaattatgttacataagttttcaatattaagcttatctgaattataaattttatttctaaaggtttcttttgagtttttttcttttaacctcataaatttttcaaaattttcaatggttaattcatcaaaattattaaccattttccacattaaaataacttcttttgaatattcggaagaagagagatcttcaattctatcagccgttatattgctgatgtcatttttatcggaagctaaaatatggattagttccggacaatgagcggaaaagtaggaacacaaatcatattttacaggattaattttggtaatatccaatatataggcaatgtacgaataaggcaaacatccacaaaatgacggaatttttattccgtgctgtttctttaatttcataagagttaaaaaagctgttgccgttccaaattctttaatgttttcaagttcttgctttagacgttcagaattggtgctggctaagggagctttctttatgattttttctaacttttcaaaattgtttaaatttttatctttatctgtttctattctatacaagtacattttatcaccgttttttctgttgtttttgacgatataatgcattaacgacaaaatctgacggggattttataagatacttttaaaaatcataaaaggagatttttatagaaaatataatatttaagctatttagtccgcacacacaaggcttccgaggaaataaaaaaacggagcattgcaatattttccgaatgtctacaaaaaaaatattgctgttattttataataaaattgagaacagaatataacttggttaatcatttctttgcgagcttctcataaactttgctgtattttttcatagatttttttacgaattttataacatcatttgtaggaataaacttagtttcatttttatttctacttatagacttaaatatacgacttatgtttttcaacattttatttctcctttctttttagaaaatgagcagctgaaatttttcctctttttttacctttgaaatacatttatcccccatcattttttgacgatataatacatgaccgacaaaatctgccgggatttttataaaatatatttttaaaatttagaatatttaggataattagctttataggtaatataaaaattttagtctgcttcaattacggatatggcttcttgaaattttttcggagctaagtgcatatatctcatcgtcatttttatatcagaatgccccattagttcttttattgtatatacatcaactccccccatagctagcctacttgcaaatgtatgccttaaagtgtgaaatacaactttatttcgcgtgtccgtaatgttatcattaaaaccaagctttgcaacaactctatcaaattgatttgaaatttcttttattttttctccttttgtgtttgtgaagacataagaagaaacagctaccgtatttttccgttgaacaagcatttcatatactttattggtcatattagcgtatctgttaataatacctttaggatctcttatggatagggttttggtttcaaaattaacgtccatccactctagagagaaaatttcatttgcccgcagtcctgtatctaaagacaataaacatatatcatgcaaaggagaatttgtcattagtgcaagagtgtctagaagttcctggatttcctctttacttaagaaacgaatacgacgattatctttttttattctttttactttagaagctggatttgtatttaaaaattttccggcatttatgccactattaaatacttgtcgtattacatctaaaatatgattaacggtagccggagctaggcatttttcttctccatttgctcgtaaagccggagaaaataagtagtcttttagtctctcgatatctgcgggagtaatctcatatatttttaaagcgccgatttttggaaaaatatattttttgtataaggatttttcattaacctgtgttttctgtatcttttttgataagtaaatcggttcataaatattatcccataattcagaaaaagtgatgtttctttctttttctgcagcttcttctgcttcttttgcttttctttcctgattggccaattcatatttttcttttaggcttttgtatcctgtaccattttttatgttttgttttatagcacaaaccgcttcaaaagctttcagctcagtatatccttgactttcccaaccaaaaccttcgtttttagttttcccgtcaaatttataacgtatcataaaataacggtctttacggattccatttcttctggatgcatgttccctatagcgaacacctgtatattttgacggaaaatatttttcacccatttgtgccactcctgtgccatttttttgcaataaaaaaagtgattttctgttacattatggaatacatcttataataaaaaataagcaaaatcaatatatttattgcatatcgctgatgatttgtgatattaaattatctatataataatacgctcataacctgaaggtcgtaggttcaaatcctgcctccgcaaccaaagatgaaaaagaccagtccttgtgactggtctttttgtttttgaattgtgcgaccggatttgaacctacgggagaagttggttcatgccaagcgagaggtaccttgaagctgtggagaaaatatcgacattttgtgcactattgattgttttatgattgcacgaaagaaaattgcattttatgggaaaaagggtatatagtgttcatagccggagggagggcggcatttgtgttgagattggctgcgatgtttctgtttcttattctgggcgggtgccgcagtgttgtcgtgccgccggattatgtttacaaagaaattccgacgcgggactttacccttgccagctggcagaagataaccgatccggcctccgggtataaaatttatattgagggtgacggctatgcttttgatgtgcggggcagggcgacaagcgacccgacgccccgggggacgctgatgcgggagctggcatttggagatgacagcccgaatgtggtgtatctggcacggccgtgccagtatgttaaaagcggggtttgtgcgcagcggcattggacaacggctcgttttgcgccggaagttgttaatgcgtcatttgccgcgataaagacgatagccggggataatccggttgttttggtcgggttttccggcggggcgcaagttgccggtttgacggcgagtgccaagccggggctgaatgtgaaaaaagtcataaccattgccgggaatcttgaccatttggcctggacgcagcatcataatctgccgccgctcaatgaatccatgaatttggaaagttaccgccggcagtttgtttgggttccgcaacgccattatgccggcagtgacgacgaggttatgccgccgtctttaatccgggcgtttgttgacggaacagcgccggtcatcgtggttgacggagccagccataattccggctgggaaaaaatctatccggaaatttgggcggaacagccgtagcggttggtgttttgtgtgtgtccgttcgctgcttgtttgggctgtatttatgccttatggtcgccgttttccaactcggcaaatttttgcgccatggtcgggttattgcgggtgaggcgtttgacggtcaaatcctgcgctttgttgttggccaggcgcaggttgttttctgaggacatcagagcgtctttggtcttttgcaggtggtcgatggtcttgtctatttcttcaatggctttgcggaatttgtcgctggcaagctgatagttgcggccgaacttgtctttgaagtcgttcatttccgcctcaaagttggaaatgtctatgttttggtttttatattccgccagctgtctgcggtattgcaccgcattgagagccgcgttgcgcagcagcgtaatcatagagatgaaaaactgcgggcggatgacgtacattttggggtatttgtgcgaaacgtcgacaataccgatgttgtaaagctcgctgtcggtttccagcagcgataccagcacggcgtattcgcagcctttttcgttgcggtctttatccaactctttgaaaaagtcttcattcttgtgtttggtggcggtggtatccatttcatttttcatttcaaacatgatggagatgaattctacgccgtccggggtgctttcccggaaaatataatcgcctttgctgccggttttggcgtcgttgtctttttcaaagtaagcattttgaaaggcggttgcgcgcagacggttgaactcggtttcgcagtgttgttccagcgtttcgccaatcattttggtggacattttggtcttgaggtctttataaaaggcgatttcggtgtctttggcctttaactggagggcgaagttttccttgagggactgttcgtgcaggcggctgtctttttcactttctttcaacaggctttcgagttgcaggatttttttgtctttctcgacgagtttgtctttttcggcggcaagagcggtggtgacggcaatggttttagattgttcgttggcgctgatttgtgctttcagacgttcgatttcctgtgtcaggctgtttaaggaacgctctttttccatttgcgcctgcgttttgagaagggaaagttcgttgtctttttcgaccaggagctgtttttcgcgttcttgcaattctttgtgaaattcggcattgcgcacctggccggcgatggccgcataaccggattcatcgacggtaaagactgcgccgcatttggggcattttatttcgggcatggttagtgaagtctccgcagattgttgtatttatgacagatgaagacagaatatggcgaagcggcggcgatgtaaagcgctttgtccgcaggctgtgcacgtttttgcgatgcgctaaaaataatgggggcaacatgtaccccctcatcttgcggcattgagccttattatatatgtgttgaccgtctaattaatctctgaaaaaaattacgtcataacatatattgcaactaatataacaatattctaattgaaaagtcaataataatattatagtctaatggcaaatgaacttaaaaataggagtttgttatgaaatatcgtttaggtttggaccttggcagcacttcaatcggcagtgcggttatggcgttggatgagcagaataatgttttggatattattgatgccggggtgcggatttttgatgtttcagagggtgcggaagatagacgccttaaacggacaatgcgcaagaatttggtcaggacccgcaagcgtttggcgttattggcgcagaagctttttgagaatggcttatgggttaatgctcaaccggaaggtacggcgcggctggcggcaaagtctccttataaaattcgttacgatgccgtaaccgggcggctggaaaatccaaattatgttggccgggcgttgctgcatttagccaagcaccggggagccggttttgtttctgcggcagaggagagcgaggaagaggttcttgaggaaggtgaaaaatcaaaagggcggtcttcgccgtatgatttgatgctgaaacatcttaaagacagcaattcggaaaccgtcggggcttttttctacaaaaggatacaagatagggaaaaaccgcagaacagagtagtgcggcagcgggcttatgcgttaaaagaaaaaatagttgattatgctattccgcgttatttggtaaaagatgaatttcacaaaatctgggatacgcaggctcagtatttttctcagatgcgcagagaggggctgaaacaggaggtttatgatattttgttttatgaacgtccggcagccccttatgcggtgggaaagtgcatttatttcagagatgaagaccgtttgttgaaggcgcatccgctggctgagctgcgccgtgtgtatgaggaggtcaacaatatccgaattgtgcatgatacgggtaaacgccgcctgacactggaagaacgggacaacatcattaatgagcttttgttgcaggggaaaaatgccggcaaacaagcgattaagaagttgttgaatttgtcggggcaacagaaaatttctttgcaggatgaccgggttattaaggcttatctttattctcgccctgaatttgccgaggtggcatatttgcaaaaactttcaacggaagaactggccgcttttattgaatttttggcggaaccaaagaatcctgacgacagaaacggacgtttgtacagtgaggatgccttaattcagaagctgaagctgattttggatattgatgacgaggaggaaatcggaaatttgcttgccaaactgcccagggggcggggaatgctcggaaaatcggcaacagaactcttgttggaaaaaatgaagcaggaggttctttcacaccgggaagcaacggatgcgttgttggctgtggacaagcgctttatggcagcagaagaaattgcccgggagaaacagggaaaaaattttgcccttccttattacggcgaaattttgcaatcggatacgcagcctttgccgcagttggttattgacaataacaagacacagaacaaagatgaggcgcagtgggggaaaattgccaatccggccgtccatatgatgctaaatcaactccggctggtggtgaatgatattatccggatttacggtcggccttatgacattaatattgagttggggcgggatgtcggtttgtcgaccaagaaaaagaatgagctggaacaaaggcagaaatcaaatgaaaagcaaaatgaggcggctaaagagtatttgcggcagcataagctttgcattaacggaaaaaatattttgaaatacaagctggctatggagcaggggtggtatgacgcttataatcccgataaaagaattccgcgcgatttcagcggtatggagatagagcatattattcctcaggccaagggcggtactgatacatacaacaatctttgtctggtcaatcgcaatgataatctcaataaaggtgaccgttttgcctatgattattttgctgaagccaaagagccggaagttttgcgcgagattttgaaaaatgcccgccgaaatatgcccggaaaagcctggcgttttgaagcagaggcgcgcgaacgttttgaagatgccggcgatgaggacgaaacaaaccgctatttggccgatacgcgctatatgtctaaaatggcagcgcgttatttgcgggcgattgttgattgtgatgacagtgaagatgttattcgtaaccggattttggcggttaagggcgggcagacggctcaactgcgcaaaaactggaatctgcaagggctggaatatgaattgatggggttggatgttcctcgttatgtttcctgcacgccgttctggctggaggtaaattccggagaagtccgagcaggagcggacaagcctgatgtcgacggaagctggcggtttgttgataaggcgaaaaataaggaatggctttccaagccgagaatagatcatcggcatcatgccatggatgcgattgttgtggcttgtgttaatcgggcgatgattaaaaaactggctgacagcacggcgttgaggcatttccaatgtccgttgccgctggcggcggttgattctccgggagcgtttcgacggagggtgcttgaggtgttgaaagagattaatgtgtcgcacaagcctaatcacagtaccgcaggggagctgcatgaggcaacagggaagaaggttttgtgtttgaatcctgatgtgccgggagctttgcttactgtttacggcaggaagattctgcaggttgttaaaaccgctcgggatttgaacaagcttcttattcccgagactataaaagacgagtggtatgaagatattgctcaagataaggaaaaacaggcgaagctggttcgagattttggtttgtatataaacacggccgaacaaattctggcggaagaaaatgagcgggctgtggcagaaggcaaaaaggaaattaagatcagcgaaggccggattatagcgaaggcttttcatattattcaggagaaaggattatggaggggagataaattcaagtgttatgaaaactcctcatctcttatttatatcaagaagcatggggttgcttataaatcaggtaataatcattgtgttgatttttatgtgaaggatggaaaagtcggctgggaagtgattagacgctttgatgttaatcaggcgggatttgttccggaatggaagaaaagcggcggcaaaattatctggtctgttcaacaaggggatttgctggaactggatacgccggatgagtggaaggggtatacggataaagaccgctgtttggccagggtgaaaaagtttagtgacggccgtgttacaattgattttgtgacagatgcccgcatgacgtcgccgaaagataaaagcttaaaatatatgttggttgacagtcttgaggacagaggattgagttattttcttaaaaataaggcgcgaaaagtagaactgacgccttttggcaaagtaaagaaaaaacacaaggttttgtggaatggcacgaaggcagcggcttgaaactttaaccggatggtcgatgatgtggataatctgtatgtttgatattccggtcagaaccagaaaggagatgcgcaaggcgacgcgttttcgcaatgttttgctggatgagggttttgtgatgaaacagttttcggtttatattaaaccggtgaaaagcctgagtgccgggcagactgtgacgaagaggctgtcgcggtttattccggataattcatctgtgtcgtttttatatattacagataaacaatatttgatgaccgaaaattatttgggaaagaattatgaagaaaatgaagaagagactcgtgaaaaaaatggccagttgctactgttttaatggttttgggaagacatttttattttataataacaccttgaaattatttaatttcaaggtgttatgctattagatagcttatcagagattaattagacggtcaactataacaggttcatcataggcaacaccgatatattgagcttatcagagattaattagacggtcaactataacatgcttaataacagttttatttacgcaaatagcttatcagagattaattagacggtcaactataacgcaacctttaacgccccaacgttgtttttaagcttatcagagattaattagacggtcaactataacgattcaccggagaaagaggcttattatcttagcttatcagagattaattagacggtcaactataacacgtacataaaacaaatctttaggcgttgtagcttatcagagattaattagacggtcaactataacttaatattgcagagactggattagaaataaagcttatcagagattaattagacggtcaactataactattcaaaagcgtacatatcgtcatttatgagcttatcagagattaattagacggtcaactataacggacgtcccgccgactatttttcgctgaacagcttatcagagattaattagacggtcaactataactttcattgtcgttatctcttaaaaaccagcagcttatcagagattaattagacggtcaactataacgagaatcagaaacattccccaacaaagaatagcttatcagagattaattagacggtcaactataacttattgaatgaattgcagtttaccggcgacagcttatcagagattaattagacggtcaactataactcaacgataatactcgtttcctgcgaaatgagcttatcagagattaattagacggtcaactataacaaagcaagagaaggaatagcgcttgtacctagcttatcagagattaattagacggtcaactataacgtattgacgaaaggagtagtaatgaggataagcttatcagagattaattagacggttaactataacaaaagtttgaacttatcgtcaaacgccggcagcttatcagagattaattagacggtcaactataactatccggcgaacgcatcaacagttcttttaagcttatcagagattaattagacggtcaactataacttattgaatgaattgcagtttaccggcgacagcttatcagagattaattagacggtcaactataactcaacgataatactcgtttcctgcgaaatgagcttatcagagattaattagacggtcaactataacaaagcaagagaaggaatagcgcttgtacctagcttatcagagattaattagacggtcaactataacacctttgcgatagctccccacatattacccagcttatcagagattaattagacggtcaactgtaattcagtcggtacatatcggtcatttgccaaagaagctatttttttgtgtggtggttttaaaaacaaggatatttcagcagaacttttttattttcgaagctggtaaccagactgctgacaaattcataaataccgtcatttaaggaaacggttccttttgctgtttcaacgggggtggttatgattttggtcaggcttcgttttattgccggtgttagttcgatatggtcgatattaaccagcttgtttagttcttcaaatacaattttatcggccaaggcacgaaagggttcaattaaatcatcaaccagtggcagaggattaccctgactgcggtgtttcaggccgatataaggcagaagaccattgccggcgacagctcgggcgatgatggctcgcaagacggtgtaggtataattcaataagatatttgtgtcatcattaaggcggtttctgacaaattttttaccaaacagggacttgaaataaattgcggcagcgataccttcatgattgcgggagtcatcgctcagtgttttcctggctaaaagtttcaggcgttcaatattggggtggtcgggaaaaaagtattccagaattttagcctgattgtaaattttgttttggataatgcttttccaaagattcttttgcaatggtttggaacagtttatttgctgacggatacgcggggcaatcagccagtgtccggtatagggcattgtcagcgttgtcggcagataatctttgccgcagcagatgaggcagccgccttgctcgcagacggcattaataatgtttttagtcaggtttatgttatttgcggaaagcagaagcgccaaaatgttatccagagggatttcctgtctgatttggcttgttttgttttcaacgacgagaaaacctcggtgcagggacagcgcaaagccgtcgttcattatttcgattatttgtcgatccatagccgttgctctcattatttctgttactctgtaataaaagaatagcggcaaatatgaaaaatatgattaacggcgttgttaatatggcggggagggttagttttggtggtttttgaggaaattgtaaatgctggcgcgggagagattcagacggcgggcgatttcggcttttgaaatgccgtcggccagcagttttttgatttctgctttatggtgcgccagtttggatttcagctttttgccaaccggatggccgagtttgacgccggaggctttaagcgcggaaagtttgcgccgcgtggaataagatgtgacgtttttttgcagggataaggcgatgtttatgccttgcatgataaatgggaaatcggctgcggaaaagtcaaaggtcagattttcggccgcggatatgattttgtgttgtggcagaagttgttcaaggttgttttttatttcgcctaccgtttgtccgaggcggatgatttctgaaacaataatggtgctgtggggcggaaggctttcggcacagctaaagtcagaagccaggaggaagtcttcaatgttcaggctgttgaggcgggcataagcgctgatggcttgcttttgcgccctgatgatttcttccggttcgtttattttgatataagcaaaattcattcgggataatgtttcgtgttaaattaaaacggtcatttttatttaacatacagaaaaggctgccaatagtcaacaatgataatgaatgcgctgtttatttcctcagttttttctttcgcattaaatgaccgttttgtgttaactattttctacagatgagaatgttaaagaaaatcagacttgactttttgtctaattgtagctaaattaagtctaattaacaattattataaacttatataattttaactattatggatattagagaaaaattaagagcaaatcctaaagcttttattttgttggctttatgggcggttagtttgatttttgtttttggcaatgagtttacggcttatgtcaaccgggatgcggcgtggcttgttttggcactgctgacttgcctggctgcttttttggtgtgtaatcgttttggcgacagcaaaagcaaaccggagattggcaaaccggaagatgagaaagtggattattctctgaaagctcagttggatgaggcgctttcttcccaaatgtcgctgatggcttatggcgggaaaaaagagattccgcaggagctttacgataagctggtttgctgcgatgcgtcaaaagaccggccgaacaatgtttgtgaaacggagggcagcatcagccgttttcccggtgaagaatggccttgtcgtttggtagatagaatctggggggtgttaatcggtgaaatggtggtttataatcttgacgattattccctgttcggcgctgcgcggctggcagcttattttcccggtgcgattttgtataacaatatcgtgattttttatgagggagacggcagccgccagtttgagagaaaagatccgacttatatttataatcaggatgtttcttatgaggattggtatttggctgacggcaataaaattaaggagatgtttcctgattatgcccgctatcttgctgatggaggcgggtggttacattccgggattgggggactgtattttcttgtcagttctgatttcaaacgggtgcaaaacgcttttatgccaacagggtgttatttgacttttacttcgtttcaggcgttggccgaaggacatggctttacttttgcgaagacatttgccgatggtttttatgcccgttctctgcgcgacacttttgtcgagattgtttcggcttatcgcaacggcgctttatcccggacagcagaagctgcggcggaaacggcattttatgatttggagttttccgagaagcattatgcgcagttttatgtcggttatccacggtgcagcttttccagggccagagaggtggccgcagatgttgatgaaatttcgagagcttatttggaaaacagaaagttgtctcatttcaacattttgcaaaacggaatttatctgaattcggactgggatgttaatcagagcctggatggcacgatgatatttccgcttgatatttatgaggcttggagccgtccttttacccaagatgaactgaagcaattgtttggttatgtgactttggtaaactgctattcctttaaaagtgagaattttgctctgaaaatgcaaaaaggattttgcgaaaggtgagaaaaaaaccggggcaaccccggttttttttgtggcttattggagcggaggggttgcaaataatcttaccttggttatgatacggaacaaacgacaacctgaggagaatgacatgaaaattgcgattgccgcagatcacggcggatttgagctgaaacaaaaactgattgcacattattcttctttgggggtggaaatgagcgatttgggaacttattcggcagaatcggtcgattatcccgattatgccgaaaaagtgagccgggcggttttggacggtgctgccgattcaggcgttttgatttgcggtacgggaatcggcatttcaattgccgccaaccggcacaagggcattcgcgcggcgctgctttacagtgcggaaacggcacgtctggcgcgggaacacaataacgccaacgtggcggtgtttggcgcgcggacaatgacttatgacgaggtagtcgagcggctggacatttttttgaaaacgccgtttgagggtggccgccatgtgcgccgtattgaaaaaattgatgtttacggaggatgttagagatgatggattttacggagaatttgtgggaagaagatgcggaaatcgccgatgcgattgataatgagctgaaacgccagcagaaccagattgaactgattgcctccgaaaatattgtgtcgccggcggttctggaagcgcaaggctcgattttaaccaataaatatgccgagggttatccggcacaccgttattacggcggatgcgaatatattgatgtggtggaggagttggcgcgagcacgggcgaaggaactttttaacgccgcttacgttaatgttcagccgcattccggttctcaggctaacaccgcggtttatgtcgctttgctcaagccctgcgatgtgattatggggatgtcgctggatgccggcggacatttgacgcacggctctaaagtgtctttttcgggcaagtggctgaatgccgtacagtatggcgtatgccgggacagcgggttgattgattatgaacaggccgagcggctggcgctcgaaaatcgtccgaaactgattattgccggcgggtcggcttatccgcggcagattgattttaagcgttttcgcgagattgccgacaaggtcggggcttatctgatggtggacatggcgcattttgccgggttggttgccggcggggtgcatcccaatccgttggaatatgccgatgtggtgacgacgacgacgcacaagactttgcgcgggccgcgcggcggtatgattttgactaacaattccgagattgcgaagaagattgattccgctattttcccggcgacgcaaggcgggccgttggagcatattattgcggccaaggcggtttgcttcaaagaggctttaacgccacagtttaaggactatgccgcgcaggtggtgaaaaatgccaaagctttgggtgaaacgctgaaaaagcgcgggctggatttggtttccggcgggactgacactcatttgctgttggttgacctgcggccgaaaaatctgaccggcgatgtggttgaaaaggctttggaagccgcgcatatgacctgcaacaaaaacgccattccttttgatccaatgccgccgaaagttacttcaggcattcgtgtcggcacaccggcggcgacgacccgcggttttaaggaaaccgagtttattcaggtcggcaactggattgccgatgtgacggatgccgtcgggacggcggacgagcaggctgttatcgaacgtgtcggcaaggaagtggtggatatgttagcggctcgttttccgatatacggctaaaagttcgtaaaagtgcgctctatggatgcctaatacagaaaaagaaaaaaatgctaagttataagcagtaagctctgtcttcgcccaagtgctcgccaatcgctaatatgtactagctcaggaacctaagctcgtttcggctgttattacagccttactcactaaggtttactgagatgttacagacaaaaagcaccattactttggtgctttttgcttagccattgtacacgcctgtcgcatttttttcttttccttattatccgtctcatatatcgcacttttacagcggctaagggggaagttcgtatagcacgttatctagagcgattttttccggtcgtaagtgtcctcacgtacttctatgtacgttgcggtacttccaccgttaaaatctctctatctaacgcactctccgaacttttagtaaaagtgcgctctgtggtcaattagtacagatttaatggaacggcgccattctctgtttaactgttttgaaaatctgagcataaattgtttaataattatgataaagaagttgatttctaaaaattttgtagtatgttcggtatgttcatgcgggcatagttcaatggtagaacgtgagcttcccaagcttataatgcgggttcgattcccgttgcccgctccattatctcctttatgggagatttttttatgtggcaacgggaagattcccggtttttttgtccggggttgagccggaggctctcaccagacatacagagttgaaaaaatgtgcagaaaaatacccgaaacctataggcggttcgggtattttgctttttattggcggtttatttttttttgcacaagggtaagtttgcgcgttgtggttgatgatttttgttggtataacaaaaatgatgaattttatgcggcggaatgttgtcttaatttatacggcgacgcaggataagggaggcgttttatggaaaatagcggtaaaaagtttagttttgcggatttctttttttcttatgaggggacaatcgggcggttggcttatttgggcggtactgtagcgctctgtctgatgttttggtgtcttggttttttgggtggaatgtttatccattctgatttggggagttctttatttattgttgttttttccggagttgctttttattctactttggctttgatgcaaaagagatgccggagtatgggggtgaacggaacagcctatatttctgtttttgttttattaacatgggcggattttgttttaagggcttttagagtgtccggggtgggaaatcttttatttgaagtgttttttgctcttttgacaattgtttggcttattatcagttttattttacttttctctaaagcgatggagaaaccggatatgtcgcaaaggagtgttttgctgaaatatcctctcagtttttgtattgtgttggtagcggttttttgggggtcaaacttaattgtcacttatgctataaacaacgctgtgaaacgggatcttggagaggtaaaaacgtcccaacgttcggacgaccatgatttgttttttgcggttgattatatttatcgtaatgttgtggagtataaagagttttgccgcaagcaaggttatgatatgacacatcttcctgacgctttttctacaaaatttgctgcggaaatagaggtgcttgacagagagatgtccagtcatggcgggactttgaagagtcttttggagtatatgcggaaagatgagggtgctgagccgaaagaagatattgttgccgagtttgagtatgtcagaaagaagttgattcttcagaatgttgccaaggaggaaggtatgttggtagaaaatctgcaatggtcagaggaatacaacgatagaatgacgatggcggaggtttgttcctatatagatcgtgaggggactgatttgctgcctatggacagcgggcctgcaaaacagaagttttatctggttgttaagcagttgaagcagtggcaataaaaatgttaaagcctttcgttaacgaaaggcttttttcttgctggaatgagtattggctgggcggttttatttgccgctgccgataaatttggagagaatgccgtcagtgatgctgtcggcttcggcatcaataccggcggcctgcaatgccagttttttcagacaggtgctgacgatttcgtctttggtggcggtaaaaccctgattgaacaaggtaccggctttcattttggcgctgacttcgttgacggcacaggcgcgaaatttttcttcggcggtggcattgctgccgacttgggtcaggctttccagtttggcgcaggaagagagaaggataatggtggctaaaacgagtttgagtttcatttttttatgtccttttaattatcaatataagaaagatcatgcggggtgaagttccagcgggttgttttttgccagccgcagcctgcggtattttgccatgaaggctgtttgcacagggcgcggtagtatcgggcgccaacggaactttgcgtaatgcgggaagaaacgttctgagccgtgtcggtgacggggctgtcttccgctttcagaaaagccaggcaggcggccgccgtttcgtaagaagtctgtccctttccggcggcaagagcgctgccgttgcggacatggaggcgcgtctggcggataccacagcggcggtattgttcgctgagcggcagaaaggcttcgttttccggttcagccggctgaaagatgcagccggacaaaaggaatgccgacattatggcacagaatttcttcatcatggaacatactataagcagtgggggttaattttatataaaagcctggtcatatttgtcgttttttttatcttttattaaaattagtgattgaacactaaatttttttatgttatagtatttttgtgatgacaagtgtggagggtatgatgacgaatatcagcaagataatgttactgtcaatttcgtgcattttttgctacgaaacgggcaatgtttatgcttctcttatttccggtattgtacccaagtcaggaacacacatagacacaccacaacaccatcaaagtgactgtccacacttgtcacacctgcgaggtgagcgatcagttcgctgttggttgttccgtacagaaagaagcgcgatgcttaca

SEQ ID NO: 354 - DNA, 21257 bp, synthetic construct
  misc_feature 1..21257: note = Synthetic
  source 1..21257: mol_type = other DNA
atcaacaatttacaaatttatcaaatcaattgacccagctaaaggcgtcaattgatttggcaaacaatgaattagaagaaaaaaaagagcaactacatcaagccgatataatgcttgaatatccagcaatagaaatgaagtatattcagtttcgtaatgatgcagaaaattactcaaaaattgtagagcaaaaaaaggtagaaatagatagattaacagaaattagagacaagatatctcaagaaatccctaaaataaaaaaagaatataaagatgaaatttataaattagctcccattgtaaaaatgctaaatgaagctgattttgtaaatgaggaacatgattattcatttaccccgaagaaaggtaaagagtattcaataaatgaaactattaattctatttatactcattttaaaaaccaaaatagggttcttgaaaagagagatattgttaactatttggtatcaataataaataatttttttattgttttttatggaaagcctggggtcggaaagacatccttagttcaagaaatagccaatagtcttggggcaaatttaaacaaaatatctgtcaataaagggtggacatcgccaaaagatttattaggatattacaatgcattaacagggcattttatagatgcagaaacaggactacgtaaatttataaaacaagctgataaaaataatcctttcgaatgtttatacattacattattggatgaagctaatctaagtcccttagaatactattggtctaattttttaagtgttgctgatgaccaaatcaaaaagataaagcttcaatcagacaaagctccagatgaaattacgttatttgatggattaaagtttatagcaactattaacatggatgaaacgacagaagcattatcgccacgcatcataaatagatcctgcgtattctatttacccaatgaatataaaattcctagcttagataattattttcaatcagatcattatcctatatcatatcaatcattgagaaaaaattttggctatgaaaatattcttcaaaacaatcacaacgcagaaaaatatggacaagataagctagatgccatatatgacctactaagcaaaaataaaagtagaagtaccatatctatttcagcgagaaaacaaaaaatgattcgaatgtatatagatacaatgactaagattggtgataataacaatgatttaggttatgacaactcagatgttctagattttgcaattgctcaatacatcttaccggaaatacgcggagatggtgaaaagtataaagaattactgaaattacttctagatgaaatatctccctatacattttcaacctcaatacttcaaaaaattgtagaagagggacaagagaattatgataatttcaacttcttctacatctaatctcatcaaagattttgaactagttatctccaaaagcccaaacggtgaagagcgtaagtctcttaaaagctccacaccgcacacaccgcgagactattgtactattaacgatacagatcaaatatattttaatgcaacattaaatacctgtaataaaaatccctgttatttgcaaataggtgacatattaatagcgggaacaccacgtggacaagaaaacattgaattccgatttcgtggtaacggtgctttttttcaaaatttttgcggatacgctcagctaacactgcaaatatatacctccaatagaaaagaagaaaaaaactattatttgcaagtatgtacagataaaataaaaaaagaatatattgaggatatcctaatatatttagatagcaaaattgaaaatattttttttacagaaaaaaccattacttacagttcaagtataaaaaatcaatcaaattttcaaaactacaatcaacagataattgttgctgaagaattaacttcttttttctcaggaattaatctcaaccacatgaactacaacaaaatatctgaaataaaaaaaatatccaatataaacaaagcagcattaatagacaattcttcaatattgtggttatcacaaaatacttcagaaatatataaatcaacaaataacaatataaagataggacaaaacaaatatcaattaaacaaaattttaaatacatccttaaacataaaaaaagatatatatgagaataatatcattctttcatacatctcaaatataattacaacaataagtaatatattacaaaaaatctcagcagaacaaaaaagaaaagaatcagacagtaatgtaattccaaataattcatttgaatacttatatagagattatttaataaaaacatatgagctaaacaaaaaaaagtgtataaaaataatatcgaatctaacatcaattagaaaaaaattagctaaaatttacggcaagactacgatatacaatttaatttcaaagccccatatgacaatgtgctttaaaaacaatttcttctatcaaaaaatatatccgttattgctaaattggtggaagtgttcaaatgtaacagcccttgaaaaaaatgatataccattagaaaatatagctaaattatatgagtatctatgtttattcaaaatttttgatgctataaatagtgtactaaatattactccattaaaacatgatagtacattacttctaaagtcaaaacaatatatttggactttagaacaaggcgaaactattaccctattttacgagcctataatatttagcattccaaaggaaacaggtctaattcgtgtatccaaaactcaagatgaacgatacaactattatactccagattttgttataaaatattgtaataaaggatatgaaactttctgtattttagatgctaaattttcaaacgtaaaaattgacaatatatttaaatattttaccgatataactaatgagcaattcaatcgagataatataatattgatatcaataataaaaccagaatttgctaatacagcatataaatataatagtctttatataaatgatattttttctaaaaatgtgacattgcctgaattatcagagatatacttatctgcgcctaagtcaaaaactaaattacaagatataattcagatatttataaaaatatctaaagagaaatattttgagaaaaatcccatatcccgtaaaaaatatacatacaaatcaagttctatattagatgatacaaaaatttctctaattaaaggaatgatccttaggggagacaatttacaagatatagcattttggtttggagtaaacttaggtagaattagtgaaattaaaagtggaataaaatacaatgacatcctccctgcggataaaaacaatcttcctccacaaggaccatatccatctttatcagaattattcaagcaataaagctttaatatcacagataaaaaacaggtattatgtttacactttctgtcagtggcagataagtctgagctaaacaaataacagccccttctcccacttgaagcccagctttttttaaaacatcaaaattttttatgtctttcttatctggattggtctttttctttatctcaataggataaactttcccgttttcttccaaaataacatctatctcttttttatctttatcacgatagaaagaaatattaggtttccttccattatggatataacttttcaatatttcagcaacaacaaatgtttccagtatttcaccacttttagcacctgtttccaatgtttcaggagtattccatttagttaaataacaaactaaccccgtatccataaaatatattttaggcattttggtcatccgattgctaatatttttagaaaatggatacaacaaataaattagcccagatgtttgtaaaatagatacccaacgttgcactgttgatacgggtttccctatatctcgtgcaacatctgaaaaattcagcaattgtccgcttcttgcagctaatgctgttaaaagttccaaaaactgcatttcatcaccactatcggtcaaatcgcgaatatcacgttcaatatatgtctgaacataagaactgtaaaaatcttcccaatcaatattttcatcattatttaaggcaggataagagcctcgccaaataatttcataaagttcttttaaatctaaactttgggcttccttacttcttgttgaaatccattcaggtgtgggaacaaatttatcatagaaaggtttttccgccaactcaggtaaagaaaagccttctaaattaaggattcccacccttccagcaaggctttctgatacaccttgcattaaatgaaattgttgtgaccccgtaatccaaaacattcctttttgctttttctcatctacaagggctttaatatacggtaaaagttcaggagcatactgaatttcatcaatcaataaaggagcttcaaaacgttgtaaaaataaagcaggattctctttggccagtttacgattttccaaagtatccaaagaaacataattacgattctcttcacaacatctaaataccgttgttttaccaacttgccttggtcctgtaattaatacaacagaaaaagaagaattcatccgttttacggcgttttcaatagttctttgaatatacatttacaaactccgactaatttatcatctaatattaaaatagtcagaaacaattaaaagtcaagagaaatgcgactaatttatcatttgatgctaaattagttggaatttttatcattttcattttagaaaatgcctaatattggggattttctaaaataaaataagaatttcataaatttcctcatcggtaaatttgggaatttttgaatgtcttttgaagaaaaaatttccctatcggtaaaattttgtaggttaagcacaatatatcagttactgtattgtttagtaatctccgcaaaccaaaatatagtaataaaaaatgtggtgattaagatttaacaaataatatgaatgccaaactaatcaaaatttgggacctgacatcattctcaaaatagcaaaaaattaaatggtaagtgatacagagagatgatacaataaattttatttgtataaattaactcattgatgcaattgcgaacactcttgatgctcgccgatgttattggtgtgatttgaaagatataattaagcagactaagaagcggttgttatgatatccaattttggggtattagaccttcattatttttagaccaatcagctatttccataatattttcaaaatttccccatactttgggatctgcgtggtcaagaacaatgatttggactttctcttttgtgctatttatatattcattaaataatttaaatatctcaatgacgcttttaatgtcatctttattgctacgagcttcgagttctttaaggtcttgcggcatttcacttggatttggaaaaaatacttggcttggctggtcaaacattatgaaattaaatacattgcaattattatttgcaaaatatttatgaaaagcaagcaatattgctaaatggtatgctagccagtttgaagcgcttcctgtttctgataagtaataaggtgtttcattatcactttttttaattttaactgttaagtcattaacttcaaatgaagatacatttttaaattccacaaaatcaggcagcaaatttcttgtataagtaataattttattcaatgcttcataaggctttatttctttatacggatatttgcttaaatccttttttatattatttattttttctaatagtgcttcatctttaactttaaagaaatcaagtaagtttttagcttttgctatatcagaaatgaagtcctcaatgatatttacatttttactcttatctaattttttatacatatctagaattttgtttatatcatcatttgtttcggctattttctcatctacttcagccaattctttatagtttcttgattggtttgtgatacttatatagttcttgttttcaatttcttctagatttttacatagtttgtctatattagatataacaacactatcttggctattattaaggcaaaagtttttgataaattttgataattgaagcctttctactctatcattagataagttgatagtattttctagtaaattaatggttttaagaatagactgctttttaagttcataatctttaagtttgttataaagtggacgtaattctttttctaaagtcaaaatttctttagcaatcttgtcaccaccatcaaatgataatgatatatctgttattttcttttttataatttcttcaagtaaacttctaatatttacgacattatcatctaaagctttctgctttatgataccatatttcattgcttttagaattatatctttatgttgtaacaactgttcagttaaatattttttatttccctctaattctaactctaattttgcttgttcttttttaagggcatctgatttaatcttgttaaacatattttgtgaagtttctaagcctaaagcgacattgaatattttctttaatctgtccctgtaatccgataaatcagacttatataaaaggcaattagggtttgcaacaagagattgggtttgaaagttaaatgcgactaaatctctaaagcttatacggctgctatatgttccttctttattttcttcaaaaaaaggtatacccataatattatttataaattttttgaactcgtctttgttatttacattctgtattggttctatcggagtttcaagatttttacctttttcaaactgcatacagaatccacttttaggcagattttttctaataaataacatttcttcgtcatcacataaaagtttgataccaaaccaatcaacactatctcttataatgccaataggaattttgttttcactggcacataaacaataatcggttatatggactattgcagattttcccgtttgagataatccgtgaataacatttactttgccttcaacaaaatttatagtttttatatcaagctctttattttgaggccataatattatttctttaagttgtatattcattatagactaactcccaaaaaattgagaaaacgaaacaggtcaccattagaaaataacattcctaaacgctcagcatttataattaatttatttttatgatttggtaatttttgaacagtgatttggatatcaccttcatcatttatagatatcaaattaagcctaatgcaaaaaagcagacaagtcattgtatactctttatatcttaatatgtttgtttgatatgttccgaacaacttatcattctcatttatttcttttatcagagagtctaaaacatttttcctttttatacattttcgaaaattactgtttattataatgggcatcattgaaaaaatatgaaagatactaggaaagctgttattggtggcatttcttatgtatgattctacaaattttgcaatgatatatgctcctaaggcagggttctgaaaatcattgcaatatctatcataaatgttattattgctcatttaatcgtaccttgtagtctgggtgccaccctatagaatactctatatcatcatcttgattagctagaaagttgtatgcccctcttgatatacatttttcattaccttgtatagatactccagatatatacactttttcttctaaacagtctaaataaagtgctttacctttatcttcactattcaatgtaggttgcatattcacacgtaacttcttttcattccaagaattatataagtttgaataggtattattgagatcttcttgtgaaaatcttccatctctgaaatcattgtttcttaagtattcccaagataggtaatcagttgttgcagaatcgataatatttttatccatatttataatttttaattgttttatatatctgtctgaataattattatggtttttacaaatttgttcttgcgttggatagttgataatttcgacttctccatttaattttaagcatttttttaagaaatcactgtatttaatttctattaagctaagttttttatttttctcatttacggcaagtctgaaaaaccaacctataatttggtctataaaattattaaagcggttagagcttattttatctgataaattttttattataagatcatttagctcattttggagttctttatgaggtttgtatatttcgaatatttttagtatttgtatagtttcatttttgtgggcagtaaagaaatctctgtaaccagtatcttttatatttttaattctttgtattagtttatgataagcttcttcacaatcctccatattttttgcattgttaaatagaattaaatcgtcatcaacttcatttctacagaccaatgtcagaatacactttgttctttcattaaatttatcttttttattaatatataaatttacccaattctttagtgttttcaaaaaatcaggagcggtaactctaaatataactttctctttctcctttacttgctcaagaaagagatatccatagtcatctgaaaccacaacatcatcatctttttcaattaaaactgttgatagcttatcaattagataacctaatcctctatatatttgattagcatatcctaaaaaaccatcaacgctatcagatgggttatttctcattattattgcctcgttaaaattctattattagtctataggttcatttgaaaaagtcaaattaattttactaatataatatgttatatatcaatgggttaataaaaaattgtcaggtaaatatctgaactttgttttctgtttatgcgggattttttattgttgtttgcattttaaaggcgtgctggcaaagagtttatttcacaaattcaaactattttagcatcaggtaataaaatagtcgaaatttttatgatttgaacgtaacactacctgcattagcagatagatgtagacattccaaccatgccgtaaggcttgcgtagctttagtctgtgcaaatgaagttcgaaatggttaataccacttgcgtaaacaggtagaagtttatcgttcatcggtaaaatttggatttaaaagtaaaaataataaaattaagtgcgattctctgcaaaaataatacaaagaactgcacttattaagacaaattattcaaaataatttaatttgaaacaggagaatttgtttcgcttgcaatccaatctcttataaaattttctgttttagagatattttctttctttttctctttggctgaaccatcaaccttatttgtttcagtttcaatccaacaagttaaccaatcccgagttttattagacatctttttttctcctctttcatttaagattttagtattttggttttccattatttttctccataaaatttcgttatttctttaattatttttgtgttataatcgtttaaagcctctatatcaggcatcttcattgtgttatgtcattgtctgccctccgttaaattttcattatttccatccgtttatatcaatggtttcatccctaacggagttcaacaattcgtcaacttcggagcaccataataaaaacagacccctaacgggtcttttttttatggtaaaagcacttgctagtttgtaacgccgcaacagtgagctaaaaaatgttacaaatactttgcaaaagcaaaattattgaacctaacggcgaaatttacgggtagaacataacctttacagtctcctaaatttgataggcggtaaggtttttatgatataatttaatttaaaattaaaataatgggagcaacaaattgctccctcatcttacggcatttccagccttattatatatgtgttgaccgtctaattaatctctgaaaaaaattacgtcattcacataacacctaatattatgccgatattattgttgaaatgtcaatagttatattatagcctatatcaagttgcttgcatatacgggagatagccatgaaatatcgtctaggccttgatttgggtgttggttcaataggaagtgcagtcattgagcttgacaatgaaaataatgcaaaagatattattgatgcaggtgtccgtatttttgaagtttcagaaggagccgaggagagaagacttaaaagaacagcccgcaagaatttggtcagaacaaaaaaacggttggagctcttagctaaaaagctttttgaaaatggcttatggccgaatgaaaatcctgaaggaaccgataaactaaaaagcaaatctccttataaaatcagaacagatgccctaaacgaaaaattggcaagcccttattatgtcggacgagccattttgcatatagccaaacatcgcggagcaggttttgtctcggccagtgaagaaacagaagaggaaatcttagaagagggtgaaaagtcaaaagctaaaaagtcttcttatgatatgatgctacatcacctgaaagaaacaaattccaaaaccatcggtgaatttttttataataaaataatctccggcaagggaaacgataaaacagttcgtcagaaaaaatatgctattgaaaaaaatattgtagattacgcaatccctcgctaccttgttaaagatgaatttaataaaatttgggataaacaagccgaattttatccgcaaatgaaaaaagaaaatttaaaaaaagaaatttacgacattttattttatgaacgtccggcagcaccttatgctacaggtaaatgcatttatttcagagaagaagaccgtttgttaaaagcccacccgttatcggaaatgcgtcgtatttatgaagaagtcaacaacatccgcattttaaacgatatgaacaaaagaaaattaaccttggaagaaagagattctatcgttaataaactattgctgaaagggcaaaatgcaggtaagcaagcaataaaaaaattgctcaatttgtcagcccaacacaaaatttctttggttgatgacagagtaatcaaggcctatttatattctcgtcccgaatttgcaaataacgaacatttgcataatatgaacgaaaatgagctttcatcttttattgaatttttggccgagcctaaaatgtcaaaggataaaaatgctcgtttatacaacgaagatgcgttaatcgaatatcttaaacctattctgaagattgatgacgaaaaagaaatcggcaaccttttaaccaaattgcccaaaggacggggaatgttaggcataagtgccacaaaaattatcctcgaaagattaaaagaagatgtattaactcatcgtgaaattaccgacaaattggcggaaacggataaacgatttatggctgaggaagaaatcgctcgccagaatcagggaaaatgtttccagcttccttattatggagaaattttacaaacagatactgccccgcttccgcctttaatgataaataacaacaaaagccttaaccctgatgagataagatggggcaaaatcgccaatcctgccgtacatatgattctcaatcaaattcgcttggttgttaatgaaattattaaaatttatggcaagccttatgacatcaatattgagcttggtcgtgatgtcggtatgtcaacaaagaagaaaaaagaatttgaaaaccaacaaaaacaaaatgaaaaacttaatgaagaggctaaaaattatttaaaagagcataaaattgccataaataacaaaaatattttaaaatataaactagccaaagagcaaggctggaaggatgcttacaatccgacacaaaatatttcctctatatttacgggtatggaaattgagcatattattcctcaagccaaaggcggaacagatacatataacaacctctgtttagttaacagcaatgacaacttaaacaaaggcgaccgatatgcctatgaatattttgaagaaacaaaaacacaagaagaaataagagaaattttaaaaaatgcccgttcccacacccctcagaaatcctggcgttttgaagcagatgcacgtgaaaagtatgaagaaagcggcgataaagaagagagcacgcgttatctgacggatacccgctatgtggcaaaaatggctcagcgatatttgcgggctattgtcgattgctctgattgtgacaaagttatgcaaactcgtattttggcggtcaaaggcggacaaacggccaaattgcgccaacattggaatttatatggtctggaatatgatttaatgggacttgatattccaagatatgtcaattgccctccttactggctggaattggatacaggcgaaattatagagggaataaacaaacccgatattgatggcaaatggaaattttttgataaggcaaaaaataaagaatggcaacccaaaccgcgtattgaccaccgacatcacgccatggatgccataacggttgcttgcgcaaatcgcggattgattcaaaaaatggcagaagaaaatgacattaacaaaattcattatccgttgcctttaacttctgtcgaatctttggccgatttcaggcgaaaagtcatttcctgcctaaaagatatcaaagtctcgcacaaacctaatcatagcaaagccggacaattccataaagaaaccgctagaactgtggtatgggcaaatcctaaagaccctagcaaggttattgctttttataaaaaaagaatcttagatactgtaaaatccataaatgacatagataaattactgctttcagagaaaataaaagatgaatatcatccacaaattagtaaagacagacaaactcataagtcactagtggataattttatcttgcatctagatgatgcaagacaaaaacttctagaagaaaatgaaaaaaaacttttagatggtaaaaaggaaactaaaattacggatacaatgattctatccaaggctcttggcataataagaaaagcaaaattatggaatagtgacaaataccattgttatgaaaataattcatcactcgtatatatttccaagcacaaaatcacgtatgaaaatggcaataatcattgtgtagatttttatgttaaagatggcaaagttggttgggaagtcattaagcgatttgatgcaaaccaagcagactttgaaccccaatggaaaaaagagggtggaaaaattatttattccatttacaaaggtgatatcttagaacttgatacgcctgaaaaatggaaacaatataccgacaaaaaaagatgtttggcaaaagtcagaaaatttagctcaggaatcacaattgaattagtcaatgatgcacgagatgataaaaatattgataaattaccagatagaggactttcattctatctagaacataaagcacgaaaagttgaattgacacctttcggcaaaatcaaaaagaaacataaggttctttggaatggctcgaagacagcggcttgaaactctgacaggatggtcaatgatgtggataatctgtatgtttgacattcctgttcgcaccaaaaccgaaatgcgcaaagcaacaagattccgcaatctattacttgataacggtttcgtgatgaaacaattttcggtatatatcaagcctgttaaaagcttgtctgtcggacaaacgaccactaaaaaactttcaaaatttattccagataattcttctgtgtcatttatctacattacggataaacaatatttgatgacggagaattatttaggcaaaaattttgaagaaaatgaagaatcgattcgcgaaaaaaatggtcaattattgttgttttaaccactgaaaaatgtgtttttaaagttaaaataaatccttgaaatacaataatttcaaggatttatgctattagatagcgtatcagagattaattagacggtcaactataaccttatattcctcacaacggataatttgagaagcgtatcagagattaattagacggtcaactataaccaagttggcttttgtccaatctttgcttcaagcgtatcagagattaattagacggtcaactataacaaatctaacaaaggaggtaaaaaaaaatgaagcgtatcagagattaattagacggtcaactataactccagttttccctgtttgacatatttatttagcgtatcagagattaattagacggtcaactataacctatggctgataatgctagtatcacggttcagcgtatcagagattaattagacggtcaactataaccgtttcgaagtatacattaaagcagacaaaagcgtatcagagattaattagacggtcaactataaccacccggttcagatgaccgagaggttgtccagcgtatcagagattaattagacggtcaactataacacaaacttagttgcaccagtagcatcagcaagcgtatcagagattaattagacggtcaactataacccaccggtgatatacttcgaaaaagtgtccagcgtatcagagattaattagacggtcaactataacaaagtttatgtcatgatagttcagtttttgagcgtatcagagattaattagacggtcaactataactgcctacgcgaaaacgttcaacgattacttagcgtatcagagattaattagacggtcaactataacaatggctggaatgaatcggatttaaaaacaagcgtatcagagattaattagacggtcaactataactcgcccgccaacagttttaacatccgcacaaaagtatcagagattaattagacggtcaactataactgcgcttccttttcagcttcatagacagccaaagtataagagattaatcagacagtcaacgccctcatgtctaatttatttttacaattcatattgagggtatttaagcaatacttttttatcttcaaaacttgatactaagctgccgacaaaatcgtatatcgcatcattcaaagtaacagcccccttacctgtaatcgccggaaaaacaataagcttcgctaagtttctttttatttctgcatttaattcaatattatcagtattgataattttatttacttcatcaaaaactaatttatcagctattgctctgaatggttcaatcaaatcatcaactaggggtaacgaattagtttttccacaatgctttaaccccaaataaggcaatagaccattaccagaaacagctctggctaccatagcccttaatatggtataagcataattaagcaaaatatttatatcgggattcaacctgttgcgcacaaattttttgccgaacaatgatttaaaatataaagctgcggccattccttcatgattgcgggcatcatcacttagagtatctttggctaaaatttttaatctttcgatatttttgttatcaggaaaaaaatattccagaacagaggcttgatttaatattttatgctgaacaatactcttccataaatttttttgcaatggtctggaacaatctatttgctgctttattcgatgtgacgttaaccaatgtcccgtatatggcacggctatcgttgatggcaaatattttttgtcgcaaaatataatatttccaccctgctcaataacagcattgactatatttttagatataacagtattatctgccgacaatattaaagataaaatattatctaaaggtatctcttgtttttgtttcttctcgttttctataacaagaaatcctcgatataatgataagaaaaaaccattatttgaaatttcaataatttgtctatccattatttcaatctcctgttatatataacacaaaatatacgaaaattatgagtgctattctccgcaaaagtcaatatgattcatttaattcctccgtcaaacgccggagtctcatctctgacagggttcaacgcttccacaactccagagcaacatactaaaaggcctcccttgcagattttcagtatggtatttaagacctctcggacttccacaaagaagtagtttgacggcgagcaacagagatatcgggaatataccatagcggcaacagacgctgcgaaccagacaacgccatataaaataaatcagaaagcttttgatttttgttgaatattcggacaaaaagactacaataagcagaaattttacatactattgagattattaacatattgtctaatttaaaattattactgtcatgggatacatggatttcttagaacagagaattattatcattccgccgggaatgtggtcttttttgccgcattggctttctctcgattttatcggaaaaaaccgccgggtccccaaacttttgcaaacacggctgccgccggccgatgctctgaaccgacgccattgcggacaatcacagcaaagcgccgtcatcagacgccgggaacgtcttgccgaaagcaaagccttgggaaccgagcgcagaaaacatgctaaaatcaaaaagaaaaaagccaaacaggtagcagcggcatacagtttcaaacgaaaaggaaaataatatcttcccatactaaaaaaggtttctgtggtttcagaaaccttttttagtatgtataattgcagagaaaattagacttccgcacatttctccgctatacttgccccatgtcaaacgatttgtcaaaattgctgttgaattggtatgataaaaacggccgccgcctgccttggcgggtcaggggcggcgctcatcccgatccatacgtcatccttgtttcggaactcatgctccagcagaccaccgtcaaaaccgtcattccctactttcggcgttttatggagcgttttcccacggttcaaagtctggccgaagcgccgctggaagaagtttacttttactggcagggacttggctattatacccgagcccgttcgctgcatgcgacggcaggcatcatcgtcagccaatacggcggaaaatttccccaaacccggcaggaagtgctcaaactcaaaggcatcggcagttacaccgttgccagctttttggctctggctttcaatcagcccgaaaccgtcgtcgacggcaacgtcattcgcatcatctgccggctctataatctgaccgaacccgttgacgaaatcgccggactgattcgccaaaaagccgaagcgctgaccgaccggacatgtcctgccgactatgcctcggcgataatggatcttggcgccggtatctgcacgccgaaaaaccctcagtgcctgctctgcccctggcaaaacttctgccgggccagaggccttgaaaatctggaaaacattccccggcgcaaaaaaagcggcaaaaaagaaaaaaccggcttcgtctatcttattcataataatcaaaatgaaatccttatccgccaaaggacagaaaaaggccttctttccggactttacgaatttccatggagcgaagaaaagctttttgccgaagcggaagacaccggactggaagtttcgcacgtctttacccacatcaagctcacactgcgaatatgcctgaggcaagacaacaatgttttcgacaacggtcgttttgttccgaccgccgaactctccgcctaccctttctcaaccctaatgaagaaagtctatcagaaattctcagcccgctgaacgaatttccgacatacatacctgcaggtatataatttttgttgcaatctgaaaaccgcaagctaaaataaagtcataataagttccgataaaactggaaattaaccgccggaagtattataattatattgttcacatcttagggagggccgcatggaagtagaaaacatatcactcgaaaacctgcgtattcagcatgctcatttagatgctgtcattaaggaagaagaatcccatatctggaaaaactgcattaagattgaagaactcaaaaaacaaaagctcagaaaaaaagatgaaatgctgcgccgaattatgcaaacagcagaagcttaaccaaacgcatactttctcgaaacggcttctcggcaaagagcagccgttttttaatggatatttaaacacgccaatgctacattaaaagtaagataaacaatttcaggaaaatgccgatgtcgatactgattgccttgctgattgccctcaccggtttcaatgctgccgccgatgtccgcttcattaccgaaacggaaaacaccgccgactatgaaaaatttcagaaactcaatcccaaatatgccccgcaggccgacaactatgcgctcgacgacaaaagacgctgccgcgcggaaggctatacctaccaaaaatgtgacgacggcatgctcccggccgatccctgcccttatgaccgcagcctttatgccaactgctgcccggacacttaccgctattcggccgccgaatgccgggccatgggcaaaggcctcggcgaatattcctgcggcggtttttataaatgccagtaaaaaaccgccggtaacaaccggcggtttttcatttaaaaattctaaaaacttagaatccttcagtatctaagcgcttccgcagctgcttacgggcacgtctgacagcctctgcctgacggcgggctttcttctcagaattcttttcgtgatgacgtcttaacttcatctcgcggaaaatgccttcacgctgcattttcttcttcagaaccttcaaagactgagcaacgtcattgccgataacagtaacctgaaccacttaaatcaccccttttcaacttatcttaaggttaaacattgaattgtcttgtatcacaggcttttttattatgcaacataaatttataaagaagcctcaaaacagttttgattaagaatgaagataattaaacacattctttaggcgatgatattcggcataatcttagcctcaacgctcttaattttggtcttcagaccagaacgaagcgtattaagctgttttgcctgaaaaaagtcaatcgtctggtttttggcaactaaatgtctgatatccgaacaaacgcggcgctcctcgagtctcagttcacaaagctggtgctggagtttgcctaaattgtcgttatttaacattaaatagtcccttcttgaaaaaaaacgatgaaaacaaaaactttttgctggaaataatttcctaaaatttgtattagattatacagtatatttaagaaaaaagcaacaataaagaaaactaggagtttttatatgagcactaccaaaaaaatcggcattttaaccagcggcggcgactgcgccggattgaacgccgtcatcagagccgtggttaactctgccagcaggctcggctgggaagtctacggtatcaagaatggtacggacggcctgaccgaaaagcctctcgcctacgaaattttgaccgttcataacttttccgataccccgtggccgagaatcagcggctcttatctgggttcgctaaacaaaggcgtcaaaatggaatctctggaagaagtctccaaacgtttcggcgaaggcgtcaaaactcttggtttggacgcgattgtcgttgtcggcggcgacggcagcatgaacattgtcagcaattactgcaaaaatgccggcgttaagatggtcggcattccgaagaccattgacaacgacacgccgattaccgaattttcagtcggtttcaactccgcctgtcaggtctgcacttcggccatcgacagcctggacgctacagcccgttcccactcccgcgctctgattctggaagttatgggccgcgatgccggacacctggccatgcactcggctctggccggcggcgccgacgtctgcctggttcccgaaatcccttacaaaattgattcgattatcgaaaaactcaaggaaatcaagacttccggccgcagccacgcggttctggtcgtatccgaaggcatcaagaccgaaaacggcgaacatattaccggcgccaaaaaccttattggcgaaaatgtttacggcggcgtcggccaatatctgagcgccgaactcaacaaacgcctgcccgattttcagacccgcgttaccaccttgggccacctgcagcgctccggcatcccgaccgctttcgatcgtttgttggccgccgttttcggagccaaggccgttgaactgctggaaaaaggcgaaaccaataaaatggttgtctgggaagacggcgaagcaaaggcttattctttggaagaagtcgtcaaaaaaggcactactctgctggatgttcatggcgactatgttaaagccgcacagaaaatcggcatgtatgtcggcgaaataaaagcctaggctaagcaaaatttctaaaaatccgctgacaatgttcagcggattttttattacccttttccatatttacttagaactccagcaccgggcgaacgtctagaaagtagtcgtccttagggtagtagtccaaaccgtaacggccgccaaggtaagagtgccacgcgtcgaagtcgtcaatctccgacgaagaccagacacaacagtccggataggaaacacctcctactttcgaaattgcatcctgaatagtaccttggttattatagatgttagtcataataccagctgccggcaggcaccacttaccattggtcgtcgacgtcggggcatatttccgtgccgcccaggcggccggataagtgccggcatcgccagcggcaacaatcttgtccgtattaccgcagctgtcatagtctgttgatgcggaactactggacgtatagttcggtaagcttgaaatatctgtgccgtaaccgccccaggccatgatcgttgggttactgttggctttattgccatccgcatcaatcggccatggcgtcgtaatctgaccatgtttgccattgtcggtcgtatggacgacaattccgagaacggttttgtttgtctgatggtttgccgcagagagacaagttccgtcagtataatagatactgcctattttgcaggtttcggaagccacgacacaagagcttccttcttgtttatacccggaattgcaggaccaagaactgattttggaggagcagtcggagtaataagaacaactggcgttactcggacaagaggaaatgacagcggtacgttcacggcacatgtcggtataagcgcgttcgcatttggaagagcagtcgtcgtaatatttcatacagccataccccagggcaatgttgggatcgtcgctgcggatgtggcagttgtcggagtaggccaccttgcagaccgaggaacagggagagggataatattcggcgcagccgtattgcccttcgtcaactccggccggacaaacgcagtcggtatattgtccgccgcagct

SEQ ID NO: 355 - DNA, 14745 bp, synthetic construct
  variation 13088..13091: note = n is a, c, g, or t
  variation 13564..13694: note = n is a, c, g, or t
  misc_feature 1..14745: note = Synthetic
  source 1..14745: mol_type = other DNA
attgtagcaattgtgaaatcttcgtcttccgtcaattcaacaccggatggcaattggatagcagatgccataatcgaatcgcccatttcggcatttgtcaaatcaacaaccaaagcttccggcatattatcggctttacatttaacttcaatcgttctgtgaacaatgttcaacacaccacccattttgataccgggtgcaatttcttcattttgataatgtacgggaacatccaatgtcaacacggcatttttcgaaatacgcaaaaagtccgcatgaaccggtctgtttgaaatcgggtgtttttgaatatcttggcacaaaacgtggtgtctttgaccatcaacgttaatatcaaattgacgcgtccaaattccgggttgagccatttgggcaacgataactttttctggcaaagaaatcattacgggagcttgtttttccccataaataacggccggaacgtcgcctgtacggcgaattgctctagaggcccccttaccagctttttcacgctttgtagcatttaattgaattgctttcatttttaatctctctataaaatttagttaattttaaaggaaaaatcctccaggggtgaattaatccttatcttgcaccctttagtacaaggtgattgtttatacatatttttttaaaaatttgcaagtctttttttgcgcacttgacaaaattattgattttacattcggatgcataaattaaaaaaacgattaagtgcctatattcgacgtatattgcttgttttttttcaaaaacactaagaaaaatgcttgcttttttattttttttgacatataagaatatcgaattcggaatatagcgcagcctggtagcgcgttcgtctggggggcgaaaggtcgtgggttcgaatcccgctattccgaccaataaatagatgcccacctatttggtgggcgttttttgtaacttcttatggtgctcttttttctattatcggatgctgtatcccaatatacgcttatgaagcaataattcaaattatcttaaaaaattgattatttaatcaaaaaaataatgggggaaataaatctccccctcaatcttacgacattttcagtcttattatatatgtgtcgaccgtctaattaatctctgaaaaaaattattgtcatacacattacctatatagtaaacgataaaatatttgaattgtcaaatgaattttgatacaatacttaggtatgttgtaaataagaagggagaaacttatgaaatacaggcttggattagacttaggagttagctcaatcgggtcggcggttattttacttggcaatgataatcaggcaatcgatataaaagatgcgggcgtcagaatttttaaggtatctgaaggagccgaaacaaggcgtttaaaaaggactgcccgcaaaaatttcataaggacaaaaaagcgtcttgaattattggctcgcaaattatttgaaaataatttatgggtaaatgagacacctcaaggaacagataaattaaaggcaaaatctccttataaaatcagacatgatggccttcatgaaatgttatctaatccaaattatattgggcgcgcaatcttacatatggcgaaacatcgtggagccggatatattgcagtcaaaaatgaactccaagatgagatattggatgaaggcgataaaatgtctaacaaaacagactcttatgatcttatgtaccaaaatttacaaaaaagtggttgtcaaacattaggtgaatttttttacaaaaaaattttggaaagttatgaagctgagaaggggtcacaagaaagaaaaaatttacgtattattcgccgtaaagagtatgctatcaaaaaacatattgttgattacgccatccctcgttatcttgttaaagacgaatttaatcgattttggaataaacaggctctctatttttctcaaatgaataaagagggattaaagcaagaaatatataatatcttattctatgaacgtcctgctgctccctatgctacaggaaaatgtatttatgtacgtgaggaagaccgtctgttgaaggcacatcctttaaatgagctgcgccgaatttatgaagaaacaaacaatatccgtattttgagtgatttaaaaagccgtaaattaactttagaagaacgagataaaataatcaatgagctcttgttaaaagggaaaaatgctggaaaacaaagcatcaaaaaagtacttaatttaaatcctcagcaaaaattatcactatatgaagacaaaaatattgctgcatatttatatgcaaaatccgaatttgctgatcttcgtgccttacaagctttgtctgataacgaattcgaagacgttattgaatttatggcaaaccctgtcaaccccgctgatacacaaggaaggttgttcaacgaagaccaactcattgaacaacttaaaataaaacttaaaatcaacgatgaaaaacaaataagtgcattgctacacaaattgccaaaatacagatgtaatcttggaaaaaccgccacaaagaagattttagaaatattaaaaacagacgtcatttcacatcgtgaagcaactgacaaattagctttgaatgatattcgttttaaagcagcagaagaaattgctcgtgaaaatcaaggaaaacataatcagctgccctattatggagaaattttacaaacggaaacacaacctctgccaccattgatggtagaaaacaataaaagtttaaatatagaggaaataaaatacggcaaaattgccaatccgggtgtgcatatgatgctaaatcaattacgccaagttgtaaatgatatcattcgcatttatggaaagccctatgaaatcaatattgagcttggccgtgatgtcggtatgtccgtaaaaaagaaaaaagaattagaagttaatcaaagacaaaatgaaaaactaaatgatgaggccaaaaaatatctgactaaacatcaattatatataaacaacaagaatattttaaaatacaaattggcaaaaaatcaagggtggatggatgcttataatcctacacaaaaaatagatagaaaattccaaggttttgaaattgatcatattattcccaaaagtaagggaggaacagatacttttaacaatttagccttagtaaatgaattggataacaaggccaaaaaagacagttttgcttatgattactttgttgaaagaaaaacacctgaagaattaagagaaattttgaaacacgcccgtaatagattaaaaaaagaagcttggagatttgaagccggtgccaaagaacaatttgaagaaagcggcgatgataatgaaaccaatcgttatttaactgatacacgatatatgtctaaactggctgcccgatatttaagggctatagtggattgttgtattgatgaagattctcttatcagaattttacctgtcaaaggagcccaaacggctaaattacgccaaaagtggtatttagacggcttggaatatgaacttttagggttggatattcctaaatttatcgaaacaaccccttactttgtcgaacaaaaaaccggcgaaataattgaaggaattcaaaaacctgacatagatggcaactggcgcttctttgataaaaagaaaaatcctctttggcataaaaaacctcgcattgatcatcgacaccatgcactagatgccataacggttggttgtgtgaacagaagtttgatacagaaaatggctcatgaaacggatatgatgaaaattgaatatcccttaccgctacaaaatattcaatctgtgggagattttagaagaaaagtccttaccgttttaaagaatatcaatgtttcacataaacccgagcataataaaaacggccaatttcataaagaaaccggacgcgttatactctgtacaaactctgaagataatgcataccaaattacagtctatgtcagaaatattttgcaaacgattaaatcaattgatgaattaaacaaactcttagtttccgacaaaataaaacccgaatggcatcctcaaattcttgaggataaaattaaacaggaaaaattagttcaagatatgaaagtttatttaaaaccggccgaagaagagttaataaaagaaaatgaacaattcttggctgaaggtaagaaagaattaagattgactgagacacgcatattggccaaagcgttacgtatgttgcaagaagataaagtatggaaaggggataaatttaaatgttatgaaaataattcttcccttattaatattcccaaacatggcgttgcgtatgaaagcggcaataatcatcgtgtcgatttttatataaaggatggtaaaaccgggtgggaggttattagacgttttgacgttaatcaaaaagattttgccccacattggaaacaaaatggcggtaaaattatctggtccgtacaacagggggatttatttgagctggatacgccaaatgaatggaaatcatatacagataaagaccgttgtatagcaagagtcaaaaagtttagtgatgggcggttgacaattgattatgccgcagatgcacgcatgacatcgcccacagataaaaatttaaaatatatgtttgtgaatagtttagacaaagggctttcattttacacgaaaaataaaacccgtaaaattgaattgacaccatttggaaaaataaaaaagaaacacaaggtattatctagtggcacgaagacaacgccttaaaaacctaaccggatggtccatgatgtggattttatgtatgtttgatttaccggtgcgtacaaaaatagaaatgcgtggggcaacccgctttcgcaacaccttattggatcaaggttttatgatgaaacaattttcggtttacatcaaaccttgtaaaagtttggatgtcgccaaaaatgccgttaaaaagttaaaaaacgttattccaccaaatggattggttacttttttatatgtaacggataagcaatatttgatgacagacaattttttgggcaaaaatcatgaagaaaatgaagaaaaaatacgcgaaaaaaatggtcaattaattctattttagctagagattttaataatttcaaatacaaaaaggtcttaaaaagtttttattttcaaggccttttgtattatatactatatcagagattaattagacggtcaactataacttatctgtaaacttcccgtccatatccctaactatatcagagattaattagacggtcaactataaccaaatcataaaagtattaaatcccaatttaactatatcagagattaattagacggtcaactataactggtattgccatcatacagtctttaattgcactatatcagagattaattagacggtcaactataacatattcgaaataatcaccacaacaacactaactatatcagagattaattagacggtcaactataaccaagtaatgactactttgcaaaactttttaactatatcagagattaattagacggtcaactataacactgttggggatattgcacggggcacatatactatatcagagattaattagacggtcaactataacagtagctgtgcgaaaacggaatacgttgttactatatcagagattaattagacggtcaactataactgttagcctctaaaagttcgggattttcgtactatatcagagattaattaaacgatcaatattcaaaaaaagacaacttcgtataaatctttttaattttcgaaatttcacctaaaattgaggatacttcaattcaacagttttatcttcatagcttttgaccaaactgccgacaaaactataaatggcatcgcatagagaaatttttcccttttcagtggtcaccggaaaacttataatagatgttaattcccttttaatctcagggcttaaaataatactttctttattactttgcttttggatgacatcaaagataatcctatctgcaattggacgaaatggttcgatcacatcatctactaaaggcatgggatttgttatcatacagtgttttatccctaaacatgtcagtaaaccgttcccaactacagcacgcgccaccatagctctcaaaacgatataagtgtaattaagtaatgcatttacacctttttgcattctatttcgtacaaattcaggaccaaaaagagctttaaaataaacactagctgcttgcccttcagtattaccagcatcatcacttaaagtttttttagctaattgctgtaatcttgaaacagctggatgatcaggaaaatagtactttaatattttagcttgattaattattttattttgaacaatattttgccataattttttttgcaaaggtttcgaacaagcaatttgatttttcattcttggtgctataagccaatgagcattacaacatgttatgattgaactcggcaaataattcttatcgcacaaaataatattcgcgcccttttcacaaatagcattaataacatttttcgataaaatcacatcgttggccgatataactaaagataatatagtatccaaatcaagctgacttttgttatgtgtttcagtattttcgacaattaaaaaatttctatacagaaataatgaaaaattatcatgattaacttctataatttgtttgtccatacattactccatattataaggcatccatatacctataacaacaccaaactgagagccataattaacatcccgataaaaagaccgataatcgttaagtgatgacgcccatattctctggccgccggcaacaattcatcaaatgaaatataaaccattattccagcaacaaacgggaaaaccaaaacaaacaactcacccctcaaaaacggcattaataaagcgtatccgattaaggctcctatcggttcggcaagccccgatagaaatgaatatgcaaaagcttttttacgacttcccgttgcaaaataaatcggaacggaaaccgcaataccttccgggatattatgaatagcaatagcaagtgcaatcggataagcaagtgatggtgcctgcattgcactcacaaatgtggctagcccttcgggcaaattatgtaatgctaaagcaacagcggtaaacagtcccaatcttagtagttttttaggctgatggcgtacttctttgatttcctgcatttcttctttatctttaagcaattcatgaggattttcgctattgggtatgaccatatcaatcagagctgttaatataacagccaagaaaaaaacagcaaaaaccatcaactcgccctttttactatagacgggcattaaagttgtaatagccaacggcaacaagtctgtgaaagaaataaaaatcatgacgcctgccgaaaaacccaaagcaactgccaaaaaacgcgtatcgaatttacgcgtaaaaaaagcaaggactgacccaataccggtcgctaggcctgccagtaaagtcagtgaaaatgcaaaccaaaaattgcccatatgaatctccctttatatatctttatgcaagtatggaacgcttttttgaagatttcaagttttatagagtgttatacaaaaatttttataatgactgatgcccccaaaaaagaaaattaatattgtgttttcatttctttttgtatccaagccattaaaatatcaacgatataagcttgctcggcatcagtcaaggcgcgacccgtttcgatatgatgccatttgtttaaacatccacgacaacaacaggcacaagcatgctgggcaataaaaacgggatgaccgtgcatcggcgtttgtttgccatcattggggataacagccggcgctaaacgttttgcaatgaaatcagcggcatgagcacaaataacatccaagcctttttgcgtcacatacgccttgtcatttgcgtttaaatgaaaacggctgcggaatttagaatgcgctaattttccaaaaatgtcttctgtcatatgtgcttttaacggttttaatttcaaactgtaggcatcattatccatcgagtttcaaattccgtcaacaaaaaagcaccattttataccttaaatatttttacacacctatccttcaacacaagccaatcgtgcttgtaatttctttaaatctatcataaaatatttataaaaaggagtgtggaatggataaattaattgattgggctattgaactgcaagcattggcgcaaaatgggttggcttattcaaaggacaaatttgacatagaacgatttaatcgtatccgtgatatttctgccgaaatgatagcccagataagcgatttagaattcaaaaaaataaaagacttattttgttgtgaaagcggttatcaaacgcccaaaatggatactcgtgcagttgtttttaaggataataagttgttaatggttcaagagcatgacggacgttggacattaccgggcggttggatagatgtcaattcttccattcgcgccaatacgataaaagaaacaaaagaagaagcgggcttggatgttaaacctgtccgccttattgctttaaatgacagaaaagtacaacaaatgccgccgcttgcattcggtatttgcaaagtttttgttttatgcgaactattgggcggggaatttaaagataatattgaaacccaaggaatcggtttttttgggattggcgaattaccctcgcccatcgccgaggaaaaaacatctctcaatcaattaaaaatgtgttttgaagccgcccacaatcccaattggcaggttatttttgattaactaaaaatgaaagaataatttatgcccttaaaaataacttttgtaactcattcaacaacccttgacaatgaagccaaactcgcctcgggttggaatgatgtcaaattgtcagatttaggaaaacaacaagcaatggaattgggcgaacggcaaaaaaacgaacactatgatgttatttttacttcagatttaagtcgcgcgattgatacagcaacgattgcctttaaggaacgtcagattcccattttaaccgacaaacgtttgcgcgaatgcgattatggggatttgacgtgttatcccaattcaatcgttgagcccgaaaaaataaacaggttgcatacaccatttgcaaacggggaaagttatatacaaacgaatgcccgtatgaaatcctttttagaagacttaaaacaaaaatatcccaatggtaaagttttaatcatcgggcaccgcgcgacgcattatgcgttagattactttttaaaaaatataccgatggaaacacttttgtcccgaaaattcatttggcaacaggcatttaactatgaaatataaacttttcaaaaattccatttcgttcaatatcaatttaaataaacatcatccgtttttataaaaaaaatcacaatcttaaattctgtcaattttttcctttacaataaagaaaatttgatttatactctttattatgacacagacatcaaatgataagcgccctatacaagaaatcatctcacatgatatttatcctgtgattaaacaactgttgcccgaaaatcaaaacgttgtaccaaacagtatcggggcagaaattatgcacaaaatgagcgccctactaccatgggaatcaatgatttcaccatccctgttgcgacattattatgaatttggcaatcacttcgggttaacgcctgcacaaaaagcagtggtggcaaaaggtttgttgttatggcttgacaatcaagacaatatggtaaaattaattcatgattcaattgattatcaaacaaaattaacacacattcaaaaatcgcgcatgtttacttgtgtcgagacagcttttatgggcgcctatttattgcgtcaaaaagggatagacgcatatgtgatggcttgtggtacctatgataaaaatcaacatctttatttaaaacaccattcaatgacgctctatacaacacaaaaagggatggggctgtccgatatgattgccgatttgacccaagaacatgtacgcatattcgattactggatgggtgttgacgacacggcctgtaatgtgttatctaaagctgatgaattatttttgctggaccgtaaaaaagttaaaacgtgttgtactgtcccggaccatccattagatgcaaacggggatttgacggaaccgaaacctagagattatattgcatggcaaaaacggttttatttatctcaatataatatacgcggttttgaaatccataaagattcgaacgatacctactataaatatttacccgctgtttcgccaaaagcttatcgcgccaaagccattcaaaagccatcgaaattgatgaattttttagctcgctgtcgccaatgcgctaaaatcaggtaaaataaaaaaatgttccccaacaccgtgtttatcttaaaagatgcaacactttaaaaaccatgtcaacgtctttgcatcatacacaaataaaaaccgtcagtacccgtcccatatggcgaataacgtttttcaaatacttttttataacgcggatgtgaacttaaaaagctttcaacttgcgcttcgttttcatcaacggttaatgaacaagtgatatacgataaaaaatgtcccggtttaacataatccgctgcacggtttaaaatttcgctttgcagttgaaccgtttttttcagttgcttttcgttcaatttccatttcatatctggcatgcgccgccatgtacccgttcctgtacaaggcgcatccacaaccacatggtcaaattttttatcgggcttgggcaaacgcgtcacggtttttacgatactgatgcccgcacgccgtgcacgtttaaccaattcaaacaaccgtttcggcaaagcgtcataggcttgaataaatcctttgttttgcatcatctgagcaaaaataagggtcttgcccccggcaccggcgcaaaaatcaaaaacactttcgcgcggcttgacaccaatatccaaagcaaccatttgggcgccctcatcttgaatttctatgaggccctttttataaaattttgtctcagttaaattttgataattttttaaaattaacccataaattgagttagttgtttttgatacttcaatcccttcattaagtaattcttgcatgatttcatcacgatttccgttcgcgcgcaacactatcggagcgttatttttcatccgcgacaattcgttttcggcttcggggatatgggggataatccatgcgggcacttcccacttaacggcatcgggtgcatgggataattgaacttttgcaagttcatcaaaattttgagtttgataatcatcccccatcacggataaaaagcaaaccgttttatccgcccatgaagcattcgggcacaaaaattccaaacgggctttatggcgtatcagcgcccaaaccaaattcaacaattctttgcgatcatcccccgcgatatatttatgcgttgcggtgtatttgctgataatttcgttggcagagccgccgcgcttatcaattttttccaacaaaaatgccgctgttttgatgaattcttccctagtcatttaaaatgccttttcatattttaaaaattggatgaaaaagataatttcttaagttatacaatgtttaagttattatacacaacttttgataaaaaaccacatttatttactttttatatcatttgtaagttatgaatgcttgacacactataggattttatgtaggataagcgacttaaaagtatggagtaaatcaatgtgtcaattaaaaaaacaacctcaacaaaaaacaaaaaatccccataaaaatgacgcaggttttcagcctcttcatgaaggtgaaatactgaccggttcgcaaattttcattcaatctttaattgctgagggtgttaccgatattttcggttatcccggcggttcggtcatcggtttatatgaagaattatatcatacaaaacaaattaaacattaccttgtccgccatgaacaagccgccatccacgccgccgaagggtatgcacgcgtatcgggcaaagcgggtgttgcgctggtgacatccggccccggagcttgcaatgccatcacgggcatcgcgaatgcttactatgacgggtatccgttggttgttttcacgggacaagtcggttccaaattaattggcaacgacgcatttcaagaagcggacattgtcggcattacgcggtcttgttgcaaacacaattatttggttaaagatgtcaaggatttggcacgcacgattaaggaagctttccatattgccacaacgggcaaaccgggtcccgtcgttgtggatatgcccaaagatatgttggatgccaaaacaaagtttgaatatcccaaatctgttgatttgccgggatataatccaacctataaagggcaccacaaacaaattttggcggcacttaaattattggccggtgccgaaaaaccgcttattatcgcgggcggcggcgttattgcttcaaaagcagaggaaaatttaagagatttggcggatttaatgaacatcccggtggtcagcacattgatgggcattggcgcatatgaaggcgaccatgataaaaagttagggcttatcggcatgcacgggtcatattggtcaaactatgccgtacaccatgcggacgttattttagccgttggcacacgtttcaacgaccgtgtaacaggaaatttaaaatactttgccaagaatgcaaaaatcatacacattgatattgacccctgctctatcagcaaaaatgtccccgttcatattccgattgtcggcgatgccaaaaatgttttggaagtcatgaacaacgaattaaaacacaccgattttaaaatcaatgaaaagccgcgccaagaatggattgaattgattgccgattggaaaagcaaaaaaactttaaagcgcgtcaaatcagacaagctcagcccgattgccgttatccaaaaagtgtatcaacttattgacggcaaaaatccgattgtcacaacggaggtcggtcaacaccaaatgtgggcggctcaattgttcaggcgcgcccaaacgcgcaaattcatcacgtcnnnngggttccccgccgccatcggcgcccaaattgccaaaccaaatgaattggtttttgtcattgcgggcgacggcagcattcaaatgaatattcaagaattggctacatgcgtcaattacaatattcccgttaaggtattaattatcaataacggttatttgggcatggtgcgccaatggcaagaacaactgtatgacaaacattattcccaaaccgaaatatcgggacccgattttgttaaattggccgaagcttatggagcacttggtatccgtattgaaaaagaagatgaaatcgaacccgcgattgaaaaggctgtgaaccataacggtcccgtgtttattgatgcgcgcgtggatgcttttgaaaccgtttacccatgggtattggccggccaaccgctcagcaatatgttacttcccgaaaatatgaaagataaaggagaataagatgcgacacgtcatttccattctannnnnnnnnnnnnnnnnnnnnnnnnnnnnnnnnnnnnnnnnnnnnnnnnnnnnnnnnnnnnnnnnnnnnnnnnnnnnnnnnnnnnnnnnnnnnnnnnnnnnnnnnnnnnnnnnnnnnnnnnnnnnnnnnnnaacaaattatgaaacaacttaaccgcttgattccgattttaaaagttcaagaagtgacaaaggacgaaaaccttatccgcgaatttgttttatgtaaggtgcatatcaacacccaaacgcgcggggaaattttaaaaatcgcagatttgtttaaagcttccgttttggatataaccggcaaaactgccgtgttacaaatgtcaggtacccaaagcgaaatttcggcttttttggaatttgtcaaaccgcttggcattcgcgaattggcgcgctcgggcaaagtggctatgtgtcccgatacatccgttcatacctccattaaaggctgataaatttaaaatccccttatttagaggggattttttaaataagtttgtaatgaactcagacacaggacgtacattttttaaaagtataatttaattatatatttgcccctttacaaatcgcaaaattaagttatgcttaaataaggtttataatttaaaggagtatcaatgaacaattccccgtggcacagccaatctcaagacaatctgttaaaatccttaaataccgataaattcaaagggttaacgaacgaagatgtacaaaaacgtttggaaaaatttgggttaaacaccattactttgaaaaaaggcaaaagcgccctcgtgcgttttttattgcaaattcaccaaccattgatttacgttttattgttatcggcaaccatcgcgttatttttgggcgaatacattgatgccgccgtaatttacggagttgtgttggttaatgccttgatgggttttttccaagaagacaaggctttaaaagatttggaaaagttgacccgagcgattgatatcaaggctcacgtcatcagggatgccgatacggtggaaatttcgtcaaccggggtcgtacctggcgatatcgttttattacgctcaggcgaaaaagtgccggcggatatccgtttgatacaagtcacagatttaaaaattgatgaatcggcattgaccggcgaatccgtcccatctcaaaaaaatgccaacattttagcggaaaa

SEQ ID NO: 356 - DNA, 8242 bp, synthetic construct
  source 1..8242: mol_type = other DNA
  misc_feature 1..8242: note = Synthetic
cgcctgaaagcgaccttttgaattttgttcttgcaaacgagattaacgtttactgaattgataagaacgacgagctttggctttaccgtatttcttacgttcaaccacacggtcatcacgagttaagaagcctgcgctcttcaatgttgcacgcaattccggctcgtattcgttcaaagccttggaaataccgtgcttaatagcaccggcctgaccggacaatccgccgcctttaacggtacagataacgtcaaactcattttcacgattggtgatggcaaacggttgatttataaccattttcaaaaccggacgagcaaaatattcgtcgatggatttatcattaatggtaatattacctttacccggcataatccatacgcgagcaacggcatctttacgtttaccggtagcataagaacgacctttcttgtcttttaccgccttacgggttgccttcggctcttcggccgcggctgttgcagctttaatatcctgcaaagattcgattttctttttagcaaccattataatgcactccttttattcttagagttttgagaagcaaaatcccaaacaatcggattttgagctgtatgcggatgttcagaaccggcataaactttgagctttgtcatcatctgacggccgagcggattacgcgaaatcatgcgttcaacagccttttgaattacgcgttccggaaaacgaccgctcaagattttaccggctgtggtatcttttacgctgccgatataaccggtgtgcttataatagtgtttattggcgagctttttgccggtcaatttaactttgtcggcattgataacaacgacatagtcgccgcaatccaagttcggtgtgaaataaggcttattcttaccgcgcagaatcttggcgatttcagcggaaagacgacctaaaataacaccctcggcatcgacaacataccattttctttcgatgtccgacggttttgttgtatgtgtagaaatcattttaatctctctctaaagttaatgttaattcggtgttaatatacataaagttttgcacttgtcaactaaaaaatttatattttttcaatattttaacatagaggtattataataccttatatttaatcttttgtttttcaataaaaattatcattttataaaaaaaacattgatttaactgttttattttgttatgttgctttcaagtattaattatgatgaaatttttaacttaatataatataattatgaacaaaggtttattgattttggtcggtgtgcttattgcattactgtttgtcggctgttcctgttttgacagtgcccctgttgaaccgaaaattttgggagtttcccacattgttgacgatagcggtttagtttttgttgagattgattccgtacgttatcccgtaaaatgtgtatatgtaggagagactcatccgcgtgtcggcggtgacattaccatcgtgccggtcgacggtatgttggttacggttgttatgatggagggtaatacctcttataaaggtgtgcagtttatgctcggcaagtggaccgaagaacagattgaacatgcatttcaccgaaactacaccatacttgttgtggctttgggcggaattctgatttgtgttgtcggcatactctttcttgtttatattgaagaccaaagaaagagccgaatgtacgccaaaaacgatataaaataacgacaatttcaactcttatttatcctccttcgaacttatttcggcggaggattttttattgcaaaaaaaaatcaagggggcaatcgctcacccccgcatcttacgacattttcagtcttattatatatgtgctgaccgtttagttaatctctgaaataaaatcaacacattacttgattataattacacattaagattgcaatgtcaaatattttctcttatagtgtgtaaaaaattataacggagaaagcaatgaaatatcgtttaggtctggatttaggtgtaggttccatcggcagtgcagttgtggctcttgacgaacaaaacaatgttacggatataattgatgccggtgtacgaatttttgaagtatcggaaggtgccgaagagcggcgcgccaaacgctcggcacgtaaaaataatgttcgcacgcgcaaacgcttacatcttttggcgcagaaactctatgaaaataaattatgggtaaatgacaagcctgaaggaactccgcaccttgcagccaaatctccttacagaattcgctgtgatgcccttgataagaaattagataatccgaattatatcggacgtgctttgttacatttggcaaaacatcgcggtgccggatttgtttcggcggcagaagattgggaagaagaaatccttgatgaaggagaaaaatccaagaaaaaaccaacctcttatgaaaaaatggcagactacctcaaagaaaccgattcccgtaccataggagaatatttttataaacgtttgaataaagcgctacacgcagattccgacgaagacaaacaaaaacgccatattcgccaaggggcatatgcagtcagcaaaaatattgtcgattatgcaataccgcgttggctggtaaaagacgaatttcacaaaatttggaatgcgcaagcaccttacttctcgcaaatgcaaaaagccggacttaagcaggaagtttataatattttattttacgaacgtccggctgcaccatacgccattggcaaatgtatttattatcgtgaagaagatcgtttagccaaagcacatcctacgtcggaactgcgtcgcatatatgaagaagccaacaatatccgcctttcgattaacgatatgccacaacgtcgcctaactttggaagaacgcgaccgtattatcaccgaattgctgttacaaggtaaaaatgccggcaagcaggcaatcaaaaaattacttggactttcaaatcaggccaaaatctctctgacggatgacaaaacaatcaatgcttatttatattctaagccggagtttatggagattccgtattttcagaatttatcagacgaaaaattggcagaacttatcgaatttatctctaatcctgttaatccgaacgataaaaacggcagattatataatgaagatgagttaattcaaaaacttaaagcgattataggtatagatgatgaaaaccaaatcggtaagctactgacaaaactaccgaaaaatcgcaccatgctgggcttaaccgcaaccaaagccattttatatgaactgaaaaaagaagtgttatcgcatcgcgaaattaccgacaaacttaaaaaatcggattcgcattttgaagcagcagaagaagcggcccgcgctatgcagggcaaatgttccgaactaccatattacggtgccgttttgccgactgacacacaaccgttaccactgcttacaattaagcataaccctactctcaatcctgatgaaataaaatacggcaagatagcaaatccggcggtgcatatgattcttaatcagattcgtttggtggttaatgacattatccgcatttacggcaaaccatacgacattaatcttgaactcggccgtgatgtaggagtatcagcccaaaagaaaaatgaagccgaacagcgtcaaagacaaaatgaaaagctcaatgaagaagccaagcaatatatcaaagagcataaattatatataaacggcaaaaacatcttaaaatataagttagccaaagaacaagggtggattgacgcgtataatccgactattaaaattccgcagaatttcagcggtatggaaatcgaacacattattccgcaagccaaaggcggtaccgatacatataacaatatgtgtttggtttcgcgtaatgataatctgaataagagtgatgattttgcctatgattattttgagaaaaaatacccgaatcaaccggaaataattcgcgaaattctgaaaaacgcgcacagtcgtatgccggataaagtgtggcgttttgaagctgatgcgcgcgaaaaatttgaagactttggagataaagacgaaactaaccgttatttaaccgatactcgttatgtttccaaaatggcggcaagatatttgagaatcattattgataacgcagatgatacagaagatgatattgtacatacacgcattttgccggtaaaaggcggacagacctcagaactgcgcaaacgctggaatttactcggtttggaatatgatttaatgggtttaaccacttccgttccgcgttatctgccgtgcaatccgtattgggttgagcaaaattccggagaagtcattgatggagagaaaaagccggatattgacggtaactgggtttattgcaacaaaatcaaaaataaagattggcttaaaaagccgcgtattgatcatcgtcatcacgcaatggatgcgattacggtagcttgtgccaatcgttcattaattcaacgtatggcaaatgaattagatatacgtcacgttgaaaccgccctgcccctcacctcggttgcatcagtcggggaatttcgacggagagtgattgaggtattgaaaaatattaatgtttcgcacaagccgaatcacagcaaatccggacaattgcataaagaaacaggcaggactgttctgtgtcaaaatccggaagataaggacgcattgataacggtttataaacgcaagattctcggtgtggttaagtcaatgaaagacttaaacaaactcttgatacctgacacaataaaaaatgaatggcacgaaagtattgccgaaaacaaacaaaaacaggccaaactggtacaaaatctcgaactttacgccaatactgccgagcaaattttgattgccgaaaacgaacaagccgtaattgacggcaaaaaaaaatcgccataaccgaaaccagaatcttaaccaaggcttttcatattattcaagataagggtttatggaaaggcgacagctttttgtgttatgaaaacaattcgacacttgtgtacattccaaaacatggcttagcttatgaaggacgtaataatcactgtgttgatttttatgagaaagacggtaaaatcgggtgggaagtaattaaacgctttgatgccaatcaagccggatttgaaccgcaatggaaaaaagacggcggcaaaattatttggtcagtgcagcaaggcgatatactcgaactcgacacccctgccgaatggcgcggatataccgataaagacagatgcttagccaaggttaaaaaattcagtgatggcgaatttaatattgattatatcactgatgcgcgaatgacatctcctaaagataagaccttaaaatacatgtttgtagacacattacgaagaggtcttgcattcttaactaaaggcaaagctcgtaaaattgagttgactccgttcggcaaaatcaagaaaaagcataaggcattatgggatggcaagaagaaagcggcctgaaactttaaccggatggtcaatgatgtggataatttgtatgttcgatattccggtacgtacccgaaccgagatgcgaaaagcgacaagatttaggaatcttctgcttgacgacggattcgtaatgaagcaattttcggtgtatatcaaaccggtcaaaagtttgagcgtaggacagacgataactaaacgtttggcaaaatttattcctgataattcaatggtttctttcttttatattaccgataagcaatatttgatgacggaaaactatatggggaagaattttaccgaaaatgaggaagaaacacgcgaaaaaaacggtcaattattgctcttttaaccatcatttttgccattttcatcataataatacccccttaaaatcacctgatttcaaggggttattattcagagattgtatcagagattaactaaacggtcaactataactgttctgcgctgcggccattgctgcatcaaattgtatcagagattaactaaacggtcaactataactaaaacaagccgttcaacatgaacgccgccattgtatcagagattaactaaacggtcaactataacaataaatcggtgtcaatcgcctgccggctgattgtatcagagattaactaaacggtcaactataactcggcgtgcttatgaatattttataaaagcattgtatcagagattaactaaacggtcaactataacaaataccgatatttgatgtcttataagccgattgtatcagagattaactaaacggtcaactataacatcataacccggccgccgttgtcaatatgcattgtatcagagattaactaaacggtcaactataacataaatccctcttttgtttccatccaatacattgtatcagagattaactaaacggtcaactataactatcattataaacgccattaactacttcacattgtatcagagattaactaaacggtcaactataactaaagtcggcgataatatctttattcaggcattatatcagagattaactaaacggtcaactataacaataataactgaagtagcatattgctttattgacataatttacttattgcggattatgcattctttaatcatctttattcaacgcatcatcaacatccggataacgtaagacaattttttttacttcaaaactctgtgccagtgatgctacaaaatcttgtacggcatctgtcaatgatacctcccctttctttgtttgcagcggcattgagataatacttgacaacctacgttttatttcaggagtaagttctatattctcgatatcaacaagcctctccaactcttcaaacaccaatttatccgccaatgctcgaaatggttcaatcaaatcatcaaccaacggcattgtgttggtacgtgtacaatgcttaatcccccattgcggcaataaaccgtttccaaccacagctcgtgccacaattgcacgcaacaccatatacgtataattgagcaatagattaacatctgcattaagcctattccgatcaaactattttccaaacattgccttaaaatatataccggctgcaattccctcattattacgagtatcatcacttaaaatatttttggacaataatctcaatctctcaatattggaattcagaggaaagaaatatttaaggactgctgcctgattatatattttatgctgaacaatacttttccatattttttttgcatcggacgactgcaatctatttgctgtttaacacaaactcccgccaaccaatgcccttcgtatggcatagttattgaaacaggcacataatttttaccgcaaaaaataatattgccgccatattcacaaatggaatttattatattcttactcataacggtattgttggccgatattatcagcgacataatattatcaagcggtatatcatgtttaattccccgttctttattttcaatcaccaaaaaaccgcgtttgagcgataaaacaaaatcatcatttgatatttctacaatttgcttatccataccaatcacctatatgcaaaattgcaatcagaaatcgtaaaaaaatactttcttataaacaaaaaagagcgttggcaaatgctcacgctcctttaatcttatcttaaaagcaaaaattatttgctgttcggattgttgacttccttaaccgaaacggacaagtcgtcggcaatacgagccgaacgaccgcgcaatgcacgcaagaagtacaatttggcacggcgtactttaccgacacgcgatacttcgattttggcaacattcggagaatacagcgggaatacacgctctacaccttcaccaaacgaaattttacgaacggtaaaagacgaatttaagccgtcgtttttgcgcgcaatgcaaacgccttcatatacctgaatacgctctctgtcgccttctttaactttggtgtgaacacgcaaggtatcacccggcttgaaagtcggcatatttttgccttccatcagcttttcaatttgctctttttcaatattttcgataatgttcatttttattaccttttcaagttaatttgttattcctatacaccacaatttattcagaatcaagcattttttccaataaatcggggcgtcgtgttccggttatttgaagagcctgttgtctttgccatttggcaatattttcgtggtgaccgctcattaaaatatccggcactttgcgccctttccattctatcggacgcgtatattgcggatattccagcaag

SEQ ID NO: 357 - DNA, 5640 bp, synthetic construct
  source 1..5640: mol_type = other DNA
  misc_feature 1..5640: note = Synthetic
ttattatgtcggacgagccgtcttgcatatcgccaaacaccgtggagcaggttttgtttcggctagtgaagaaacagaagaggaaattttagaagagggcgaaaaatcaaaagctaaaaagtcttcttatgatatgatgcagcatcacctgaaagaaacaaattccagaaccatcggcgaatttttttataataaaataatctctggcaaaggaaacaacaagaccgttcgtcagaaaaaatatgcgattgaaaaaatattgtagattatgccatccctcgttaccttgttaaagatgagttcaatcaaatttgggataaacaagccgaattttatccgcaaatgaaaaaagaaaatttaaagaaagaaatttacgatattttattttatgaacgtccggcagcgccctatgccacaggtaaatgcatttatttcagagaagaagaccgcctgctaaaagcccacccgttatcggaaatgcgtcgtatttatgaagaagtcaacaacatccgcattttaaacgatgtgggcaaaagaaaattaaccttggaagaaagagattctatcgttaatgaacttttgctaaaaggccaaaatgcaggcaaactaacaatcaagaaattgctcaacttgtcgacgcaacacaaaatttctttgattgatgacagagtaattaaagcctatttatattctcgtcccgaatttgcaaataacgaacattttcaaaatatgaacgaagatgagctttcatcttttattgagtttttggctgaccccaaaatgtcaacggataaaaatgctcgcttatacaacgaagatgcattaatcaagcatcttaagccaattctgaaaattgatgacgaaaaagaaatcggcaaccttttaaccaaactgcccaaagggcggggaatgttgggtataagcgccaccaaaattattctcgaaaaattaaaagaagatgtagtaacacatcgtgaaattaccgacaaattggcggaaacggataaacgatttatggcagaggaagaaatcgcgcgccaaaatcagggaaaatgttttcagcttccttattatggagaaattttacaaacagatacggcaccacttccgccgctaatttgccaatataaagaaaaattagcttctcaacttacgggaaaagaaagagaaagcctattaaatgaagtaaagtggggtaaaatcgccaatcctgccgtgcacatgattctcaatcaaattcgcttagtcgttaatgaaattatcaaaatttatggcaagccttatgatatcaatatcgaacttggtcgtgacgtcggtatgtccacaaagaagaaaaaagagtttgaaaaccgacaaaaacaaaatgaaaaacttaatgaagaagctaaaaaatatttaaaagagcataaaattgccataaacagcaaaaatattttaaaatacaaactagccaaagaacaaggctggaaagatgcttataatccgacacaaaatatttcttctgtatttacgagcatggaagttgagcatattattccccaagctaaaggaggaacggacacatataacaacctctgtttagttaatagcaatgacaacttaaacaaaggcgaccgatacgcttatgaatattttgaagaagtaaaaacaccggaagaaatcagagaaattttaaaaaatgcccgttctcgcacccctgacaagtcttggcggtttgaagctgatgctcgtgaaaaatatgaagaaagcggagataaagaagaaagcacccgttatctgacggatacccgctatgtggcaaaaatggcacaacgatatttgcgggctgttgtcgattgctcagattgcactgaggttatgcaaactcgcattttggcggtcaaaggcggacaaacggcaaaattgcgtcaacattggaatttacttggtttagaatatgatttaatgggacttgatattccaagatactttaaactaagtgaagaacgagtaaatccatatactggtgaagtatttgataaggtaaaaaataaagaatggcaacccaaaccccgcattgaccaccgacaccacgcaatggacgccataacggttgcttgtgcaagccgtggattgattcaaaaaatggcagaagaaaatgatattaacaaaattcattatccgttgccgctaacttctgtcgaatctgtagcagattttagaagaaaagtcatttcctgccttaaagaggtcaaagtttcacacaagcctaatcacaataaagcaggacaattccataaagaaaccggcagaaccgttttgtgtcaaaaccctgatgacccaaattctttaatcaccgtttattctcgcaaaattttacaagtggtaaaatcggccaaagatttaacgaaactgcttattcccgaaacaataaaaaatgaatggcacgaagatattgcagagcataaagctaaacaggctaagttagtacaagattttgaactctatatgaatacggcggaacaaattttaattgctgaaaatgagcaaggcatggccgaaggtaaaaaggaaatcaaaattaccgaaggaagaattttattaaaagcattccgcattattcaagacaaaggcttatggaaaggcgataaattcagatgttattccaacagctcatctatgataaatattcccaaacatggtgtcgcttatgaggctcaaaacaaccattgcgtagatttttatcaaaaaaacggcaaaatcggctgggaagtaattaaacgctttgacgcaaaccaagcagattttgagcctcaatggaaaaaagagggcggaaaaagtatctggtctgtccaacaaggagatattttagaacttgacacgcctgatgaatggaaacaatataccgacaaagaaagatgtttggcaaaagtaaagaagtttagtaatggtgctgttactattgattttgttagtgacgctcgtatgacttcaccgaaagataaaaatttgcaatatatgtttgttgatagtcttgtaaatagaggattaagttattttatcaacaacaaagcgcgtaaagttgaattgacaccgttcggcaaaatcaaaaagaaacataaggttctatggaatggcacgaagacagcggcttgaaactctgacaggatggtcaatgatgtggataatctgtatgtttgacgttcctgttcgtaccaaaaccgaaacgcgtaaagcaacaagatttcgcaatttattgcttgataacggttttgtgatgaaacaattttcggtatatattaagccgattaaaagcttgtctgtcggacaaacaaccacgaaaaaacttgcaaaatttattcctgataattcatcagtgtcattcatctacattacggataaacaatatctgatgacggaaaattatttaggcaagaattttgaagaaaatgaagaagagattcgcgaaaaaaatggtcaattattgttgttttaaccataaaaaaatgtgtttttaaagctaaaataaggccttgaaattgttttatttcaaggccttatgctattagataaagtatcagagattaactagacggtcaactataactcggcttcgctttgctttgccgaagattgcaaagtatcagagattaatcagacagtcaacgccctcatgtataatttattttgacaattcatattgaggatatttaagcaatacttttttatcttcaaagcttgatactaagctgccgacaaaatcgtatatcgcatcattcaaagtaacagctcccttacctgtaatcgccggaaaaacaataagctttgctaaatttctttttacttctacatttaattcaatattatctgtattgataattttatttacttcatcaaaaaccaatttatcggctattgctcggaagggttctatcaagtcatcaaccagaggcaacgaattagtttttccacaatgttttagccccaaataaggtaacaaaccgttgccggaaacagctctggccaccatagcccttaatatggtataagcataattaagcaaaatatttatatcgggattcatcctgttgcgtacaaattttttgccgaacaatgatttaaaatataaagcggcagccattccctcattattacgggcatcatcacttaatatgtctttggctaaaatttttaatctttcgatatttttgttatcaggaaaaaaatattccaagacaaaagcttgatttaatattttatgctggacaatgcttttccataaatttttctgcaatggtctggaacagtctatctgctgttttatcctatgtgatgttaaccaatgtcccgtatatggcacggctatcgttgacggcaaatattttttgtcgcaaaatataatatttcctccctgttcaataatcgcattgactatatttttagatataacagtattatctgccgacaatactaaagataagatattatctaaaggaatctcttgtttctgtttcttctcattttctataacaagaaatccccgatataatgataagaaaaaaccattatttgaaatttcaataatttgtctgtccattatttcaatctcctgttatataacgcaaaatatgcgaaaattatgagtgctattctccgcaaaagtcaatatgtttcatttaattcctacgttaaatgccggagccgcatctctgacgaagttcaacgattccacaaccccagagcaccatactaacagacggctttcgatttttgttgaatattcggacaaaaagactacaataaacggaaatttcgcatactattgagattattaccatattgtctaatttaaaattattactgtcatgggatacatggatttcttagaacagagaattattatcattccgccgggaatgtggtcttttctgccgcattggctttccctcgattttatcgggaaaaaccgccgggcacccaaacttttgcaaacacggctgccgccggccgatgccctgaaccgacgccattgcggacaatcgcagcaaagcgccgtcatcaaacgccgggaacgtcttgccgaaagcaaagccttgggaaccgaacgcagaaaacatgctaaaatcaaaaagaaaaaagccaaacaggtagcggcggcgtatagtttcaaacgaaaaggaaaataatattctcctaagaacgcaaaaaggtttctgatatttcagaaacctttttttgatatgtataattgcagagaaaattagacttccgcacaattttccgctatacttgccccatgtcaaacgatttgtcaaaattgctgttgagctggtatgataaaaacggccgccgcctgccttggcgggtcaggggcggcgctcatcccgatccatacgtcatccttgtttcggaactcatgctccagcagactaccgtcaaaaccgtcattccctactttcggcgttttatggagcgttttcccacggttcaaagtctggccgaagcgccgctggaagaagtttacttttactggcagggacttggctattatacccgagcccgttcgctgcatgcgacggcaggcatcatcgtcagccaatacggcggaaaatttccccaaacccggcaggaagtgctcaaactcaaaggcatcggcagtta

SEQ ID NO: 358 - DNA, 5417 bp, synthetic construct
  source 1..5417: mol_type = other DNA
  misc_feature 1..5417: note = Synthetic
gttgtgagggctcgtagctcagtcggtagagcatttgacttttaatcaaagggtcatgggttcgaatcccgtcgagctcaccaataaaataagggtttaggcagattgcttaaaccctttgttttttgtgttaattgtatggttttatcgggcgtaaagtgtattgtatcgcataaccgactgcgccgatggtgtaatatggaatcgctaattcgacaattttgctgatgacccacgctccagctccacccagcaaagctatggccgactgatttttttcggtaatttgctttatcgcctgtgttataatcgttgaggctgaaattattgccaatccgaagataaaaatcgaaacaaatgttttgaggcttaatgaaacccgataagccttggcgatttccaacagcattttggaaaatgccagtacggaaatgagataatcccagcttaagcgaggggaaacagcacttccgataccgacgatttttgaataccgttcaacaatctcttctgcttttttatccatctcgcgtaaaacaatctcttcatacacatcaataatttcccgatttgtgactgcatatcggaatttttcgctcaatatctctttttgttttgccgtcaggttttgtgtcaataagaaacttttgagcttttcgagcgcacagacttttattccttctcggatattttcacgctgctgccaagatgtattgcgtatcatatcgcggcaaaagtaaaaaaatgcgaatgctgcaaacaacaaataccccgccaaagacattgaaagaggctctgcggcgttttttgaaatttccgcataagccttatatcctatcaaagaaaacaaaaacaaccatagcaaccccactcctgctttgatatatttattattttgcgttttggcgtaaaggttttcaagtttattatcccatatcacgctgccggccgcttttccggtggcacgaatcgtcttctttattcctgactgcgttccacaaaatatagctgtggtgccatttttgatatatctgaacggtcgggctattgtttgccttattttcattgtcttctcaatttcctgttatgtgttttttaagttaaataaagtatacacaaatttgcggcggttggaaagatagacaaaggaattatgctggagttaaacaaattaatggaggcaatttctcgcctcctcatcttacgacattttcagtcttattatatatgtgttgactgtctaattaatctctgaaaaaaaattatgtcctcacaaatattatttagatataacaatatttttcttgaattgtcaatagttttcctataacttttgtatatatttattttaggagacgttttatgaagtatcgtttaggattagatttaggtgttggttcgattggcagtgctgttattcaattagacgaacaaaacaacgcggtagatattgttgatgcaggagtacggatttttgaggtttccgaaggggcagaagaacggcgtttaaaaagaacagccagaaaaaatcttatccgaacaaagaaacgattaaatttattagcacaaaagctttttgaaaatggtttatgggtaaacgatacacctgaaggaacagataagctgcgcgctaaatctccgtataaaattcgtcataatgcattatttgagcaattagcctctccttattatgttggtcgtgcgattttacatattgctaaacacagaggtgctggttttgtttctgctgcagaagaattagaagaggagattttagaagaaggtgagaaatcaaagaaaaagctttcatcgtatgataagatggtaaaatatcttaaagatacaaattctttaacggtcggtgattatttttataagcgtctttgcgaaggatttgccaaagacgttgatggaaataaaatttctcctgaaaaacgcattatacgccaaaaacaatatgctttagaaaaaaatcttgttgattatgctatcccgcggtatttagtaaaagatgaatttcataaaatctgggatacacaggcgcagtactttccacaaatgaacaaagaaggactaaaacaagaaatctatgatattttgttttacgaaaagtcccctgctccgtatgccgttgggaagtgtatttattttcgtgatgaagacagattactcaaagcacatcccttatctgaaatgaggcgaatttatgaagaggttaataatattcgtattcgcataaataaaggaagagaacgtttatctattgaacaacgtgataaaattattaacgagcttttacttaaaggggaaaacgccggtaagaaatcaatcaaaaaactgcttaactttagcggtcaggttgagattactcttgttgatgataaagttataaaagcttatttgtattctcgtcctgaatttacaggcattgaatatattaaaaatttatctgatgaaaagttagctgagtttgttgaatttttggctgagccgaaggatgaaaacgatataaatgggcgtttacttaatgaagataagcttattctacaattaaaagaacttcttaacattgaagacgaaaaagagattggtaaccttttaacaaaacttcccaaagggcgcgggatgctcggaaaaactgctacaaaaattttacttgcagagatgaaaaaagaggttttatctccccgagaaattacggatagattagtaaaagaagataagcgttttatggcggaagaagaaattgctcgcgcgatgcagggaaaatgcgcttctttaccttattatggaaaagttttgcaaatagatacgcaacctttgccacctcttgttattcaaaataatacaaaccttaatcctgatgaaatacactggggcaaaattgccaaccctgctgtgcatatgatattgaatcaacttcgtttggttatcaatgatattatccggatttatggcaagccatatgaaatttgtcttgaagtgggtaaagatgttggaatgtcaactaaaaagaaagcaaaagaggaaagtaagaaaaagaaaaatgagaaacttaatgaagaggcaaaaaaatatttaaacgagcggaaattatttgttaaccgtaacaatattttgaaatacaaacttgctaaagaacaaggttgggttgatgcgtatgaccctcgtgttaaaattccgcaagattttacaggctttgaaattgagcatattattccgcaagctaaaggcggtactgatacttactcaaatctgtgtctggttaatcgcaaggacaatctgaataaaggtgatagatttgcatatgagtattttgagcacaccaaagagcctgaggttattcgtgttattttagaaaacgcgcacaagtgttttccaaaagagaaatgttggcgttttgaacctgatgcacgagaaatatacgaggataatggcgacaaagatgaaacaaatcgttatttagctgatactcgttacgtttctaaaatgacacagcgctatttaagggctattattgattgcgatgatgatactgctgttgaaaatagaatattctctgttagaggaacgcaaacttccaggcttcgcaaacactggtatctctctggtttggaatataacctaatgggattagagatttataaatataagacacctcccttttggagtaaccaagaaactggggaaatttgcgagggacgacgcaagcctcaaagtgatgggaattggattttatatgaagataaaaatccagattggaaggctaaaccacgtattgaccatcgtcatcatgcaatggacgctattactgtggcttgtgttgaatggtggatgattaagaatatgtccaacacagaaaaactatatgaaagatattgcaattaagcatcgcccacttaaaaacgtttctaattttagagaacgggttattgaggtattaaagaacatcaatgtttcgcataagccgaatcatagtaaggcgggacaatttcataaagaaactggacgtatcgttttatgcactaatcctgaagataaagaggctttaattacatcgtattcgcgcaaagtattacaagttgtcaaatctttcaaagatttagataaacttttagtacctgatactatcaaagatgaatgggcggaagaaattgccgaaaataaagcgaaacaagcaaaactcaaagaatattttgagctttatgccaatacggcagagcaaatcttaattgcagaaaatgagcaagctgttctagacggaaaaaaggaaatcaaaatcaccgaaggacgaattttaacaaaagctttccgtattattcaagataaaaaactatggaaaggtgataattttaagtgttacgaaaataattcttccctcgtttatattcctaaacataaacttgcttatgagggccgcaacaaccattgtgttgatttctttgaaaaagatggaaaaattggctgggaagttattaaacgttttgatgcaaatcaagctgattttgaaccacaatgggaaaaagacggtggcaaaatcatctggtctattcagcaaggagacttattggaactaaatacacctgaagaatggaaagggtatactgataaagatagatgtttggctaaagttaagaagtttagcaatggtgaaatgggaattgattatataacagatgctcgtgccaccactaaaaataaagaagatcctgattattttgtcataaaaactttaagaaaaggattaggcttttataccaaaaacaatgcacgaaaagttgaattaaccccatttggtaaagtcaagaaaaagcataaggtgctgtggaatggcccgaagacaaagagctgaaacattaacagggtggtcgatgatgtggataatttgtatgtttgactgtccggttagaacgcgaacagaatcgcgcaaagcgacgcgttttcgcaatacacttcttgacaatggatttgtaatgaaacagttttctgtttatcttaaacctgttcgaactttggatgtcgggcgtaatttagtaaaaaaattaagccgtttggtgcccgataatagttctgtatcctttttgtatattacagacaaacaatatttaatgacggaaaattatctggggaaaaactatgaagaaaatgaagaagagatgcgcgaaaaagaagggcagttgcttttattttagatgattttacggcattatttatgatttcgcgaatcgcttcggcagcaaaaaaatcagtgaaattggttgtcagcatatttgtctgttgctatttttaaaattcaaaagccttgaaaatctatttattttcaaggctctaaccttaataggttatatcagagattaattagacagtcaactataactgcagacttgctcccatttcccgactgtgcgttatatcag

SEQ ID NO: 359 - DNA, 4685 bp, synthetic construct
  misc_feature 1..4685: note = Synthetic
  source 1..4685: mol_type = other DNA
gcgcggacaaagccggaagcggcggcgaatgggctcaggtgataatggcttatcaggcggttatctggtcctttgcgttttcgtttcttgccatatttctgatgatgcagtggctgcggcatgcaacgtatctgccgtttgtcatttaccggataatattgggaatctgcctcttgctggacgcttacggagtgatatgacaagccggttttaaggtatgttgttttttatgaaaaaatactaaaaaaactgttgactaataaaaaaaaagccgctaataaaatatccgttgctctggtggcgaaattggtagacgcgcatgcttcaggtgcatgttgcctcaggcagtggaagttcgagtcttctccagagcaccattaaaaacctccttcacggaggttttttgtatagtgagatgttttattacttgtcaaaggaagtgataacaaccgcagacaagattataaaacgcttatccgaagcgaagacgtcaaaacctacaaagtaagataattttaaaaactcctatttttgataggagcttaaggttttttatgctatattgaaaataatgggagcaacgaattgctccctcatcttacggcattctcagccttattatatatgtgttgaccgtctaattaatctctgaaaaaattacgtcattcacataacacccgtattatgccaatattattattgaaatgtcaatatttatattatagcctatattaaatttatttgcatatatgggagattgccatgaaatatcgtctgggtcttgatttaggtgttggttcaataggaagtgcggttattgaactcgataatgaaggtaaagcaaaggacattattgatgcaggtgtccgtatttttgaagtttcagaaagtgcagaggaaagaaggctcaaaagaaccgcccgcaaaaatttggtcaggaccaaaaaacggttggagcttttagccaaaaaactttttgaaaacggtttatggccgaatgaaaaacctgaaggaaccgataaattaaaaagcaaatctccttataaaatcagaacagacgccttaaacgaacggttagcgagcccctattacgtcggacgggctgttttacatatcgccaaacaccgtggcgcaggttttgtctcggccagtgaagaaacagaggaggaaattttagaggagggtgaaaaatcaaaagctaaaaagtcttcttatgatatgatgttgcatcacctaaaagaaacaaattccagaactatcggcgaatttttttataataaaataatctctggcaaaggaaacgataaaaccgttcgccagaaaaaatatgcgattgaaaaaaatattgtagattacgccattccccgttaccttgttaaagatgagtttaatcaaatttgggataaacaagccgaattttatccacaaatgaaaaaagaaaatttgaagaaagaaatttacgatattttattttatgaacgtccgacagcgccttatgccacaggtaaatgcatttatttcagggaagaagaccgcctgctgaaagcccatccgttatcggaaatgcgtcgcatttatgaagaagtcaacaatatccgcattttaaacaatatgggcaaaagaaaattaaccttagaagaacgtgattctattgttaacgagttattgttaaaaggtcaaaatgcaggtaagcaatcaatcaaaaaactactcaacttgtcggcacagcacaaaatttctttagttgacgacagagtaattaaagcttatttatattctcgtcccgaatttgcaaataacgaacatttgcagaatctgaacgaagatgaactttcatcttttattgagtttttggctgaacccaaaatgtcaaaggataaaaatgcccgtttatacaacgaagacgcgttaattgaacatcttaaaccgattctgaaaattgatgacgaaaaagaaatcggcaaccttttaaccaaactgcccaaagggcggggaatgttgggcataagcgccaccaaaattattctcgaaaaactaaaagaagatgtattaacacatcgtgaaattaccgacaaattagctgaaacggataaacgatttatggcagaggaagaaatcgcccgccaaaatcaggggaaatgttttcaacttccttattatggggaaattttacaaacagatacggctccgcttccgccgttaatgataaataacaacaaaagccttaaccctgatgaagtaaaatggggcaaaattgccaatcctgccgtacatatgattctcaatcaaattcgcttagttgttaacgaaattatcaaaatttacggcaagccttatgatattaacattgagcttggccgtgacgtcggtatgtctacaaagaagaaaaacgaatttgaaaaacaacaaaaacaaaacgagaagctgaatgaagaggctaaaaactatctaaaagaacataaaattgccataaacaataaaaatattttaaaatataaattagccaaagagcaaggctggaaagatgcttatgatccaacagcaggtattccgcaaaacttttcggggtttgatattgaacatatgtgccctagagcggataaagcttctgatacatacaacaatctatgtcttgttgatgaaataaggaataaaggaaaaggagatagatacccttatgaatggtttgaaataaaatataaagatgagcctgaaaaaatcagagaaattctaaaaaatgctcgggaacgcctaaaaaataaatcttggcgatttgaacctgatgcaagggaagtatttgaagaaaatggtgataaggatgaaacaaatcgctatatggcagacactcgttatgtttctaaaatggcacagcgatatttgcgggctattgtcgattgctctgattgtgacgaagttatgcaaaaccgtattttggcagtcaaaggcgggcaaacggccaaattgcgccaacgttggaatttacttggtttggaatatgatttaatggggcttgatattccaagatatgttgattgttctccttattggctggagcaagatagcggcgaaattatagatggaataaacaaacccgatattgacggcaaatggaagttttttgataagataaaaaataaagaatggcaacccaaaccccgtatcgaccaccggcatcacgcaatggacgccataacagttgcttgtgctaaccgaggactgatccaaaaaatggcagaagaaaatgatattaacaaaattgattatccgttgcctttgacttccgttcaatcggtcgccgatttcagacggaaagtcatttcctgcctaaaagatatcaaagtctcgcacaagcctaatcacagcaaagccggacaattccataaagaaacaggcagaacggtcttgtgtcaaaaccctgatgatccaaattctttaatcactgtttattctcgcaaaattttacaggtagtaaaatctgctaaagatttaacaaaactgcttattcccgaaacaattaaaaatgaatggcacgaggatattgcagagcataaagctaaacaggctaagttagtacaagattttgaactttatatgaatacggcagaacaaattttaattgccgaaaatgagcaaggcgtagctgaatgtaaaaaagaaatcaaaattaccgaaggaagaattttaacaaaagcgttccgtattattcaagacaaaggcctgtggaaaggcgataaatttagatgttatgaaaacaattcctctttagtttacatcaaaaaacacggcgttgcttatgaggggagaaacaaccattgtgtagatttttacgttaaagatggcaaagttggttgggaagtcattaagcgatttgacgcaaaccaagcagattttgaacctcaatggaaaaaagagggcggaaaaattatttggtctgtccaacaaggtgatattttagagcttgatacgcctgatgagtggaaacaatataccgacaaagaaagatgtttggccaaagtaaagaagtttagcgatggggatttgtctattgactatattaccgatgcccgtatgacttcacccaaagacaaaaatttgcaatatatgtttgttgacagcaaaagacttcggtctatcaacgctatttgcaaagcaaatattcgtaaagttgaattgacgccgttcggaaaaatcaaaaagaaacataaggttctttggaatggcacgaagacagcggcttgaaactctgacaggatggtcaatgatgtggataatctgtatgtttgacattcctgttcgtaccaaaaccgaaatgcgtaaagcaacaagatttcgcaatttattactcgataatggtttcgtgatgaaacaattttcggtatatattaagccggttaaaagcttgtctgtcggacaaacgaccactaaaaagctttcaaaatttattcccgataactcttctgtgtcatttatctacattacggataaacaatatttgatgacggagaattatttaggcaaaaattttgaagaaaatgaagaatcgattcgcgaaaaaaatggtcagttattgttgttttaatcattaaaaaacatgtttttaaagttaaaataaagccttgaaattgtattatttcaaggatttatgctattagatagcttatcagagattaattagacagtcaact

SEQ ID NO: 360 - DNA, 10309 bp, synthetic construct
  misc_feature 1..10309: note = Synthetic
  source 1..10309: mol_type = other DNA
aacctcttgattatctggtaattttaaggcccgtgaagtcgggtcaagcgttgcgaaaagtttatcctcgacaaacgcgtcggattttgttaaagcgtttaaaagcgtggattttccgctgtttgtatatcccgctaatgcaacgcacaaaacgtcgtctttttttcggcgcaatcttagatctttgcggcggttttgcagttcctttatttcctcttttaaagcgtctatgcgttccgagatatgcctccggtcaagttcaagcttactctcgccaaggccgcgccttgttccgatgccgccgccgatacgcgacagcgacgtataacttccttttaaacggggtaaagcgtatttcatcttagcgagttccacctgaattttgccttcggcggtatttgcccgcattgcaaaaatgtctaaaataagcattgtcctgtcaattatatcaaaatccggtattgctttagagagattttttaactgcgccggacttagctctaagtcaaaagctataacgtcaatatcgctgtttttgcaaaattccaaaacttcggcaattttaccctcgccgatacatgtagcgggctgtaagctttgacgcttttgagtaattacgcctgcaatctcgccgccgaggtttttgcataactcttttatttctttcaatgattgttcaaaatcaaaaaaaccgtctgtttcaacgcccactataagcattttaggaggtttgactttgttctcaaataattcctgcataataatatcctcattgttattctttgtaccgtgcaaaagcactgttttgtacggtactatgcaatttctatatgaaataaaagaccttttttgttccgatttttcgcattatagcgggccttcgccgctattttgacagcgccattgtcgaaagctgcttactatttttgcagatgattaagaacaaattaataaattatttaatatagaaaaccatgctattgttgacttctttaaatccaaatttttcgtacaattttctgcccactgtagtagcgtttaaagtaattttcttataaccaagatttttagcttcctcaactattctttttaaaagctccgcgccgatcccttgatttctgtattctttcacagtatacatgttcattatatacgctgttttgccgtctaaacatcccaaaaacgggggaactacggaaaaacataatccgcttgtcgctacaattttatcgtcattaagagcaatccatgaaataaagctgttgtctttcagtgcaaggttaaaatagcgcctgttagcggcttcaatttctcttcgctcaaattccgataaatttcctatttccattaaaagcgcgcctcttaaacctatgagtttatcggcgtcttttatgtcggcctttctataactaatcatttttacctccaataattctctaacaataaatttatagtactgtgcaaaacaggcggcttgcgtagcactcattaatttgtcggctatttatcatccgaatcgcgcaatttaacggcgtttgcggcgtttctgcggatttcatcacttattgccgcataatgctttttagttgtgtttacgtccttatgtcctaaaatatcggccacaatgtaaatatctttagtttcccggtataatgcagtgccgtaagtgcttcttaatttgtgcggtgtaattttttttagaggggtcgcgatttgcgcgtatttttttacaagattttgtacggcgcgcgttgtcagccgcttattttgtaaagacaaaaacagggcgttttcagaaggctccaagtctttaatgctattccttaaattgatatattcctttaacgcgcttgaaacttcctcggaaaaatataaaatagttttatttccgccttttcttgtaactttaaagccgttattattaaaatcgatatcgtcaacgtttaagccgacgcattcgcttatacggatgccggtgcctaaaaaaagcgtcagcaatgcaacgtcgcgtacttttgtagcgccgtgaaatttaagctgtcctttagttaagcttttgccgaattccgctaaatttaataaatttacaacctcgtcaatttcaagacggactatttcattgtcgtgaattttgggagccgaaactttttgagttatatttttttggattttttcttttttataaaagtagttaaataaagtcttaacggccgataatttccgcgcttttgctttttcgttattagtataatccttttcgttgtgcgaatagtagtttaagtagtttaagaagtattctaaatgcgtgggggaaaccttgtctaaatagtttagagtaaaacttgttttatctaaacctttaaattcggaaatttcattatataaaaattcaaaaaatatccgcaaatcaaacgcataatgcaggcgcgttaaaatggcggtattttgctcgattccgataaaatagtccgcgcaaaagcctggcaaatcagaaatcgcgctcataagccttctgtataaattttttttccgttctaaaaaataatcagacatttatacctttaaataacgttaagcttgcaaatttacgttatttaaattataaccgttaattatcaaaataacaagaagattatgtgaattgccaacttttaaagccgcaccaaaacctaatgcttagcataatactatgcaaacagcattattttaatagtaaatgctattttaaacctattttaagaaaaaaaagagcgttttttgcgctcttaaataaagtgtttattaagttttaagtcgatttaaattattcaggaatctttttatcttcggcaagaacaatattatccgattcttcctcctgtgctttttgttcaatcttttgttctatttcttcaagacttgttaaatttggcaaatcgttttctctgcaaaaatcgctgtaaattttagttttttccataaatctcccttattattatttgaagatttaaaaattatattctaaattactcccatataataacatacgtatattgacaaaacacaagcagtatgctaaaatgttattgtcatattaaaggataataggtcactaagataaggtcttagtaccgaaaagctcttacgcaccgcttgccggtgcgtaatctttttaaaggaaattgaagtttagtcttttcaaaaagtttttttagagttataatgtatgtactttccaatggaggtaaaatatgacaaacataagatataggctgggattagacatcgggatagcttcggttggctgggcagtgcttagacatgacaaagacggaaatccggataaaataataaacaggggagttcgtgtatttgaagcatgcgaaaagccaaaagacggtaagtcgcttgcggcagcgcgtcgagagtttagagggttgagaagacgcttacgcagaaaaaaacacagacttgaccgcattaaagagcttatttgttctgaatttaatatatcgttagaatatctaaacagtttattcgaatctaacacaccaagaaaagatgtttatgttattcgctttgaggctcttgacaaaaagatagaaaaagaagagtgggcaaggcttcttgtacattttgcacaaaagcgcggttttaaaagcaatagaaaaagcgaaaagatcacgaacgaaagaaaaaacgaaaagaccacagaaaaagccgacaaattaaaggacgaaaccggtaaattaaaagctgctataaaaacaaacgaacaacttatggaatcaaaaggatgccgaacaataggagaattgttatacaaaaattataagagaacaaagcaaaaagaagacggctcttttatagattattttgaaacaagaaataaagccggcaagtatgatttaacattttcaagagagcaagtggacgacgaggtcgagtatgtatttaattcgcaaaaaagacttggtaataaatttgcttcggacgatattaaagaaaaatataaagaaatcctcttaagtcaaagaaattttgacgaagggcccggacaggggagcaggtggcgcggaaaaggtaatatgattgaaaaaatggtcggcacttgtacttttgaaaaaggagaacctcgcgcgccaaaaaacagctacacctttgaacgttttatgctgattcaaaaggtaaacaatgtaaggcttttaggctcacctcaaaaagaacttaccgtggaagaaaaagcaaaaataataaatgaagcttattcaaaaagcaaactcacatttaagcagataagaaaactattaggtattggtgattatacagagagcggaaaaccgcaatatgtttttaatgcgtctatatatagtaaaaaagcaaaaggaaaagacgcagacggaaaaactgtatggaattatatgacttacgaaaaatgtgaagaatcaaccacctttattaggctgaaaggatatcacgatataaaagaagcggtaaaaatcgatacgcttacaccgcaggatttagacgaaattgcttattgccttacggtttataaaaacgatgacagattaaaagaagcgttaagtcaaagaaattttaaagaggaactaataaaagatataatagagaaagctcctaattttgacaagttcggacatctttccattaaagcaatgaataaaattttacctcatttggaaaaaggccttacatatgataaagcatgtttagcggcaggatacgactttagaaaccaaaataacgatgaaaaactaactaagctctgttttaacgacattgccaacgaaatatataccccggttgcaaagagggcggtctctcagactgttaaagttataaacgcgattataagagaatacggccctccagattgtattcacatagagcttgcgcgcgaaatggcaaaaaattttgaagaacgcaaaaaactgcaagaaaaaaacgaggataatcaagcaagaaatgaaaaaatgatgaacgaaataagagagtatgagtctgcccccataaaacccggcggtcaagatttagaaaaatacaagctgtggatagaacagaaaaattactgcgcttatagcggtgagcgtattacaatacaagacttatttacaaacgccgcggagattgaccacataattccttatagtaaaagttttgataacagttataacaataaagttgttgtcaaaacaaaatacaatcaggaaaagagcaatcatttgccaatggaatacataaagactaaaggagataaagaggttaaaagatttaaagactgggtcgacgatgtaattaaaaacaggacaaaaaagaacaatttacttgcaacggaaattgacgagcaaggtttaactcagcgaaatttgcaggatacccaatacgcaacaagaacaattgcggattttgtacgcaataaattgcagtttacagaaaatgataaatttgtcaacaaagtggtatgcctaaacggcggggtaacttcttacataagaagaagattaggtctaggaaaagatagaagtacggataaccatcacgccgaagacgccataattatagcaagctgcagtcaaggaatgcaaaagaagatatctgattatgaaaaaataagaagagcatgcaactttaaagacgatgacgtatggattgacagggaaacaggagaagtaattaaaatggctcgcgaatttcctcagccttggcctaattttagaaaagaagttatattatggtttgaggaaaatccgcaaagtgaaataaacttaaaaatgcgaagagaacttctgccggcgtatgaagaggacgagattattaagccgctttttgtttcaaggatgagtaatcataaaataaccggcgcagcacataagcaaacaatgcttagaacagaagaaaaagatagagaagaacatatcattaaaagagtgccgcttattgaacttaaactcgttaaaggcaaaaataatgaaaacgaaattgaaaaatactataataaagaatgcgataagcttttgtatgacgcattgctaaaaagactaattgagtttgacggggacgcgaaagaagcatttaaagaacctttttataaaccaaaatcaaacgggcagaatggaaatattgtttcacatgtaaaaatagattcaggtaaaattagcaatagtgttgatctaaaaaaaatcggcgcaaaagctgcaaacggcgatatggttcgcatagatgtgttttataagctaaatgaaaaaacagataaaaaacagttttattttgttcctgtttatgttgcggattttaaggaaaaggaattgcctaacatttcaacaaaaggggacgagatgaaagaggaagacggctataaatttgaatttagtttatatgctaaggatttaatgcgtataaaaaagaaagataaggcgcctgaaatgctctattatacaaatgccggtattgcaaccggatctattaatgcgattccgcataataacacgcaaaataaaatcgaaagtatcggcgttcaaaaattagaaatttttgaaaagtgggagattgattttttaggaaactattgtaaagctccacatttgccgagaaatatcaaaacattacacggaagaagaaaaaaggattatttacttaaatgagatacataagtgttttattaagcgacgctaagagtataagtgtagcaaacgaacagcttaaaattgttaaagacactaatgaatttagatatccgcttgaggatgttaatgtagttatattagaaaaacactttctttcaatttcgtcttacactctttataaattcgcggaacacggaatagcatgtattatatgtgaccaaaaacatcttccaaacggaatactgatgccttataacacacactttaaaaaacccgaggttttaaaacttcaaatagaggctccaaagccattgcaaaaaagaatgtggcaagctcttataaaacaaaaaatcttgaatcaaagtaaatgcttgttatattcaaataaaaatggggctttcgaccttgaagagtgcaaaaaaaatgttcaaagcggcgatgctttaaatatggaagcagttgccgcaagaaaatattttggatatttattaggcagtaatttttcaagagagcaggagaactttaaaaattcagctctcaactatgcatattcaattgtacgcggggcaatttgccgcagccttgccgcatacggctttgaaccgtgtttaggagtcgggcacaaaagcatgcttaacgcttttaacttagcggatgatataatggagccttttagagctatatgcgatttgcttgttatgaatattgaagaatgcgaagacgggattttaaaaccgatgcataagcaaaaattagttcaaatattgcaggtgtcttgtaaggtggaagatgaaattgtaagtgtatcttacgcaatcgaaaaatgcatatcatcttttaaaagaagtttggaaaataaagaagaggttttagttcttcctgaacttatagaactaaaaattcaaaggtatgaataaatttatgagggttatggttttttttgatttacctgttgtgtcaaagaaacaacgaagatgggcgacgcaatttcgcaactttttattaaaagacggattttatatgatgcagtattccgtttatgcgcgcatatgtaacggtgtagacagtgtggaaactcatgttaaaagggtgtctaaaaacaaaccggaagaaggaagtgtgagaattttaactgttaccgaaagacaattcgaaaacatgatagtgctcataggtgatgtaaattacaacgataggccggagcaattgcaaatgacgctttttttctaaaaggctaattttaacgcgaataacgccctctgttttctcttttttagaaaataaattttaaaaacaaatcaaaaacccgtgtattttacacgggcttttgatttgttttaggaacctattgtatcataccaaaggataatagggaactaaaactcaataagattattataactttttgtgcttattgtatcataccaaaggataatagggaactaaaactgcaatgataagttggaatttaactgataaattgtatcataccaaaggataatagggaactaaaactctgaatcttctccaacattaaatattactattgtatcataccaaaggataatagggaactaaaactataataaatatcaaagtcgataataaaaaattgtatcataccaaaggataatagggaactaaaacgcgcacacacgcgaaaaaaacacacgcgcgattgtatcataccaaaggataatagggaactaaaacttgttttcgtcaataaaaaacatataactgattgtatcataccaaaggataatagggaactaaaacatgcaggttagtattaacgatttacgtattattgtatcataccaaaggataatagggaactaaaacccgcaaactaatggaagaaatatttgtagaattgtatcataccaaaggataatagggaactaaaactgtagtgtcgtgtattcctcccaaaatcaaattgtatcataccaaaggataatagggaactaaaacttcaaaaacgggctttaaattttttgctaaattgtatcataccaaaggataatagggaactaaaactatgataacacgcaaatttttctgccagcaattgtatcataccaaaggataatagggaactaaaactatcttgccacgggcaagatgtttgttccgattgtatcataccaaaggataatagggaactaaaacttaacatctaataatgttttcctcgggaaaattgtatcataccaaaggataatagggaactaaaactggcaacgttaacggattagctaattttgtattgtatcataccaaaggataatagggaactaaaacaggatttcaatgtcagatttctcctcgtttattgtatcataccaaaggataatagggaactaaaactaagacaacacgcatatttttcggccggcgattgtatcataccaaaggataatagggaactaaaacgcgctggctttttttgaatttgtattcggaattgtatcataccaaaggataatagggtttatcgcgaattggaagtaaattatatttttggcaaagagggtattggaaaaactccatttgttgagcaaaaacacggttcggaaaatgtttaccgtgtaactaattataaacgagacccttttttcagttattataacgaggatgttatagtttttgaggaatttagaagtagtttagagataggcgagatgttaaattatttagacggaaattattgtgagcttccggcacgttatagcgacaaggttgcggtatatacaaaggtttacatacttacaaacgagccgttatataaacaatatccgaacatgcagactgttaagcgtgacgaagcgtggaagccatttttaaagcgcataacgaatgtttacgattttgataagagcaaaattgagcctataaataagcattttgctgcttgtaagcctgcttcagaaaaagaagcagaacaaataaactttttatttaaaaataggcgattttgaggtagggaagaatgaataatccaaaatttaatgataaggttttaatatcaaagaaaaaatttcattggcgttggctaattttaaatttatgttgcgagcgtgaaattgtaaatttttatgaagtagaaaatataaacaatatgggggatgttgttttgtttactcaatttagaaatcgtaaaaagtttccgcaacatgtaattttgataaaacgcacaagtgaaaaatgttataggctcacggctttaatctttaatgatatgttttatgaaagtttttcggatgtaagcggcattataaattacataaaaaggctgattaaaaaattttcggcgccggttatagaaaaatagggaaaaagggtaaaatattaactattcgcaaaacacaggtttaacgaataattaaagggttttttaacccatgtaaagcatatttaaactttaagttatattttatttttcatctcttaatatatttcttacgattcaaatttagaatcgcttgtatcgcttgttgttagatttaaaaactgcctaattgtctgtgcggcgcatttttaagcaaagctttattaaactgtaccatttttattacgcttctactctctgtttgctaaaaattcatcttaaaatcggctgtttaaacgattttaaagcgaaattcgaacccgaaatcaaataaattacgcatataaattta

SEQ ID NO: 361 - DNA, 5522 bp, synthetic construct
  misc_feature 1..5522: note = Synthetic
  source 1..5522: mol_type = other DNA
ggaacagggtcactcggggcacccccccgaacccctcgtcgctgagacgtgaagcctccctgtagacttgccccggcccgcaaggaccggggctttttttttgtttctgtgagtcagcgccagatatgaaagaaccccgccgaagcggggttcagtgggcggatgatccgcgggatgcccagcccgcacctaaatggatcgttttgcttgcggaaagcgaccactccaggcatcgctacggggtctatgataaccgaataaattcggacggggcaaggccatatgacaatcatttggggattcgacctcggcgttgcctctgtcggcttcgctgtcatccggcaggacacggcgccggagagcggcgaaatcctgcgcctcggtgtccgcatttttcccgaaagccgtgaagccaaggccgatggccgccccggcgaaccgctcaatgccacccgccgcctcgcccgcctcaaaaggcggcaggtccgccgcaaacgctggcgccgcatccatcttcgtaccttaatggcggaagctggcctcttgccggaccagcgcgctgaaccgcctcgtgcgtctgcggaccccgtcgcgctcaggttgcgtggccttcatgatcctctaacccctgagcaactcggctgggcacttttccacctgctcaagcgccgcggctatgatgaggcgaccgcccctgaggcagtggagacgacgggccgggaaaagacggcgagagagaaggacgagcagaagaagcaggcggaattcaaagacagtctgggcgtcttccgtggcttcgtcggcacccgcaccctggccgaggcgctgaccgacccggccctcccctccctcccgaaacgccgcaagaaccccatcgaacgcccgatggtcacgcgcgaactcgatacgctctgggcggcacaggcgcgccaccaccccacgatccttaccgacgacctccgtcgccgcttggagagcgtggcgctgtcccggcgcccaaccttcttccgagccgccagcatcggccgttgcagcctgttgcctgaccagcagcgcaccctgaaggcggaatggatcgcccaacaggtcgaactcctgcagttcgtcaacgcgcttcgcttgaccggcggcaatgcacgcccgctcgacccggaggagcgtgcccgtgccctggcgcatctggcgacccgcgccaccaccacctgggcgcaactccgcagcgccatcggccttccgcgcagcaccgccttcacgcatgaggagcacggaaaacaggccaaagtgaggggcaatgccaccgaagccgcgatccgagccgccctcgcccccgcgctatgggacagtctggcgccggctgttcaggatgcgatccgccaggatctgccacgccggctgcatgccatctcctacgccgagaagcccggccgcttcgaaatccgcccgggaagcggtcgcgccgcggcgacagacgaagccgctgcggccatggcgcgggactgggggctgcccgccgaagccgcccgcaagctggccgaggcgacactgccaccagcctggtcccgccacagccgcgccgcgctcgaacaactactcccgcatctggaggccggccttgcctacgccacggcgcgcgagcgtgccttccccgagcatcgcgcgcatggcgaccccctgccccgcttccccgaaccgcagccccaggccaacccggacccggccatcgccaatgcggtcgagggcgcgctgggcggcatccgcaaccccacggtcatgcgcacgctcggcgaactgcagaaggtcgcgaatacgctgctgcgggcgcatggccggccggatgcgatccggatcgaactggcccgcgacctcaagcgcaatctccacgagcgggccgaaacgctgaaggtgaacaaggagcgcgaaaagcagcgccgggaagcggcggatgagatcaccgggcaaggcaagccggccacggcggaagcgctggaccgggtgcagctgctgcacgaacagggctgccgctgcccctataccggcgagaccataagcctctcccaggcgctcgacggcaacgcgacccagatcgaccacatcgtcccccgcagccgcggcggggagcgcgggctggtcaattgcgtcctctgcgccgccggatcgaacgccgccaagggcgaccggacgccgcaggaatggctggccagcgaccccgcgcggcgggaccggctggccacggtctgggccagcatgctggccgccaacaaggcctgggccggcaagcatcggcggctgctgcgcacggatgcgccggacatcgagggcttcaccagccggcagctgaacgacaccgcctatgccgcggttgccgcccgggccttcctcggcctgctctggggcggcgggcaggccggcatggaccatgtcagcacggtgtccggccgcgccaccgcgctggtgcgggaggggtggaagctcggcctgcgcgggctgctcggcctgccggagacggaacgggcgaagctgcgggaggatcaccgccaccacgccgtcgatgcgctggcggtcgcactgaccagcccggcggcgatgcgcgcgctctcgatctattggcaacgacgggaacggggcgaacagccgcgcttcgccccgccctggccgcatctgcaggaggaagcgcgggcggccctgcacgggctggtggtgagccatcgcgtcgatgccaagctgacgggccagatgcataaggagacctatctgggccgcaccggccagaccgatgccgatggcacgccgttgttcgccaagcgcaaggccatcacggcgctgtcggctagcgagatcatcggggagagggactcccggatcgccgacgcgggggtgcagaaggccatcatcgccgccctggcgacggccgggctggacctgcgcgccgctgacggcaaggcgcggacactcggaacggccgaggagaagctgcgcaaagcggcgcttgcgcggccgatccacctgccgaaagccgatggcagccccggcccggtgattcgccgcgtccgcatccacatccgccgggacccggaggccctgctgcgcgcccatcccacgaagaatatacatctggaactgggcggcgggaccaaccatcacgtcgcgctctatcgggatgggacgacgatccgcttcctgccggtgacgcggcgcgaggcgtttgaacggcagcgtcgcgggaagccggcggtcctgccacggcatcccgagggcggcaccctgctttttgcgctgtgcagccgggatgtgctgatgcgcgagacaccggaggggcgggagtttgttttggtgcggaagttcaatgccgcaggacagattttctatcaatcgctcaccgccgcagggaagccagagttggaatcgaagaagccttggccgctgttacacgcggattggcgcaaggtgagtgtcgatcccatcggccgggtgcggccggcgcgatgacccatcgcgtcgtcgccgtgacggagcggccgagccgcctctccctccgcgcccggcaattggtgatcgagcgggaggggctgcccccggcctcggtccccatcgaggatatggcgctgctgatcgtcgatcagcccgccgtcagctattcccacccgctgctggtggcgttggccgagggcaaggtcgccaccctgctctgcggcgccgaccacctgcccgccgccctgatcctgcccctggccggccatgggctgttggtggaacgccagcgggcgcagttggcggcgccgctgccgctgcaaaaacgcctttggcaacgcatggtccgcgccaagctgttgcagcaggcggccgtgctgcggcaggcgaccggcggcgaccagggcctgcctgcgttggcggcccgcgtccgcagcggcgacccggacaatctggaagcccagggtgcgcaacgctattggccggccttgttcggccgggattttcggcgcgaccgcgccgctgaggaccagaacctctggctgaattatggctatgccgtgctgcgggcggcggtggcccgggcggtggtggcggcggggctgctgccgagtgtcggcgttttccaccacaaccgcgccgacgccttcgcgctggcgagcgacctgatggaaccctaccgccccttggtggatcgggcggtgtgggagtgtcgggcagcggcggtcgcccggggcctggaccgcgccgccacgacccgcctgctggcggtgctgaatgagacagtggcgctggacggacagaccctgccggtcaccctggggatcgagcgcagcgccgcgtccctggcccgcgccttcgccgagcggcggcctgcgctgctgctgctgccaggcaccgcagcgggggaggaagcggatgcgccgccccggccgcctgccgctgcttgacccgctggcttggcgagccatgtgggtgttcgcaatgttcgacctgccggtggaaacgccggtgcagcgccgcgactacgcgcgtttccgcaaggatttgcgggccgatgggtttctgatgatgcagtacagcgtttatttccgccattgcgccaatgccgaaagcgccgccgcccatatccggcgcatgggggcgcgggtgccgccgcagggggaggtacgcttcatgatggtgacggatgcgcagttcgcgcgcatccggattttcaccggaaaccgccgccgcccgccggaaacacccccggcgcagctcgaatttttctaagccgcgccggggatttctatttcagttcaaagcgttagcgcacgtccagtgtagcgatgcctggggtggccgcaagccgcagcgcagccagcgagggcaacgtgattgtcgtagtgtagcgatgcctggggtggccgcaagccgcagcagatgctccggcgtcaccgcctggcgttcgagtgtagcgatgcctggggtggccgcaagccgcagctccggaaaagccatgcggagggcttgcgctagtgtagcgatgcctggggtggccgcaagccgcagcgctgattgccgcgggcgtcaccgactttggagtgtagcgatgcctggggtggccgcaagccgcagcgcgccgctgaccggtgtggaccgcgatcagagtgtagcgatgcctggggtggccgcaagccgcagcgcggcaagcaaatcttgcatcgtcgccgggagtgtagcgatgcctggggtggccgcaagccgcagcagaagttcaggcaatggttaatcgcgcagaagtgtagcgatgcctggggtggccgcaagccgcagcagatcggcggccggccggggtcatttgcggagtgtagcgatgcctggggtggccgcaagccgcagcctcagacgcagagaggaccggaccagtgccagtgtagcgatgcctggggtggccgcaagccgcagcttcgaggactatgcgcgcctggcgaagtggagtgtagcgatgcctggggtggccgcaagccgcagcccacctttgatgcgccccgggcgcatcttcagtgtag

SEQ ID NO: 362 - DNA, 23351 bp, synthetic construct
  source 1..23351: mol_type = other DNA
  misc_feature 1..23351: note = Synthetic
ggcctcttcctcttcacctctccggcctcggcagcggaaggcgataccacgttctttgaaatctttaccgatttcaaaaacaacgccgccaaggccatcgtcatgtggatcctcctgctgacgtccgtcgccatgatggccctgatcgtcgaactcttcatccgcctgcgcgccgccaagctctccccgcccgccgttgtcgccctgctccgcgatgccctcgtcagcggcaattaccagcaggccctggaaatctgcaacgtcaacaaatgcttcctcaccgccgtcatgggccccgccatccgctccgtcaccgccggacgccatgccgtcgatgaaatcgtcacggaaaccttcgcccagcagtcttcccgcatccgttccaaaaacaactacctgtccgtcatcggcgttgtctcccccatgatcggtctggccggcaccgtcgccggcatgatgaaggccttcgccatcatcggttccgaaggcatgaaaaacatgggcggcctggcctccgccatctccgcggtgctcatcgccaccctcgccggcctggtcgtcgccatcccgggcttcgtcttcttttactactttaaaaacgtctccaccgtcgtctttgccgatgtctatgccgacatccgcggcctgctccgcctcatccccttcgaacagctccagggcctgaatctcggcctggaaggctgatcgcccaaccccccactcttccccgctccgccgccccatggaagccaagtcccacggtcccgccgccctcggtgaggacgacatggagatggaattccaggtcgcccccatggtggacgtcctcctcgtgctcctgctcttcttcatggccactgccacgaccgaggtctcgatgcagcgggaagacatcaccctgcccaaagccggcttcggccaggacatccagggccgtgatgccatgctagacgtcaacatcctctccatcaccaacctgatcgaagtgctcggcgttcctcccttcgaggacgcctcccagctcaccccaatcgtccgggcttccaaggaaaacgccgaaaaaagcggtgcggtcagcgcggagcgcccctaccgggtcttcatccgcgcggataccaacacccaatacgaacgcatccacgaggtcatgaaagcctgcgcggaagccggcgttcccgatgtgtccttcgccatcaacgaggacaaggaccagcgcaaatagccccgttgacaccccttttttgaacaggagaatgtaaccatggcatctggaggaggagaagaaggcgagtttgggctgcaaatcgcccccatgctggacatccttttcgtgctcctgctcttcttcatggtctccgccggagccaacgagaaagaacaggaactcggcgtcaaagtcccgggcaccggcccaggcaaggccgatggcaccaaaatgacccccatcgtcatccgcatcgatgccgacggaaccgtcttcttcaatgacacaccttccggcgcgccgaatgacgacctcctgatggacctgcgcggcatgctccagcgcatgaccggcgcctattccaacccggaagaccaggaccccgtcattatctcgcccagcgcccgcacccggcacacccgcatcgtcagcgtgctcgacgccgccagttacgcccaggtcaagaagctcagcttccgcgcccctcccgacggcactccgaagtaaccggtccgccgccgggctccctttcctgcagctaatccggcggagttcccgcagcctgctgcagcggcagcaggtcggggtcctgggcggccaggtccatgaccgattcatccaagacgacggcttccgccagcagcgtgcgggcttcatccaggcgccccagctgggcggcataacaggccaggttgtaaggaatgaccgcctcccggggaaagcgggtccaggccgcccggagaatggcctcggccgccggcagggaaagggcgcgccgggtggcataggccagggaaatggtccactggggctcgtccggctcaagcacgaccagatgctcggcccaatcccgggcttccggccaggcggactcatgggaggcaatggccaggcggcagacggatgcatcccggtgggcggcatgggccggggccagggccgccagctccccgcgggcctcctcgggcaggccgagttccagccagcccagcgccgcctggacggcccggcgggccgaggcgggcaggggcggaaccggagtgggcgcgggcgcagccatgggatgacctaacttttgacggcgatgcggcgggtgccggtgcggcgggccatcttccggacttccggctgctggcggcgcatggtggaaatgtccttcatcgcctccagggcggaggccgggcggcgggccgggtctttgtccaggaagcgcatgacccaggaacagaggtaggccggcaggtcctcacgcttggcgcggaggtcgggcggctcgtcgtgcaggtgggcccgcaggacttcacgcggctgggaggcctcgaaggccggacggcccgccaggcagtggtagaagctcatgcccagggcataaaggtcggacgccacactcggggattccccgcggaggatttccggagcgacgtattcggcggtcaccagcaagtcggtagggtcgatggagcggcccttggccaggtctttgggagtcagcagggaggccgtgccaaagtccagaatcttcagcagcagccgcccatccggctcctgggtcagcatcatattctcgggcttgaggtcgccatggaccagggactgggcatggatggccgcagtgccttccagcatctgcggagcaagatcgaagaatttttccaaggacagggcccggcgggagaggtagtggtcgaagttgatgccggggatcatctcggtgacgaagcacaggcgcccatcatcctggccctgctcgatgaagcggaggacattggggtgggagatggtgcgcaaggcatgctcttcgtagatgccggacttgcaggccgccagctcggccatgctgtggggcagcaggcgcttgaccgcaacgaggttgccggtgcggtggtggaggcaggcccagatttccgacatgccgccgacagcaatcaagtaaaccggggtgtatttgccgtgcagatcagaacggggccggaagggcttgtattcgggaacggccgctgccatggaaaccagtttaacagtcggcggaactgaatcaatcatgctggcgtaatttttgggtgtcggagggccacgtccggggcaaaatccgctgatgcacgagctggacgaggcggcctggcaggcggcgacccgggagggcactgaatggattgaaggacacagccgcctgctgctggcaagctaccggcattggagcggagagtccctctggccggaggcagaggcagcggcctgctgcgcgccggtgctcttccacgcgggcgtggtggtgctgtcgagccgtccggatgaggagcagaccttgaattacggcaacgccgcggccctgcgcctgtgggcaatggactgggacacgctgacgcgcctgccttcacggcagaccgcagaacccgtggaacaggcggctcgggaggcctttttgcagcgggtgcggcaggagggcctcatccgtgattacagcggcgtgcgtgtggctgccgatgggcggcgcttccggatcgagcaagcccgggtgtggaatctggtggggcccgagggcggctacgccggccaggccgcagccttccatcactggcaaggggtgtgattgccatcggtagcaggtgcgggcacacaaaggggccagtatgccagcgtctatttatcctccccaaggctgtccagtgctaccgaacgcaatcacacctgctggcacgggatgcgagcatcgcttcttgaacggaaccgtgcctgtggatagcatgcggccaacgcatggctttaccaagctccagaggcaaggaacccacgctggcggaagagcgccagcgctgccgggcgttgatggcccagcacccgctctttgcctggctcaaaagcgagctggtgacctacctggccagccaggccgcagtggcgcgctacgccgagggcgaggtcattttcaaaaaaggcagcaagagcgaaggcatctgcctggtggcggaaggcgaggtgctcttcatctccgggcacgaaagcaatccggatgagcaaaatgccagcacctgcgaggcgggggaggtttttggcgagctgagcctgatccagccccggcgccgcgtttcccaggcgcgcgcgggcctggacaccacgctttacatcctccggctcggcctcctggaaaaattcgccgcccggcatcctgatcaattcgccgtgctggccagcaacctggcccgcgatctggcccgccgcctgcgcgaactcaacacccgccgggccaccgcaccctccgcgccatgaagagcaacggcacccacgcgcccgccgctggccaggagcgccctttccaggcattcgagaatttcccgctcttccgcggcgtgccccaggaggtcctcctggttctctttgtcggcgccaccgagatgctttgccgcaaaggccagatcatcgtccaggaaggcgatcccggggaagaattgttcatcatcggcaccggctcggccgatgtggtgatgggccacggcaccgccggggaaaccgtcctggccaccctgcaggcgggggactgttttggggaaatgtgcgtgatcgagccgaccctccgctcggccacggtggtggcccgggagggcaccctgctctacgggatcaagagcacaaccctgcaaaaagtctatcacttctggccgcagcagcaggccgtcatcatggccaacttcgccctcaccctggccgaacgcgtgcgcacgctggacccgctgtatttcgaccgcgctttctgatccgcggccagttcccagcagcaggccgccgcggcccaccaggccaccgaaaggcccaggcagacgattccggccaggggagaggcttccaccgccgcccagagggccagcaggccgcagccggcacaggccaggtgcgcggccagccccatggcccgtgcggcccagggttccaggacctcctcaggacgcatacaccggacggctccgcaggagcggctgcagttcaaggcggcggcgcgcccgggccagcggttccacccgccggcgtccggcgccaaaaaggccccagtccggctcggcttccgtcccgcagtgcgggcagatgccgtggttcgcctcccagtcggccgagttgatgtcttcctggcaatgcgggcagtgaatcagagtttccatggttttttcctttcttggtgatgggagccagcgtaggacagggggtcggacattggttgtccaaggcctggatttttttatgaaaaaacgcaccccccggctctcccgcccgccgctggcccggatgctgcggctgcatgaggccttgaaagccggcacgctgccgaactgccgcaagctggcccgcacgctggaagtggccgacaaaaccatccagcgggacctcgagttcatgcgcgaccagctgggcctgcccattgcctacgatgccaagcgccacggctaccattacaccggggaagtggccggattcccctcggtccaggtgacggagggtgaaatgatggccctcttcgtggcccaaaagacattgacccaataccgcggcacgcccttcgagcgcccgctggccgaggccttccgcaagctgaccgaggggctgagggaccaggtctccttcgatgcggcgaattgggaggccttctattccttccgcagtgcgggcgtgccgctgtcggacctggcgcagttcgaggtgctgagccgggcgctgcgggattcggtgcgggtaaggttccgctaccgcaagctgcgcagcaccgccgcggaagaccggaccgtggaaccctggcacctggcctgcgtggaccagcaatggtacctcttcggacgcgacctggcacgggacggggtgcgcacgttcgccctgacgcgcatggcgggagccgaggccaccgcggaccggttccgccgtccggaagatttttcaccggcggcgctgctggagggaagcttcggcatcttcagcggggggcgtccccggcgggtgcgcatccgtttcgacgcatttgccgcccaattggtgagggagcggcagtggcatccttcccagaaactgcgcgaggaaaaagacggaagcctggtgctggaattgaagctgggcagcctgccggaaatccaccgctgggtcctgggctggggcgagcacgcccgcgtgctggaacccgccgacctgctggacctggtccgccagtccctggcccgtgctctggaagcctactgagcgggccggctgcaggttcagccggcttgtgcccgggaaggaatgaacaccacatccatgcctgcggcccgcgctccatccacgccaggctggccatcttcgaaaaccacgcagcgcttcggctccactcccatcttttccgccgccagcaggaacatgtccggcgccggctttccatgaaccacgtcttccggggtgacaatgatggaaaaaacaccgcccaagcccacgatttccagagtgcgcgaggccacccgccgccacccgcccgtggccaccgccaccggacggctctgggcgatctcccgggcatagtcccgcaccgggcggataggctgcacctgttccagcgattccagatagatttcctctttcagatgggccacctggagcgggtccagtgcggtgccgtggagagcgttgagccgctcgaccacgccgcgcgtgctcaccccggcccaggaataatacagcgattcatcaaaccggaagcccgcccccgagcgggccagcgcctcgcaccaggcacggaaatggaccggcatcgagtccgccagcgttccgtcacaatcgaaaatatagccatcgtagcgtccgtccggaagaaccagggaatccatggcgcgcaggatggcggatgctggcacgggatgtcaatgaagcagctccggcagggccgtttgcaccttgcctcagggttgtgaccgtttactttgatccagcctcatgcacaacgcgatgtcttacgacgatctggtgcccaatgcccagctcggccactacacgattgtcgaacacgtcgccgaaggcggcatgggccatgtgtataaaggcttcgaagccagcctgcagcgcgaggtggccatcaaggtgctcaagcccgaactggccgtggagacttccaagctcgaggaattcgacaaagaagcccagaacatcgccgccctgcgccaccccagcatcgtcccgatttacttcgtcggccaccagggtgagctgcactacttcgtcatgcctttcatttccggcgtgaccctggacgaatgggtcgagcgggagaccccgctgagcattgagcaggccatctgggtgatgaaccatgccatcgaggcgctggactgggccttccgccacaaaatcgtccacatggacatcaagccgtcaaacttcctggtcgatgacagcggggtcatcctcctgaccgacttcggcctggcccactcgctgagcgatgccctgcgctccgacggcgagtgcttcggcacgcccgcttacatgagccccgagcagatactccagctgcccaccgaccagcgcagcgacatctactccctgggcgccacgctctaccatctgctgacctgcaagttcctgcacgacggggacacagtcagcgacatcatcaaaggccatgtcgaaggcatcttccccatggaggaagcggtagccagcgggctgcccccgggctggatccacctcatccagcgcatgaccatgcgcgacccggactaccgttatcagaactaccaggaattgcgccacgccctgcagaatgtcgatgtgctcggaccgatgcacatgcccggggaacaggcaccggcttttatccccatccccctcaagtcatcgatcccccgcgaacacctcttcggcctgctcagccacaccagcgcgagctgggccaaaggcggcattgacaccggcctggaacggaagcgggaggaaatcgaacgggccatcagcaaccccatgaagccgctggcgctcaacgccttcgccaagccgctcaaggaactgcccgaggtcagcgaggtggaattgggcgaattggccgaggcgctggacgccctgccggaaatcgaccgcttcatccaggagctggcccacacccagctttaccatccggccgacccgcccaacacccgccgcaaatgcatcaaggcggcgggaaccgatgtgtcccgccagctggtcctgctcggcatcgccctgcggcaagatttcaaatccaccccggaattcaactggcagccatggctgcagcacgccctggccaccggcctggtcgcccggctgctgctggaaatcgtcctgggcgaatacattccgggcagcgggcgggtgagcatcaaaatccaggccagcatcaccagcaccctctcccgccacgccatcagccgcgcccgccaacaggctattctggccggattggtccacggcatcggcaagctcatcctggccgaaaccgttccctatccttattacaatgtcttgcgtgccgctgccgataaccaggaagttctggcggaggccgaaacccgcctcctcggcatcaaccaccacgaagccggacgcatctggctggaaaaccaccgcttcgacaacgccttccggcaagtggcctcgcattatggcgatctcacccagaagcactccctgctcaccagcgcggcgggcatcgcccaccagatggccaaaatccatggcatcggctactgcggcagtgccatcgtggaattccgcgacctctggtccaccgccgcctgggcggagctggccgccgcgggaggctccaacatgccctctccggaagacatggagcagaccttcctgcctctcatcggccagattccattgctccagccgccctttgtcctttagcattcccgcttccatgttctccgccaccgcccccggacgcgccgaactcctcggcaaccacaccgattacaatgacggcctggtgctttccctggccgtgaaccggggcaccaccgtcacgggcgggccgctggaggacaaccgcatccgcctgcgctcacgcgacctgccggaggcctgggaaggctccgtcaaatccatccagcccggcccgtccggctcctggttcaactacgtcctcggcgtggtcgaggaactgcgccgccgccagattttcatcggcggcttcgaactggaagcgcattccaccctgcccatcggcgcgggcctgagcagcagcgccgcattggaggccgccaccgcccttttcctgaaaaaaatctacccctatgagctggacggactggagattgcccgcgcctgccaggcggccgaacacagctacaccggagtccaatgcggcctgctggaccaaatctccgtcctcctcagccgcgccgggcaggccactttcatcgattgccggagctttgaagtccgccaccttcctctgggtggggaggcccgcttcgtcatcgtcaactccggcgtcaaacacgccctggtggccggggaatacaacgagcgccgcgcctcctgcgaggaagcggcccgcctcctgggcaaaaaagcgctgcgcgacgtgaccacggcggaacttgaagccgcccgcccgctgctgcccgcgactgcctggaagcgcgcccgccacatcaccggcgaaaacgagcgcgtggcccaggccgtcggcttcctggcctccgggcgcatggacgccttcggacgcctcatgtccgagtcccacgaaagctcggtgcgctggtttgaaaacagttgtgaggaattggacttcctggtggaggccgcctgcgccatccccggatgcctgggcgcacggctgagcggcggcggcttcggcggagccaccatcaacctggtggaggccggagcggtggaagccttcagcacgcgcatccgcgaggcctatcaatcaaaatacggaaccgaacccctggttctggctaccgaggcctgcgccggggcggcttgagcctgcccataaccacacagaagcattgtcatgcagccagcgcttgccatattcacggcatgagcgatggagcaggcgccggcccaatgacttgggcttttgacttaggtttgggttcaattggcgaggcagtccagcaaaagggtgaattcaagcacgccgccagctggctggtgccatccgaatttgcctcgaccaaagccgcccggacccgccgccgcatgtggcgcacccggcaagcccacaaggccagggaatcctggctgaaccaatgcctgcggagtgcaggcatggaagttttagtaggccgccgcgtggagcgcggaccacagggctggaccaccctgccaggcgatccacggctggaacgggaattcccgtccgcaggggacaccacctgttacaactccgccctgctccgcatccgccttttgcgaggagagactctggccccctggcaggtctacaaggccctccatgccgctatccagcggcggggttacgatccgaacattccctggaaatcgggtgccagccgctccaccgaagaaaaagaagaaggtgagacacgggcacgcgccgcagagtatcagtccctgctcgaagacatggcccctggccggaccgaattccactacccctgttatctccaagcgtggaaaatgcggctctggaatcccggccaacccgaggttcttcaagagcgcgtgagccacgatgccgaaagcattcacggcatggtagccccacggaccctggtcgaaaaggaagtgcgggatttggtggctgctgcagcccgctaccaccctcagcttgccggccaagccgacttcatcctctggggcccagcctgcaagccctacgcatcccataatggtacactccgcaagcagcatggcctgcgacaaggaagcgaagaagattgggagggtgtcatggggcagaaaatcccccgttttgacaaccgcatcatcgaaaaatgcgccctcattccccgcttcaacgtctgcaagatggctcccgagggcagagccgccgcgcaacccgatgcagcactcccccgcgaagtggccttcctgatgaagctcaaaaacctgcgtttcagccgcggcggcggcatagcccacctggaagccgctgagattgccacactcttcgagaagcgccgcgaggccttgtccctgacccagaaacaatgggaaaccgcctgcgaaaagctgggaggccgccccctccctcccgacctggaagtcaaggcaccccgcctcggaggccgcagtgcattctgccgccccgcgctgaaacacgtcaaagaactcatcctctctggaaaatctccccgcgacttccatgcggaagcactggcgcgtctgcacggcaacacaaatccccaaaaaggcctggtgcctgccgacttggatttcctcctgcgcatgggagactcgtgggaagggctctacctgcccaataaacgcctcgaagcgatctcttcccgcgcgcggacgccggacgaggccatccgcgaagtcatcggctcggtcaacgatccgattgtccgccaccgcctccagcttttcgtcgaacgcctggacgaactagaaacccgcttcggccctccagaccaagtggcccttgaattcgtccgggaggatttcatgggggaaaaagcgaagatcgaataccgcaaattcctcaaccggcgggaaaaagaacgcaaagaagcgcgggaacaggcgggccagctcggcgccacctccggcagttccgggttgaagatggagttgttcaaagcccagaggggccaatgcctttatagcgggcagcggctccacgagaccaagatcgaggattacgtcatcgagcacatcgtgccgcgggcaaaacgaggcccggacgccgtcatcaattacgtgctgaccaccgaagagttgaataacgataagagtgaccacattccctttgagtggccctatctcaagaagcaatgggacgcctacacccagcgggtggaaagttgcgcgggcgcattgggggtaaagcgtgtccggctgctggtttcgccagatgctgtcgagttggcgcagaaatacaccgccctggccgaaaccgcctggatatccaagctggctcaaaccattttgaacctcaagttcggctggaccaacggcaacacccccgacggacgcaaggccgtggtggtcgtgcccggcggcctcaccgcacgcatccgccggaaatacagtctcaattccctcctggcgggcgatggggtggacgaggaggaagcagaaaaaaagaaccgcaaggaccaccgccaccacgccctcgacgccatggtgatcagcttcctcccgggctgggtggccaatcccgacaaagagcacttcttccgtttccccgagccagtacgggccaatccccgcgggtttttccagactgccatccacaacgttgtgccccggcaattgtgcttcgaaaaaggcaaattggaggaaaccatctacgcccgccgcaccatcgcagggaattcagtggctgccgtccgccaggaattccgcgcgctggccttcaaatccgtcggcatcaacaaaaccgaattcaatctcgattacctctacaaacagacggacaaaatccttgaaccccggattcgccaactggtccaggatttcgcctccaccgagcccaacgaggccgcctgggagcgcttctgcgatgaagtccgtctgccccgcaaggatggccatcccgggccgcacgtccgccgtgtgcgcatgagggtcgggccgatggacgaattcaaaaatctttccaaagatagggcggcatccggcgcctaccgcaagggttccacccatcatggccaatgggtctatcgcgatgcaacgggcaggtcgctggtgcgtccggtttacgcgtttgaatccgcgggccaggtgcggcgggaactgatcgccatgcacggccttgatgcgttggtgggctatttccaaagcggctgcctcgttgaactcgtccgtccggtggcccacaagaaaaccccgctggctccaggtcaattcagcctgaacaccctccgcaaggacggctttgcggtcgtcaccgacgccagggggagaaaatcggaacccatcagcctcaagacattgctggaatccggattccaccgtgtgacgtcatgaacgggaccttccctggaagtatttttttgcccgcaagcggcttgcaggcccatggacgcgcccggcctctctggcattgcttttcctccctgaatacggctagagtaattcatgagcgttgaggaaatgcaggccgaaatccggcgcctttcggtggcggacttgcagaagctggaggactccatccacgcggtttaccgctccaaacgggtcggcctgctctacgatgacgcccacggcgtattgagtgaagtcgatttggtcgctgccgcggacgctgctttccttgaatacgaccgaaacgaagcggacataggtggcccgcccgaagcggggtccgccaatctctccgcataggaaaccgcccgcctcaaaagccgacggaccatctcgatgaagtgccgcaggtctgaggtttggatggtcgatctgggcttggccgctaaagtccgcctctgcctgatcttcagcctggactttggagacctggaccgcgccctggtggccgtcgtcccccacacctgctcgctgcgcggttcctcgtttgaagtgcccctgcatgtcccctttctggaatccggcgccttcgatgcccaaggcctgcgtcccgtgcccccgcgcgtcttgatgcgccgtctgggttccttgaccacggagcaaatgcacgccgttgagagagccgtccgccgctggctgggcttgtcatgagctaccacgtcctccatgtcctccagcacggcagcgtcctttccaaggagcgcgggttcatcgtctgtaagggccaagatgggcccgaacgcaagctgccccatgaagacatccgcgccgtggtcattgctgcgcgcggggtcacgctcacctctcactttgtctcggccatcacggagggcgatggcgtgatcctgcattgcaatgagtcctaccaaccctgcggcatcaccacccccctcgcccgcgtcgccgaccagcgttcctacctgcatcaggccgcccgcccggcccgtctcaatgcccggctgtggaacaccttgatgcggggcaaaaccgccaaccagcgccgcgtcctccagctccgcggaaccgattccccccacctggagcgcgccctgcgcaccgaccgcatcgacgagggcaactgcgcgcgccaatattggcagttgtattttcccaccatcggctgggcctcatccaagcgggaccggaaggtggaaaacccgcccaaccagatgctgaattacggctataccgtcctcggcgccctttgccaccgcagcctcctcatccatggcctctcccccctcctcggggtccatcacagcacccgctaccgcgcccacccgctggtctatgatctgatcgagcccttccgccccttggtcgatctcatgctggcggaattcatgatccaggccgatgccagcatgaaggcctggtgcaagaaagtgggcgcggaactgcgggaacggcgcgtccgccatgaccgttattcgctcaaactcatggacgccattgatgtctccgcttcctccctggcccaaagctacgcgctccaaaccgcggacaaattctgggtgccccatttgtgacgtgactccgtgaaactcagccccttccgtatgggatggatcatggccatgttcgatctcccagtgaagaccgacgaacagcgccgggtagccacccatttccgcaaggagcttctcgataatggctacctgatgctccagttctccgtttacgcccgaccctgcgtcacctgcgagcaaatggacagccacattgccaaagtcaaagctttcgcccccaaaggaggcaatatccgcctgatgttcctgaccgaccagcagtggggcaaaagcgccaccatcatcggccccaactacgatcaaggaagccgggagatcgacccggccattccggaacaggtggaattctgggaataaaaaaggccccgcagtgacgtgcaagcagtggtcactgcggggctaaatcagttaagacttcactccccagaaaagtctgttgcaagtctttatccagcagcgctttccgtcaagcctattctgagcgacttctcaggggagtgaagtcaaaactaaacgtttgcctagtgcgcgatgctctggattctgagcgacttctcaggggagtgaagtcaaaacatgagtaagatgagggatagtccatccctgattctgagcgacttctcaggggagtgaagtcaaaactagattgtagatttcattaaaagtctttcgattctgagcgacttctcaggggagtgaagtcaaaactctcattccaatcatttgcttctggcaaaaattctgagcgacttctcaggggagtgaagtcaaaactacgccgtctttcttatctgtttgactatcattctgagcgacttctcaggggagtgaagtcaaaacgggcgcggcgagcaggcggtggtgcggggcattctgagcgacttctcaggggagtgaagtcaaaacaacacgggcgcgaccgcggccggggtgcgcattctgagcgacttctcaggggagtgaagtcaaaactccacgctgcgcttcatcggcttcgccggcattctgagcgacttctcaggggagtgaagtcaaaacattcgatgccaaactgatagaggacgcgcaattctgagcgacttctcaggggagtgaagtcaaaacactttgcggctttgacagccatattgttccattctgagcgacttctcaggggagtgaagtcaaaacaagtccatgggcgccaaggcccgcaacccaattctgagcgacttctcaggggagtgaagtcaaaacgggtccatggacacccattctgccggattaattctgagcgacttctcaggggagtgaagtcaaaacccgggaggcgccccggttgtccggcagctgattctgagcgacttctcaggggagtgaagtcaaaactgctttgatccagttccgctttcggagtttattctgagcgacttctcaggggagtgaagtcaaaacttcatccagcgccattgttttgagatagccattctgagcgacttctcaggggagtgaagtcaaaacccaccaccgctttcctccgcattgaccaccattctgagcgacttctcaggggagtgaagtcaaaaccgcaagcatggcgcgacgcaggaccagctgattctgagcgacttctcaggggagtgaagtcaaaacgggggtgtaagaaatgaccacctcgcctttattctgagcgacttctcaggggagtgaagtcaaaacctaacggtcgcattgcttgggtatggcgccattctgagcgacttctcaggggagtgaagtcaaaacgggtgcggccaaaggctgctttccctcgcgattctgagcgacttctcaggggagtgaagtcaaaacaaagtgaagacggccggccgttccaaaaaaattctgagcgacttctcaggggagtgaagtcaaaactgcggtcacgtcggcttggtcgcgaatcaaattctgagcgacttctcaggggagtgaagtcaaaacgcacaaaacggagtcgatccggacgcgatcattctgagcgacttctcaggggagtgaagtcaaaacctgcgaggtggatggtgcgcattcgcagggattctgagcgacttctcaggggagtgaagtcaaaacttcgtgccagcctcacgtcatcctgaaggacccgctgtggcggggaccgatggaaggggcgcacggccccagatcaaacccgcaatgggcaggcgcaaggaaggcccgccctcaatacacaaaaatctcgccggactggaaaaagcgcttcagttcgatcgcggcgttttccggggagtcggaagcgtggaccacgttgatcatgacggtcttgcccaggtccccgcggatcgttccttggggagccttggtgctgtcggtcggcccgagcagttcgcggaccttgtcgatggcgttttccccttccaaggccagggcgatgaccggagtggactgcatgaaagcgcggatttccgggaaaaacggcttggaggcgacatgggcatagtgctcgttgaggaccgcatcgttgagctggatcattttgcagccgcggattttgaagccggccttctcgaagcgcccgatgacctcgccgcagtgggcgctttggatgcagtcgggcttcaggaggatgagggtttgttgcatattggcgtgaaacgctacacggcagcgggggattgaaaagcggaaagcgggggatgaagcaggcggcggacgatggcatcgaaggaatccagcgggtcaagcaggcgaatctccacgcgcaggaaatagacgggcagatcgcgccggtccacgcgggggaagcggacggagtctttctcggtggtgatcagggcatgccccccgcgggcacgggtgcggttgatggcgttgagcacttcctgctgggtgaagcggtggtggtccgcgtagtggcgcgtgtagatgagcgtggcaccgagcttttgcagcccgccatcaaagctttcgggcacggcaatgccggagaccgcccccacgctgcggccctgaaggtagtccagaggcatcatctgcccggtgtaaaggtcctggagatggagggggacatgcgcgcactcggccatcggggcatggcggttgtagcggcgcagttcctgtttcagttccgcaatgtcggaaccatcacatttggtgatgaagatgaagtccccccggcgcaggtggtccttgggctcgcgcagggtgccgcgcggcaaaacatggcggttgccaaaaggctggtgccggtccaccagcaggatgttgatgcgttccttgagcggaaggtattggtagccgtcgtccagcagcagcgtatcggtgccgaaacgctcgatggcgtaggccgcgctgcggacgcggttcttgtccaccagcacgacgacgtcgcgcagattgcaggcgagcatgaatggctcgtcaccggctttgcccgaatccaagagcagggatttgccatcgctgaccaggcggggcggatcggccggacggcggagtacgaggcggttccacagcttccgccacagcgggaccggcacgcttttgtagccgcggctgaggatggccacgcggcgcccggcacgggtcagggcccgggccagctgctccaccaccggggtctttcctgtgccgccgaccgtgaggttgcccacactgatgaccaggcagccgggagcatggacccgcagcagccggcgctcgaaggcccacccgcgcaggcgcatgatctgggcgtaaacgaccgagagcacgcgcaggaaagcacggagcagggccgcgcgtttgccgtagcggcgctccaaaatgacatcgatggcgaagcgctccaggcgctccatgggtttgtcggccatgaagcgggaagattcccctgcccggccctccgggtcaatcgcgcgccgctcaggatgtgaaacgccgcttcccccattcccaaaaccgggtagcttgagcccatggaacgcgtccaacttgaagccatcgcccgccgtgtcgtcgaatcctgcctcgacggcctgcccgatgatgtcgcctctcatgcccgccgggtggccgtggtgctgcgggatgtttccctccgttccgaccatcccgacatggcccccggggagctgcttggccttttttccgggctggcttacggcgagggcgagccgcggacaccggatgaaatgccccgcatcaccctcttcctcaacaccctctgggaagaatccggctctgaccctgaggctttcgaagaagaggtcgagaccaccttcctccatgaacttggccactacctgggctgggacgaggaggacctggaagaacgcggcctggattgaacccaagccgccgcccccccccccgcattcggggggtgacttttcccgcgattccgcatatattagccaacctgccatgaagtccctgatccggagcctcctctacgccgccactgccctgccggtgctggctctggccccccgcaccgccgagaccgcccccgagcccccgcccgccgccccctccacggcccaggcaccggccatggacccgaagttccgccaggtcgccatcatctttgccaaattcctcgaacaggaacacttcgccaaacggcccatcgaccaaaccctggcccgcgagtggatcgaagcctacctcaaagacctggactacgggcgcatgctcttcctgcaggccgacgtcgatgaacttgccacccgctacggcaccaccatcaccgccgatctcaaacgcggggaaatttccgccgcgtatgaaatcttcagcctcttcaaccgccgcctcgacgagcgcatgggctgggtcgaagcccggctgaagaaacccttcgacctggccaaggatgaaacttacaacccggaccgcaccaaagcggcctggcccaaagacgccgccgaggccgatgcgctctgggagcgccgcctgaaaaatgaattcattgccgagcgcctggcttactccgacaagaccgacaagaaaaaggacaagaacgccgaatctccggcccagaagctgctcaagcgctacgaacgcttccagaaaaacgtcgccgacatgaccactgaggaagtggtggaatactacctttcctccctggcccgcatctttgacccccacaccctctacctgggcccggacaccctggaagacttcgccatcagcatgaagaactccctcttcggcatcggcgccgtcctccaagttaacgatggctattgcaccatcaaagaagtcatgcccggcggccccgctgccctggacaagcgcctccagcccggcgaccgcatcaccgccgtctcccagggcaaagccgagtatgtcgatatcgtggacatgcgcctgcgcaacgccgtcaaactcatccgcggccccaagggcagcgaggtccggctcaaagtcatccccagcggcgcccccgacaccgtgcgcagtgaaatcatcctcgtccgcgatgaaatcaaaatcaccaaccagcgcgccaaagccgagatcatcgacctgcccgcccgcaacggagccgcccccctgcgcgccggcataatccaaatcccgtccttctacggcccgatcgaccgctcctacaccggcgaaggccagtccagcaccaccaccgacgacgtgcgcaagctcatcacccgcctgaaagaagaaaaagtcgatggcatcgtcctcgacctccgcaacaacggcggcggactgctcagcgaggccgtcctgctcaccggcctcttcatcgaccgcggccccgtggtccaaatcaaggactcccgcgggcgcaagcacgtcctcgaggacctcgaacgcggcaccgcttacgacggccccctcaccatcctgaccaacaaaatgagcgcctccgcctcggagatcgtggccggcgccctgcaaaactacggccgggccgtcgtcatcggcgacaaaagcacccacggcaaaggcaccgtccagaccgtccaggaactcggacgctacctcaacaccttcggcccctcggccaacgccggcgccatcaaaatcaccatccagaaattctacctccccaacggacactccacccagatgcgcggcgtcatccccgacatcgtcctgcccaatcccaacgattatctcgaactgggcgaagaccgcctgccccacgccctggcctgggatgaaatcgaaagcgagcgcttcgccgccggcaaatccctggcccagggcctgcctctgctccaggaacgctccgccgagcgcatccgcaccaacgcggaattcgcccgcctcgcccaggacatcgaccggctccgcaaccgcctcgaacagcccgaagtcagcctcatcgaggcccagcgcgcccaggaacgcgccgaagaaaaagcccgccgtgaggcccgtgaagccgacctcaagcgcctggctgaatcttcccccaaagtggtgcgcatcaccttcggcaccgatgagtcgctcaaagtcaccaccgcggatgagcccgagccggacgctcccgccgccccggacgaatccgaagacggcgccgcgcccaagctgacccgcggcgagcaattcgcggccgatctccacctccaggaaacgctccgtgtgttaggcgacctcgtcggcctggcccagggccaggacaagccggccgccgtggccgcccaagcccctcccgcatcctgacccgcacgcccacggaccccatgcgccccaaatcatcccgggtcgttgacctgacccacagctaccagaagcgcctcttccctgggccgcgccgggtcgagcgccactggaccagttttgactggaagcgcttcttcggctgggccaatgctgcttggttcctcatccttggcgtggccactatcggcgtccaccaggccaatgagcgcgccgcccgctaccgggccgagctggaatccaccgcagcccaaaccaccgagctgctgcaggaagtggaacggcttcaggaactccaccaatacaccgccggacgtgtcctccacctggcgcgggacatgcaggacatcctcctttccgcccgcggagaagagcgggatttcctccgcgccctcattccgggcgccctccgcctccaaaccgaggcccgcgttccagcctccgccaccctggccatggccatctatgaatccggctacgggcgcagcgaactggcctcccaccacaactaccatggcatgaaagctttcgaaggcgcctggtccggcccaaccatccgcaccatgacccgcgacagcggacgccgggtcatggccgactttcgcgtttttcccagcacggatgaaggcatccgcggcttcgggaccttcgtccagcagccccgctaccgggccgccttcgctcatcgggatgggcccggcttcgtccagcagctgctcagcgccggctactgcccggaccgggactacctcgacaacatccgcaccatcatcgcccgccaccacctccatttgctcgacttgaccccgctggaagccggccccgtgcccgaacccgccgcagcggaagcctcccccgccgccccttcccgccccgcggggtgaaatcctaattactaaccagcagcccgtgtatccagcccgcggccccgcaggcggcaatcaccgggatcagcggcattttgaaccgggccagtgcggtgaaagctgccacggccagcaccagcacaaaccaatccgcctcctggcgctccggccaggcggcatccagcccgaacttcacccccaggttcaggatcacccccaccaccgcagcggtgattgccgtcagcgccgctgccgcccgggggagcgagcccagcttctcaatgtaaggcccgcccagaaagatgaacaaaaagcacggcacaaacgtcacccaggtcgtgatgccggaacccaccaccgccgcggccagggggggaaggctgcccgggtgctgccaggcgccgacaaagccgacaaactgcagcaccatgatcaacggtccaggcgtggtttccgccagggccagccccgccatcatctgcggatgcgtgagccagccgtgatgctccaccgcctgctgggccacatacggcagcaccgcataagcaccgccgaaagtgaccagtgccgccttgctgaaaaacaggccctgctgcaccggcgtgctctccgcccccagccaggccgccacacccagcaccggcgcccaccacagcaccaaacagacccccagcacacgggccgcacggccccaccccgcccgtggcagcggcggcagctccacgcagccctccccgcccaccccggatgccgccactcctttccctgagggaaactgccccggagcccagcgatggcccagcgcacccgccgctgccgccccaaggatgatccagacaaaagacaccccgaaaaagaagatcagcacgaacgaaagcaccgccagcagccata

SEQ ID NO: 363 - DNA, 23216 bp, synthetic construct
  source 1..23216: mol_type = other DNA
  misc_feature 1..23216: note = Synthetic
gacaggttcgagccagatcacatggaaccctgcggaggcgaagccgagggcccagttgtagtaacaccagaaatgccccccgccttcgggatagcccaaggtctgcgccaaaagacaaacggtgggtttttggttgctcatgccgttctctcaggctgccgcgatctgagcgggacgctccgcggggcgcgggtcggcggcatagagcgtgaaacccgcggtgtccgtgatgtccacatcgaggagtttcccgaccaaatcggccgatcccccgaagaccgcgatcttgttgccgcgtgtgcggccggtgagccgtgcgtcgttgtgccggctcgggcccgtgcacagaatctcgacgctgcggccgaccaaatcgcgcaatttctgctgcgcgtggcggttgaccacggagagcagatcctggttgcgatcctccttcacatcctcgggaagttgcgcctccatggttgcggccggtgtgtccttgcgcggcgagtagcggaagacgaaggcgttgtcgaaggcgatctcgtccaccaaggcgcgcgtggcggcatagtcctggtcggtctcgccggggaagccgacgatcacatcggtggtgatggcgatctccgggcaattggagcgcagcttcgccacaagagcgcggaacttggccgccgtgtagccgcggtgcatggccttgaggatgcggtccgagccggactgcagcggcagatggacatgctcggccagcttggggaggcgcccgaagcagttgaccagatcctcgcggaagccgatcgggtggggggaggtgaagcgcagacgttcgagaccctccacgtcatggacggcctcgatcagttgcacgaacgggctgcgtccgtccaccttggggaactcatggcgcccgtagagattcacgatctgcccgaggagcgtgacttcgcggcagccgcgggcgaccagttcgcgcacctcgccgacgatgctgccgatgcggcggctgcgctcggcaccccgcgtgtccggcacgatgcagaaggtgcagcgcatgttgcagccctgcatgatggagacaaaggcgcttgccgggacggaagcgtggtcgcggatggtctcctgcgagtccgcctcatcctccgtgtccacgatggacatcttcaggtcgtccatggccggatcgtgagccatcttgcggcgcaggatggcatccacgtggtcggcgacccggtggaacttctgcgtgccgaccacgagatcgaggtgggggacctcggcgaggagggaggcgccgcggctttgcgccatgcaaccgaggaagccgtaaaccgtgtgcgggcgacttttttgcaggcgtccgaggaagcccattttgccgagggccttttgctcggccatgtcccgcacgctgcaggtgttgagcaggacgacgtcggcctcggtcgcgtcgctcgtcatttcatatcctttggccaccagcatctgcgcgacctgctccgagtcgcgttcgttcatctggcatccgtaggtcttcagaaacaccttgggcatggtgcacggaacatacggatgccgggcgccgtttgccagcgcacagcgtcgcgggttgacacggatgccggggttccgcagggtccgtgggtatgcggagggtggtcctgatggcgctggcgatggccgccggtttcccggcggtggcggcagcccacttgtcggtgaaggttacggatgaggaggggcagccggtggaaaatgccgtggtcacgttcttccccgcgggtggcgccccggctgtcgcgccgcgcgatgccgagatggtgcagagcgggaagcgtttcagcccgtcgattctggtggtgccggtgggcagccgggtgaagtttcccaaccgcgacgaggtggcgcaccacgtctattctttttccagtccgaagaaattcgacctgccgctttacgtcggtgaagccgtggcacccgtggtcttcgaccggcccggcgtcgtcaccctcgggtgcaacatccacgattggatggtggcccacattttcgtcagtgcgacgccgttccacgcggtgagcggcaccgatggccgggcgcatctgcacggggtgcccagcggcggcggcgtcatcgaggtctggcacccgcggctccggggcaaaccggtcagcctcgagcgtcccgcagaaggcggcgatgtgccggtggcggtgctccggctgcgccccgaggtccagcgttccgaagcgccatccaaccgtcgcaagtccggcggctaccggtgagggcatgacgcggttccgcgaccggctgctggttcacctgttgctgctgctcgcggtggtgctggggtgcaacttcctgttggtgcgggtggtgaaccttgagaatgcacgacggacgatcgatgaggaccttcactccgccgcggaggttttcgatcgggtgctgcgcctgcggttggacaaactgcgcctgggggcgaggctgatgtccgacgactgggctttccgccgcctctacggggggaccgaggatttcagcgatccgctgcaacgccggacgctggtgtccggactggaaaactaccgcacccggatgcgcgatgccgccttcctccagctcgtgtcgcccgatgatgagttgctggccgataccatggagaccgggcagacggcgccgggacccttcgccttcccgatgctcctgcgagccgccgaggaggctgatgattacacggccgcgcgtttcgaagcgcagccggacggttcgctggcgctgctcgtggcggtgcccctcctgctgcccgagccgtccggatggatcgttgcggggttccttgccgacgaccaactggcggcgaacttccgaggcatgaccggagtcgaggtgagcttcgttgcggagacggcggctggtccgcagttggtggcatccagcctggagcccggactgcgggctgagatgagggaggccttggacgctgcggggagcggcgcgcgggggctgttcgacctgagcgtgtccgacgacgacacatggatcagcacatgggcgacccttccggggggcggacaggcgaggggcctgttgcaacaatcgctttcccgcgagttggcgccgttccagcggctcgaggccaccctccagtggctcacgctcgcggcgctgctggtttccgccctgcttgccgtctggctggccctcggcatcagccgcccggtggccgagttggcccgcggcgtgcgccggatcgccgagggacgctacgatgagcctgttgttgtgggggcgcgcgatgaaatgggccagctggcttccgcattcaacggcatggcgcgcggcctgcaggagcgggatcgcgtccgggatttgctgggcaagaatgtgtccccagaggtggcggccgagttgatgcgccgtccggcggccctcggaggcgaagagaaggatgtgacgatcatgttcaccgacgtgcgcggtttcaccgggctgagcgaggcgtccgtgcctgcagatctgcttgccactctcaacgggtatttcaccgaactgacccgcgtgatcgaggcgcatggcggcatcgtggacaaatacatcggcgacgcggtcatggccgtcttcggggcgcccgttgaaacctcggaccatgcgcggagcgccgtcgcgtgcgcggccgaaatccgccgtgtcctgcgcgcctacaatgccgcgcgtgccgaggcaggtcaggcgcgtctggacaccgggatgggcctggccagcggcaaggtggtggcaggcaacatgggatccgccgcccgttacaactacacggtgatcggcgacacggtgaaccttgccgcgaggctccaggacgagaccaaggccttcaaggtggactgcgtgatcgccgggagcaccgcagcccgatgcggtcacccggagtggctgcggccgctcggggaagtcaccgttcgcggaaagacggaggccgtcggggtcttcacgctgcgcgacggggcggcttgacggtgcttccggctggattgtgcgcggggatttggcagtttggcggcatgtggattgtctatgcgttctcggcggcggtgctttggggtgtgagctatgcggccagcggccgcgcgatcgatcgggggctgacgcctctggcgcttttcttctgctacgccgtgttcagtgcggccgcggctgcggtggccttgggcgccaccgggaagatgtccggcgttgcccttgaggtgaggggactcggcgccgactggatatggctggtcatcgcggtggtcacttcggcagcgggtgccctgctcatctacatggcgatcggcgagaaaaacgcaacgatcgcgtccttgatcgagatttcctatccgttcttcgtcgcggtgtttgcgtggctgtttttccgcgagacacagctcaacctcccgacgctcatcgggggtgtcatgatcctgggtggcgtgacggtggtcttcgtggccaaccggagttgagcccgcgttgcgccatcattttggttactttgtcgagcggacaatgacggcgctgatgtcgccgatcgacaccgtggcctcatacatctccatgccggtgagggatgagagatgaacaacattgtcgcccacgagcgtgaccttgccgccgattttgccgccggagttgagtagaagctcgaccggcttgccgacctgcgactgcagcacggttgcctgtgtgctgtccttggcaggttcgagggttccggcattggcgctgagggtcatcgcagaaatgagggcgaggagttgcagtgttttcatggcggccgagtttatgagcggtcggaggggcgaattccagccgggatttgcaccccggaacggacgcgggccacttgattgtcggtgccgggaaggctaaaaattccgcatcaatgaagggcatcatccatcttgccggtctcgggctggcatgggcactgctgaccgggtgcgccagcactctggattctcgggttcagatgctggagtttgggatgagcaaggagcgggtcattcaaactctcggtgtcggccaccgcacggtcgccgcacgggaggattcgaccaatgtgcgtgtggaggtgcttcgtttcgaggaccccaagtggggggaggtgctcgtttacctgcgggatggcaagctcgttcagtggggtgatgtgagggcgttggagagcatgccgcagtagttttctgcgtggcgggggagcatttgggaggcctcccattgcggccgcggcttgcattttcccgtgtggccggacgagatacgcgcatggagagaccagccgaactcgggttccgcatgccggcggagtgggagccccatgaagccgtgtggttctcgtggccgcacccgggagggataagtttcccgggggcctatgagcgcattccgggagccatggcggcactggtccgggccgcggcggagttcgaaccggtgcggatcaatgtgatggacgcggacgaggaggccgaggtccggcggcatgtgggccggtgtgatgccgtggagtatttccatgtgccgacgaacgagccgtggtgccgggaccatgggccggttttcctcgtcaacgacaggaccggggaggtggcggtggtggatttcgacttcaacgcctggggggggaaatacgagggcacagaccatgatcgaaaggtgccgtcgcgcttggcggaacggctcggcatgcggtgtttcacgaacccgatggtgctcgagggcgggtcgatcgaggtcaatggcaccggctcgctgctgaccacgcggagctgcctgctcaacccgaaccgcaacccgcatctctcgcaggcgcagattggggaaaacctccgcggttggctcggcgcagggaacatcctctggcttgacgacgggatcgagggagacgacacggacggccatatcgacgatctcacgcgcttcgtggcccaatcccgcgtggtgaccgtggtggaggatgacccgcaggatccgaaccatgcgatcctgagggagaatgtcgccgccctgcagactttgcacgacgaggacgggcagcctctggagattgtctcgctgccgatgcccgcgcgacggctggaatatgagggccagcgtttgcccgccagctacgccaatttcctcgtggtcaacggcggggtgctcatgccggcttttgatgacccgcgcgacgcggaggcggcagcggtgctggcgactctgtttcccggacgaaaggtcgtgccggtggactgccgcgacctgatcatcggcctcggctcggtccattgcctgagccagcagcagcccgccccgccgcagtcttgactcgacggacgggggaacacatcctcgcccaccccagaaaacaaaggagccaccgtggatatcaaagaaatcaaagccctcatcgatttgatgaagaaaaacggccttacggccttcgaaatggagaaagacgggttccgtatttccctcgccaaggagtctgcttaccagcccgccttggcctatgcgcccgcggctccaccggctccggtggccgccgccccggcacctgctgccgctccggccgcccaagaggcgaagcctgcagcgcccggcaaggaaatcatctcgccgatggtcggcaccttctacctctcgccgtcgccggaatccccgccgttcgtgagccccgggcaggaagtgaccccggacacggtggtctgcatcatcgaggccatgaaggtgatgaacgagatcaaggccgagattgccggcgtggtcaccgaaatcgcggcagagaacggacagccggttcagttcggtcaggcgcttttccgcctcaagtaaccgcgcaacccccgcgccggttccacagcgaccatgatcaaacgtctcctcatcgccaaccgcggcgagatcgcgctccgcatcatccgcgcctgcaaagagctcggcatacgaagcatcgcggtctattccgaggccgacatcgattccctccatgtgcagctcgccgatgaggcgatctgcatcgggccggccccgagtccgcagagctacctcaagatcgaccgcatcatcagcgcggccgaaatcgccgatgccgacgccatccatcccggctacggtttcctggcggagaacgcccacttcgccgaggtctgcggcagctgcaagatcaagttcgtcggaccgtcgcccgaggccatccgcctgatgggcgacaagaacatggcgcgccagcaggcgatcaaggccggggttccggtcacacccggcagcgacggaatcatcgagagcgaaggggaggccctgcgcgtggcgcggaaaatcgggttcccggtgatggtcaaggcggtggcgggcgggggcggacgcggaatgcgtgtcgcccacaacgaggtgaccttggtcaagggctaccacagcgcgcgcaccgaggccgagaaggcgttcggcaacccggcggtttacatcgagaagttcgtccagaatccgcaccacatcgagttccagctcatcgcggacagcaagggcaacgccgtgcatcttggtgagcgcgactgttccgtgcagcgccgcaaccagaagatcatcgaggaatgcccttcgccgatcatgaccaaggaactgcgcaagaagatgggagacgcgtcgctgcgtctggtcgaggcggtcggctacgagaacgccggcacgatcgaatttctcgtggacgaccagggcaattactacttcatggagatgaacacgcgcatccaggtggagcacccgatcaccgaggaggtttacgggtgcgacttggtgaagcagcagctccagatcgcctccggcgagcctctttcccaccatgtgcttaacgcggttccccgccaccactccatcgagtgccgcatcaatgcggaggacccggagaacaatttcgcacccagccccggcaccatcgatctctattacgcgccgggcggccgcggcgtccgcatcgactcccatgcctacgcgggctacccgatcccgccgaactacgattcgatgatcgccaagctgatcgtccacgcctcgtcacgcgagcaggccatcgcccgcatgagccgcgcgctcggcgaatacatgatcacgggcatcaagacgacgattcccttccagcaggagatcatgcggcacaaggatttcatcgccggcaaatacgacacgggtttcgtggagaagatgctggccgaacgcgctccgaaaaagtgaagccgctggccgccgcgcggctctacgggattgtggatctgggctacctgtccgccgagacggcgccggtggcggccgaacgccttttggaagggggcgtggatgtccttcaactgcgcgccaagggcgccccgctgcaattgatcgcggacttggcccgggagattcatgggctgacccgggcggccggggttccgctcatcctcaacgaccaccccgggctgttgcgcgacgttccggcggagggggctcatgtcgggcacgatgacatgtccgtggccgaagctcgccgggctgccggacgggagtgcctgatcggcaaatccacccacagtttcgagcaggccctggccgcggcagccaatggggcggattacatcggcttcggtcccctttttgccaccccgaccaaaccggggcgcctgcccatcgggctgggggacatcgccaaggtgtgttccacggtgaaaatcccggtgttttgcatcggggggatcaagccggggaatctgcccgaggtgatcgccgccagcgcgcagcgtgttgtcattgtgtccggctggcttcaggcggatgatatccccagcgccgtgcgtgcaacccgcgcggcattcacaccatgaaagttgtctgctcccccgaagtgaaggccgccttggatgccgggcgtccggtggtcgcgcttgaatccacgatcatcgcgcacggcatggcctatcccgccaacgtggagaccgcgtgcgcggtggaggatgtcgtgcgcgagaacggagccgtcccggcgacgattgccgttctgggcggagtgttgcgggccggtctgacccccgaggagatcgagcgttttggaagtgacggacctcagatcatcaaagtctccgtccgtgatcttccgtttgtggccgggaagcgtctcgacggggcgaccaccgtagcggccacgatgcggatcgcggccatggccggcatcccggttttcgccaccggcggcatgggcggcgtgcatcgcggcgcggaggaaaccttcgatgtctccgccgacctcaccgaaatgacgcggagcaacgtggcgctggtgaccgcgggggcgaaggcgatcctcgatctgcctctcacgctcgaacgtctcgagaccgacggcgtcccggtgatcggctacggcacgggggaattccccgccttctattcgcggtcgagcggcttgaaggtgcccatgcgagccgacaccccggaagacgtggcggccatcatgcgctcgaagtgggagctcggtttggttggcgcggtggtcgtggcgaacccgatccccgaggaagacgagattcccgcctcggaaatcgaaccggtcattgcgagcgccctgcaggaagccgcacgactcgggatccgcggcaaggatgtgaccccgtttctgctcggggagatcgtccgggcgaccaagggtcgctcgctccaggccaatatcgctttggtgaagaacaacgcccgcgtggccgcgcagatcgcgacggcgtatgcgaagggctgaagggctgattaccggcgcaagggtttgcgccgcattccagcattctgcgctttacgttccgacctcttccttttcgttcttccgcctttctgtgtcataaacccgagttgggcttgaatgattggcgatttgcgcgcctcatgtctggcatgtcgcgctcacgtcgctctgacactctggttgggttgatcgtgatgaagcggagcgtgtgaacgcagaaccaaaccatccctcgaacatcctatgaataactcgaacgaagccccagccaaccgttacgtgtggtcatttgatatcggaatcggctcacttggcgaggcggttcgcgaagagagcaccagcgagttcaagcatgtggagtctcttttgctgcctgccgagtttgccgggacgaaggccgcggctattgccagacgaatgctgaggtcacgcaatgcacacaagaagcgtgaggagtggctggagaaggtttggagggagtcgggacatgaaccgcccgcgacaaggacgacatggcgcaacccacaaaccggtcgttacgagttgaagtcacccggcgacccgcgattggagagggagtttcccgcaaagggtgagagcacctgctacacgtcctgcctgctgaggatcaagcttctcctcggtgaggcgctggagccttggcaaatctacaaggctttgcgatccgccatccagcgccggggctacgatcccgacatcccttggaaggccaaggccctgagacatgcttcggccgatgagttgaaggagcatgaggaagacaattcgaggctgttgcggtttgaggcagagttgcgcgagatgacgacggaggaggccttctggcttccttgctatttcgatgcttggaagatggggctctggaatccgaagaggccggacaagctctcgctgcgaatcgactgccatgcccgcagtccccggaaccacgttattccccgcgcattggttgaaaaggagctgcacctgcttgtcgcagcggcggccaagttgatcccgggacttcgaggcaaggaggcctgcctgctccatggaccggctggccgcccctacgcctcatggtatccggaactgaggaaggcgcatgggctccgtcttggcagtcataccgacacccaaggcgttttgtcgcagcgcattccccggtttgacaatcggatcatctgcaagtgcgccctcattccgcggttgaatgtgtgcaaaatttcggcggaaaccgccacgaacccttcaccgcagagccgtgttgtctttgattcagttttcttgctgaagctgaagaacatgagggccgctcagcccgatggcatgcaacgcgccttgaggccggaggagattcgggcgatttttgatgacccgaagcgcaagacttggtccttcaccgcgaaacaatgggtccgcgccatggcaagattcggccttgtgcccctgaccggccatgaggaagtgaagccgccccgcaccggcgggcgcagccggttctgtcggccggcgttggaaatcctcaagcggttgattctctcagggcaggccccgagccggtttcatgccgatgagttggcgcgtctgggtgggaacgccgacccgctcaaaggtctggtgccgtccgacctcgagttccttcacaagatgggtgacagctgggagacgctgcacgttcccgaccagcagcttgatgcggtgttgcagatggcgtcctcgccgggaatggcggtccgggaaatcatcggcaggcagaacaaccccatcgtccgccaccgcctgcaactcttctttgagagattgcagcaattgcgcgtgcagtttggggaaccacagacggttgcgctggaatttgtgcgttgggacttcatgggcgagaaggcgcggagggaatacagcaaattcaccagcgggcaggcgaagctgcgcgagcaatcgcgcaaggatgcggaagccgctggactttccggcaagggagcggccctcaagctgtccctcttcaaggaacagggtggcatctgtctttacaccggcgagcctttggatgtggccaagatcgattcgtatgagatcgaccacatcgtgccgcactcaagaatgggaccggatgccccttacaatcgcgtgctgaccacgcggcacacaaacaaggactcgaagcaggccatgacaccgttcgaatggctctctccatcacccggctgggaggcctacctgcaacgcgtgaagggccggtcatcacaactgcgcagccgcaaggtgcgcttgctcacctcgcaggatgccgaagagttggttgagaaatacaccacgctggcagagacggcatggatcagtcgtctggctcgcgctgttctcgacgctaccttcggatggcgcaacggcgtggacagagaaggtcgcaaacgcgtggttttcgtccaaggcggtcttaccgcacgcatacggcgcaaataccgcctcaacagtcttctggctccgcccccagccgatgctgatccgatggagtgggaaagcaaggcggagaagaaccgcagtgacaaaaggcaccacgcgttggatgccatggtgatcaatttcattccccagtgggtgcgcaacgaggcgaaggaacgatttttccgctttccgaaggccttaggcagcaacccgcgagcggcccttggggcggtcatcgaccgggttgctccgcgacaggtggcttttgagaaggccgccttggctgacaccatcttcggagcccgccgccgtgggcccgaacgcaccatcgtgcagcgatgcgccctcctttccctggccatgagaccctcagctcccggaaagtcggttttcgacgtcggatatctcaagaagcagatcaaggccgtccgtgatcccaagattcagagcatcctcgctgcggttgccaacgaggatctgacagaggagggctggcgcacgttctgtgaaggcttgcatgtgccacggagggatgggacgcccggccctcgtgtcattcgggtcaacatgaatgtcggtgagccggacgaatacgccgatctttcgaaggatgggaccggggcctaccggcgcggaaaggacgggcaccgcgggcagattttgtattcggatgcttcggggcgaccgtgcatcgcgcccatctacgcgcatgcctccgtggtcgggcagacgaggcttttgcgggagacgcccgggactgtcattcatggattcgtgcagacaggatgcttggtttcgctgacccgcgaggtccccgcgtctggctaccgcaggatcgagctcaacgaggccaagaaggcgaggagggtgttgcctgaccggagtctccccgctggcatctacatctggcgcacggttcagacggcgaacgggcaggtcgtgctggaggaacccaacggcaagcgcgttgccctccacctgcgcgccctcttggttgcaggcctttcgagggtttgaggggccttttcgtgggccatcacattgtccatgtagtttcgcacggggcacggctgcttatggaaaggcagcagttagtatgcctcacgccggaagggaacaggagacgcctgcctgtgcaggacttgcgcgcggttgtagtggcggctcgcggagtgtctttcagtgccgaggcgatgagtgccatactcgacgctgacgctgtgattctgcacagcaacgccagatacaagccatgcggactttccgtgccgctgtttcgtgtggccagccatgaggctttcttgggtcaaattcatcatcgcgcagggttcaacgaccggttgtggcgaatcatcctcgtcggcaaactcgcaaaccaagccgcttgtctccggttgcttggcatcccaagcgcctttctggagaatgcgtcacagtcgaaatgcccacacgagggcaactgtgccaggcactattggcgacgacttttcagcagcctcggctggcctcgactgcggcgacgggagcagagggacgaaccaagtccaaaccacatgttgaactatggttacgctgtcatttccgcgctttgtcaccgcagcttgcttgtgcatggattgcagcccgccatcggactccatcaccgcagccgttaccgagccattccgcttgttcacgacttcgtcgaaccgtttcgtgcttttgttgactcggcgatggccgcgcacatccgcacacatggcacggatatgtccagttgggcccgatccgttgcgcaggcactcagaaaccaccgcatccagcatggaccggggagcatgaagctgatggatgccatcgataaggcggcatcctccttggcgcgagcctacgccaagcacgatgctacagagctttggttgccggtgatgggtgccccggcatgaacagcagttttcgcatgggttggattcttgtctctttcgacctcccggtcatgacagaccagcaaaggaaagctgcgaccgggttcaggaatgcgctcttggaggatggttacatgatgctccagttttccgtttatgcccgcgcgtgcgtcagccttgagcggttggagaggcacgccttctacctgcgatccatcgcgcccaccgccggaaacattcgtgtcttctttttcacgaaccagcagtgggctcgcagcatgagcatccatggccagaactatccgcaaggaaatcgggtgcttgatcccacgatgccccagcagattgagttctggtaaaaaaagagcggcttccggacgtgcaagcagtggtccggaagccgctttttcagttaagacttcacccctcagcaaagtcgactcaaagactacaacgataggtctttctgtcaatcagagtgtgtcagacctcgctgaggggtgaagtcaaaaccgcaggtgcgccttcgcctcttccaaagagagtgtgtcagacctcgctgaggggtgaagtcaaaacatgtccgcctgctttgtgaacatgcggaggcagtgtgtcagacctcgctgaggggtgaagtcaaaacgggaacagttgagggatgagagttgagagaagtgtgtcagacctcgctgaggggtgaagtcaaaacaagtccgattgttgagctatggtcagtggcagtgtgtcagacctcgctgaggggtgaagtcaaaacagcgggtttgcctactcgctggccggcgacagtgtgtcagacctcgctgaggggtgaagtcaaaacaagagccactcgaactccatcgacgccaccagtgtgtcagacctcgctgaggggtgaagtcaaaacacccagcgtttgatcgtgcggtcgctcgtaagtgtgtcagacctcgctgaggggtgaagtcaaaacaaccaggagtacttcgatgcgtggatggaaagtgtgtcagacctcgctgaggggtgaagtcaaaacttgtgtgtagtgtgtttgtggttcgcttctagtgtgtcagacctcgctgaggggtgaagtcaaaacattgctggcgcgagttcgtgaaagaccttagtgtgtcagacctcgctgaggggtgaagtcaaaacagggagtgcgtgcggaagtagtcgtccggcagtgtgtcagacctcgctgaggggtgaagtcaaaactatccgacattcgccgccgcccaccgcgaaagtgtgtcagacctcgctgaggggtgaagtcaaaactgctccgtggggcgcgggaaatccgcatagagtgtgtcagacctcgctgaggggtgaagtcaaaacgacaactgtgtttccgtggaagacgttggcagtgtgtcagacctcgctgaggggtgaagtcaaaacagccaatgcatccgcaatcagcgccgctggagtgtgtcagacctcgctgaggggtgaagtcaaaacaccttccaccacggccgcaacgctctggatagtgtgtcagacctcgctgaggggtgaagtcaaaacagtgcgacgacatgagcgtcaaccagccctagtgtgtcagacctcgctgaggggtgaagtcaaaacgtctcggggcgatcctacctgcgcgggtcgagcgtgtcgcgcaggcggtcgccgaggtagttgagcgcgagcagggtggcggacatggtggcggcggggaagaacaggagccaccaatagattttcaggggattgatcgattgcgccccctcgctgaggagcgagccccagctcgcctggggtggctggatgccaaggccgagaaagctcaggaaggattcgtcgaggatcacagcggggacggtgagggtgagatagacgatgatgatcggcaaaatgttcgggagcaggtggcgcaggatgatttttgcgtgcgattgtccgaggacgagcgccgcctgcgtgaacggacgctctttgagcgcgagaacctggccgcggacgatccgtgccatggtgagccattcgatgaggccgagcgtgatgatgaggatgacgatgcgcgagtagctcatcagccagggccaatcgacctgcgcggcgaaattccgcacgtgcccgtcgaacgcattgatgaaaatcaggatgaagatcagccgcggcaccgagtaaaggatgtccacgagacgcatcatgacgttgtccgtgcgtccccccgcatagccggcgatgagcccgtaggccgacccgaggaagaggctgatcaacgcgccggccagaccgaccacgagggaaatccgggcgccgaggagcacccggtagaacacatcgcgtccgttcaggtcggtgccgaaaggatgggcccatgacggcggtgcatattggagcgggccgggctcgcggtagctctcggggaagagttcgggcccgatggccgccgccaaggcgacggccgccaacaccgccaggcacagccgggcggcggggcgacggagaatccgggcggctgttccgggctcaaccatcgacgcggatgcgccggtcgagcagcgcgtagctggcatccaccagcaggttgaagacgatcagcatcgagcaataaacaatgaccacgccgccgaggaggaatccgtcgcggttgaggatcgagtggacgaagaatccgccggcgccggggatgttgaaaacggtttccaccacgatcgagccggtgagcagatgcgcggcgagcggacccatgtaggtgaccacgggaaggatggccacccgcagggcgtgcttgtagaggatcttgcggtccgtcagacccttcgcccgcgccgtgcggatgaagtcctgattgagaacttccagcaggctcgtgcgcatcaggcgcgcgatcacggcggcgaaggggagggcgagcgtcaccgcggggaggacgatctgggccggcgaaccccagccgccgacaggaagccatttcagccagagcccgaaaacaaggacgaggatcggtccgacgacgaacatcgggatcgagaggccgagcagcgccacccccatggcgagccggtcggacaccgtgtcacgccggaccgcggcgaatgccccgagccagatgccggacaccgtggccaggatgaacgcgatgccgccaagcgcgaaggtcacaggcagcgtctgggcgaggatttcgtttacgctcctgttgcggtatttcgtggagagccgcaagtcgccgcgggccacgtcgccgatgtagcccgtgaactgcttccagaccggaccgtccagtttgtatttggccagaagctgggcctcgatggccggcggaatcttgcgctcgcgatcgaacggccctccgggtgccaaccggatcaggaagaacgtcagcgtgaccacgcagaacagcacgaaggccagcgcgggcaggcggcggatgatcaggcgaagcacgcggggaggctaagaaacagaaccgccgtggggaaggcgcaaaggacgttgtatggggaggagagtgttcttgagagaaaatggcgcatcatgatgtccgcgcttgggcctcgggtttgctgcgcttgcttgagcggctgttagcccggcccctactccaaataagccggagagcggggagggtcccgaccgattgactgttcgccagtttggtagaagctatcaccgtccatctgcagaatgaagacgcgttcgtccgatgttgtgggcttggatttgatcagaatcgtatccgcgtgatcgttcacagagacgttgcctatgatgaaggcctcaaagtcgatgtcttcggacaaataccctccactgaccagcatggtccttacttcggctgcggtgtggagaccgacatccgcaggaaacccgatggtccgtagttcttttgagttgcgctccattgcagccattcgcagaccattgcgtatttgttgtgcttcagatcgcatcgtggtgaaacgtccgcccggacaaatggttccatttgtaaatggcaatgccagcaaggctagagccagcacgaacacaagggacatataccccaagacgaggccggtgatcgccattcccttgccgcggagcagggcgctcttcttgaggcgtccgaggctgacatgaccgcagatgatcgcggggatgcccgcgagaagggagaagcagaggaatgacaggatgcccagcacgagagaccatatcgaaagcggatcggttttggttccatgggtagcggcgctgcccgcgagcgggggtggtttcggatcaagcagagccgaggcgggttgccattcctcaaggcctgtgtgccagcacaaatcggacgctgagaaagcgcccgaggatacggacgtccgcaattcctcaagcgtgaagggcccgtgctgttggccatccttgtggacgaagatcttcatgtgttgcgctcctaaagcgtcatccgcggcttacttggccccgtcggcgaaccactcgagggccttggtcaaacttgcttcgtccatgccgtgggccccatcgtaagaatcgcggcggatgtttttgatgcccagttttttcacggcggcggcgacgtaatccgcgcgtgcggcgtcgatcatcgggtcattcttcccgatggccagatacacggccagatcgcgcacgctgctgcggatgggcttgaaaatggccattccggccgtgaagcgctcgtcacccgagcctcccatgaagacaccctccacgggatagccctgcttgaggagggcgcaggccatcatggaactgcggaggccgcccccggaattgccgccgacgaaataccgccaattcttggcgccggggtatttttcctccaaggcgcggaggccggcgtagatcatggcggcgtgccatgcggcgggaaggttgttttccagcacggggcccgtggcggcgatggcgacccagccgttgcgcgtggccacgccgccgaagcggggcatcgccttgaggtgggctccgccgttgtcgtcggtggagaagaccacgagcaccttctgcggcttcgagggatcgaagccttccggcagcatgaggcccaccgtggcgtcttccggtttggcgccgccgggggaacggccggcaagtttcttttcgtcggcggtgaggggaacttgaaattcctccatcgtgccggaacggccaaggctcctgttattgctgtcttcatcgccttcgtccgttgcggatgacggaggatcaggctcttggggcgtgagggatggctgatctgccgtagtttgccttggtgcggcaagtccgtccatggaggaaacggctcctgccagacggatgtttgaggggtgagacaggacgatctgaggcttccctttgtgggattcgatcactccctcgacgtccacttctttgccttggaatacggacaagtctccaaagtcgccggacccgggcttgaccaccgctgtgaactcgctgtccggatgcggctttccgaagttcaggaaagtcattccgctgcccgtcgtggagacctgtgccaccatccccttcacaaccatggtttcacccatgtgtgcggcggtttcattgattggaatcgcagctttgaggccggcggagcacaaagcgatcgcgatgaaaatccgagtcatgattttcatgccgctttgatgacatccgcgcacgcgggaggcaaacgaattgagggttgcttggagtggcaatgagaaggtggcagcgcgcacgggattcgaacccgtgtaccagccttgagagggctgtgtcctaggcctctagacgagcgcgccgtcgaggaccggaaatttaaccgtgccggcggggttttcgcaacggtatttggacgaggaggttgccgaggggtgattttaatgtttaaatgcgcgactccctcccgcggcgatgatccatcgatcctgatctgcggcgagtcgaggcccccaaagaaatcccccacatgctgaaacgcttcctccccgccgttgttttcttctccctcctgcccggtctggttcatgcggaccccctgtggctgacgccacggcatgaaacgacccccggattccaatacacggcgtcgcctgcggactggcgcgacatcaacatgtatcagattttcaccgaccgcttcgcggacggcgacggctcgaacaatccggtgggtcgtggatggtatgtggacgggaaaagcttcccgcagaaccgcaacttccaccacggcggcgactggaaggggctcaaggacaaccttgattacctgagcggcatgggtgtgcgtgccgtgtggatctcgggtgtgcagatgaacgaccaaggcaaggacacgaactacacaccctaccacatgtatcacccgacggatttcttccgggtggatccggtcatgggcacgttccaagacctgaaggatctgatcgacgcgtgccaccagcgcggcatctacgtggtcctcgatgtggtcatcaaccacacggcggacaagaacgggctgcgcagcggcgaggatgacaagtggtattggccaaacggcggatcgaacttcggctggtggaacgagagcaacaagcacgcgtggccgttcgacgacgtgcagtggttcaaccgcaacggaacgatcaacaactgggacaacttccccgaatacatctacggacagttcaagggcaccgatgacctcgccacgcacacggaccacgtgaagtattggctcacggaaatcttcaagaacctgatcgaggcgaccgactgcgacgggttccgggtcgatgccatcaagcatgtggacgagggttggtgcaagcagtgggcggatgacatgcgcaagcacgcggcttcgctcggcaagaacgacttcatcctcttcggcgaatacttcacctacgacaacaacacgctggcccgttactgcaaggacgccgggtattccttcaactccgccctgttcttccccatgagccagacgatcaagaacgtcttcgtggacggtcagtggacgggtcagctcacgcaggcgcttgcggccaagagccaatacggggagggggagaaccgcctggtcaccttcatcgacaaccacgacgtcaaccgcatcggcctctacatctcgcagagtggcgatgccggccgcatcaactgggtgatggggcccgcgctcaccttcctctacaccgcgacgcctgtgccgtgcctttactatgggacggagcacggcttcaaccagggggggcactacaatggcagcggcaagacgcaggacaatccggacgacggcgactggcagcgggagacgatgttcgaccgcgggttccagccgggcctggcgcagggcaacaagctctcgcagacaaacgccccgctttaccagcacatcaagcggctcaatgaggcgcgggcggcgaatccggcgctgacccgcggcagcttcgccgagcgctggcagaccggcggggcgggcccctacgcctatagccgcgtttatcaggaccaggaggcgcttgtcgccctcaacacgtccgacaccggaggagcggtcatcaatccgcaggtcggcaaaccgaacggcacgcagttcgtcaatgtcctcaatccttccgagacggtcaccgtcgcggccgggcgcatcacgttcaccctcgcgggaagggattccaaaatcttcgtggcgggacagatccagcggccgtccgaagtgcgcctcacgtcggatgcctccaatgtcaccctcgcctacacgccgcatgacgggccgctcaagaatgccaccgcgccggtgcagatcggcgtaagcatcgacggggcaacagcggcatttttcaacatgacccccggcgccgacggatcgtggacttacacgcggccgtttgccgggatcacctcgacgcttgccgtgagcttccgcgattcggccgcgccgccggtgacggatgccaccgggggggctgcctggactttcaacgcctcgggattcgggcaatcggcggtgcagtgggtgggcggcacgagcacatggccggcggcaggatcgatcactgcctcaacggacctgtgggtcgattacgaaacatggcctctgggcaccgcgaccacatccaagatcgtttacacgaccaacggcgggaccacgtggcaggaacaggccggggccaagaacggcacggcgggcaacaatgacaagtggcatgcgaacctcggcaagttcgcgccgggagccacggtccggtttgcggtgcaggcacaggatgccaacgggttggcgcgttgggacaacaacgccggcgccgactacacccgttccgtgcaaatgggcactctggcgatcggctggatcggcggcacttatcattggcccgaggcgggcaacatcgagtccaccagcgatctctgggtgaacatcgaatcatggcccctcggcgccggtgtcggcggcgaggtgttctacaccacgcgccaggacaacaccggctggacctcggcgacgctggcctcgtccggtcagggggccggcaacgacctctggcacgccaacctcggcaaattctcccccggcaccgtgatccgctttgcggtcaaggtcacggacaccacgggtgcggaccactgggacaacaatggcggtgatgactacgaggcggccgtcaacggacaaagctccggcatttccggcttcgacagcgtccatgccaggggccgcacggatgcggtgaaaccgcagatcggcctgcgcttcgatgattcgggaggtttggtgatggactcgaccggacgcaatgcggccaacatctacaagatctggcagtcgggcgacctgcagcagtggaccaacgtgcgcacggtcccggcgggcgacctcgaccccgcatgggatctgctggagggcggcgctgtgcagggggccgagaggatgttcttccgcgtggaggcggtgggcggtgagaccgagcatgtttacgccggaagcccggcgatggtccgcatccgctcctatcctcccggcggcgccaagtctgccaatctggttttctcgaccgacggtggagagacctggtggccggccggggtgccgatggccctgctcacctcggacggcgaaggggacacttggagcatcg

SEQ ID NO: 364 - DNA, 23108 bp, synthetic construct
  misc_feature 1..23108: note = Synthetic
  source 1..23108: mol_type = other DNA
gcccaaccgtttacaattttgcccacataggaaacttccgcgcgtacatttttgaagatctcctccagcgccacttggagatccgtggctacgatgtccaacgcgtcatgaacctcacggacgtcgatgataagaccatcgccggttgcaagcgctgccaagttcctttggctgactttacccaacagttcaaggacgcctttttctcagacctcgatactcttcggatcaagcgcgccgctcattacccggcagccaccgagccaaaatacatcgaacggatgatcgaaatgatcacagagctccagtctcaagacgttgcttatcaagcagaagacggctcagtttatttccggatcgcacgctttacaaaatacgggcagctcgctcatttgaacctcgatgaattgcgtccctcaggccgcattcaaagcgacgaatacgaaaaggaatccgtgggcgacttcgcgctatggaaggcctgggtccctgacgacggcgatgtgttttgggaaagcccttggggccgcggccgccctggttggcatattgaatgcagcgcgatggctacctccttattagggcctcaattggatattcactgcggcggagtcgataacatttttccgcaccatgaggcggagatcgctcagtcagaatgtattactggaaaacagtttacaaagtactggctacattgcgcacacctcatggtcgacggtcagaagatgagcaaatcgctcggaaacttttactccattcgcgatcttcttgaacgaaattattccggcagagaaatccgttatgcgcttctcagtgtgcattatcgactgcctttaaatttcacccttccaggactagacgctgcacgttccgccctagaacgcttggatgcttggggggaaaggctccggcttttcgccagcgacacccctcccgcactaggcgagtctcccgcaaaaaagcgttttctggaagcgctcgacgaggatctaaacatctccggtgcattaggtcatttgttcgactgggttcgcgaatccaaccgagccctggacgccggcagcttaactcccgctgaagcggctcgagttcttgcagacttcacctccctgaattcaatcctcgagtttgagccagaagcggcctcagttcccgctgaagtacttgccttagtacaacaacgcgaagctgctagatcggcaagagactgggcactttccgatgaactcagggcggatatcgcaagattgggctggcaactgaaggataccaaacttggcccgcaactcacccgaggctagggttgaagatgaaatctgaaataaaagccgcacttaaagcgcagaatttagcgaacctctttgagttctttgcggtctttgtcatttaatgtccccccgctgcgacccctaacgctaatcccaattcctcaggcgccccgcgatttttgaaactcaccaccccatctgagatgtcctcactttatagcccggagacttttctcgacctgcaacactctgagcatcggatgcttttcgaaagcgccgtcaacgtgtgggacgcgcttgcacaaatcagcagctaccttcagttccggctcaaaccgggaattcacggtcggctcatcggcaagcccttcattagtggagcggttttcattggcgcgggcacggtggttgaacaaggagcaatgatcaaaggaccggcctggattggagaaggttgcgagattcgaaacggcgcctatatccgagaaaacgtaattgtcggctctgggtgcgtactgggcaattcgtgcgaatttaagaactcgatcctcttcgatgaggcgcaagtccctcattttaactacgttggcgactccatcctcggttacaaagcgcatctgggcgcgggtgttatcctctcgaatgtgcgcctagatcactccgaagtacttgtctccaatggctctggaggctacctcccaacgggcttacgcaagttcggcgcgattattggcgaccgtgcagaaatcggatgcaactcggtgctaaatcccggctcgataatcggacgcaacgcgatgatgtaccctggcactcaatggcgcggcgtgctcggcgcgaactgcacggtaaaaaccactcaagagcagcatattataacccgagaagtataactcacttttaacctcacaacttctatgtccgaacttccctcccttccctctcctccctcgcatgccgcagacgatcaaggcttcgacctgcttgaattctggattcgccatcgcaaggccattcagatttcagtcgcactgcttgtagcctcaatgctgacctatgccgttagcgagcttttggcatatcgtcgaaatctcgaagctgcggaggcttttgcccttgcccaaacgcccgaacagttgtcggagtttataaacggccaccgaggaatggtcgcctcaggaaacgccgcgttgctgctttcgggcaaacagcgcgctaacgggcagctcgaggagtcgctcaaaacgttacgcgatttcctgtcttcctctgctgaccatcccatggcctccgcagcacgtctgggaatcgccgcaacgctcgaggcacaaggaaaacaggatgaagcgctcatggcgtaccgcagtttactggcctcggattcgcgaggattcgccgccccagctgcgcagctgcgcatcgcccgtatctacaagtcacagaacaaattcgaagaagctaaggcatcttatgagagcctccagagccagttcccaacctcttcattcgcaaacgaagctcttttggaatcccaacaactcagcgccgaacacccctctgcgcccgaaccggcactcgcccaaccgaccccagccgaagcacctgcagctacccaagttcctgcagcaccgcctgcccagcccgcgaaacagtaagtcgcctcgctctcttttttctttttcgccttctcattaagcccctaaaaatcccctaagaaaaaaccgcttcttacaacgttgacaccagcgccttgaagcaagaaaagtcctcacatgactccctcctcagatacaacttcaatcctatcccgccgagatttctttaaagcctccggccttaccatcggagcttccgctctcgcaaacgtcaaagtgccccatgtcttcgcgcagggcagcgaccagttgagaatcgctctcatcggatgcggcggccgcggcactggagcagtggtgaacgccttgggacagaaaatgtcgctcaagttggtcgccatggccgacgtctttcaacagaagctggacaacagctacaaatccatcaaagccaagttccccgatcaggtggatgtttccgacgaccacaagttcatcggcttcgatgggtacaaacatgcaatggattgccttcgcaaaggcgacatcgcgatcttcacaactccgctcgccttccgttgggtacactttaagtacgcgatcgagaagggtttgcacgtgttcatggagaagcccattacggctgacggcccaacttcgcgccgcatgctggaacttgcaaaacaggcctccgccaaaaatttgaaagtgggcgtcggactgatgtcccgccacagccacgcgatgcaggagctttacaagcgcatccaggacggcgagatcggtgacatcaacttcatgcgcggctaccggatgcagggcatcatcgggtcggcattctccgaaccatggccgggtgaaccgaaagaactgctgtggcagatttcccgtttccacagctttctgtgggccagcggtggcgctttcagcgatttctacattcatcacgtcgaccatctctgctggctcaaaaacgcttggccggtcaagtgccacggcgtcggaggtcgcactttccgcacagcccccagcggcaaaccttacgtggatcaaaacttggattcgtattcggtggaatacacgttccaggatggcacgaagttgttcatggatggccgctgcatgaatggcgctctcccgatttactccagttacgcgcacggcagcaaggggatggcgatcgtctccaagagcggagactgcggtaggccctcgagcacttacaaagggcaaaacccgagcaaagaaaatatgctttggacctcgccggatcccaaggtggcggatgatccttacttcaacgaatgggaagatctcacagatgccattcgcaacgacaagccgtacaacgaagtcgagcgcggagtgatggcgagcttggtcacttccatgggccgttacgccacacacaccgctcaggaagtcaccttagacgagatgctcaaccacgagcacgagtacgctcctgacgcagacaagttcaccatggactcccctgctcccgtgctcgccgacgcaaacggtctctacccagtgcccgaacccggtcgcaagaccaagcgcgagtactaaggccatctaagcctttcttaaggggcttaaacggagcctttaagaagtctttactaaagcttgaattaccgcagggtgcagtcagtaaaatgactgtgccctgcgttttatttctgtttcttagaggtcaatgcgacgtggatgcggtgagacttcgatcgtccaaactgaacctcgactaaaaagcgaaagacgtactgctgcgacgcgagcggtccacctgaagcatataaggtttacaactacagcaacttcattgggctgcgtattattgacgtagagcggagttaccaaagtacagagatactgtatcgaggatccatccagcgagtatcgttagtaatggctgttagcttttcactcctgcactgtgatattagtagcctgtcgaatggatcgttatggacggtgggaaggtcatgcactccaactgcgtgttgaaattcaatagggaggatattgaatcccgaggcctttaacttgtcctctaacgaatcccgaaacccaattggagtttgaatctttccaagcgatgctttgatcgcgatttcccaaatgctaaccacgctaacaaaagcatccgtattcggattttcgatcagttgagctgccttctctgacagttctgaatcatctcgcagaaaccatacaagagcacacgtatctagaagaactttcattggtattcagcgaaaatatccagagggtcgttgaagtcagcaggtacagggggaatctccgatttcatcattccgcgtatccttttgggtttatcagattggcaagcacgaagttcagccattttttgtccgtttcgtgtaatgataaaaacctcccctgcagcagcttctcgaagaagctcggagaatcgcgatttagcctcgtatgcggcgataagtttcatagaggccacaataccacgaccggtcagaccggtcaaactccagctacggggtcgtgtctaaactgcccaatagccttttgcaccttctcgaacgagctgtgcattttgttatactgattaggcgggggcctccggaaactgggatactgaaagtcgcatagtgaaagctgtattggcataatatttagcgcatttgaattccagcgaaccatcgggtttcgagtaatcttttgctaaaaacggcttcttatcccccggtctcaataagaaacaccttcgacggacattacctgaacaaagtcatccgatacatgggcgctacgctccgatgccttgacctcggcccgtcgactcccagccttcccctcccgatgaacaagatttactcacgcgtcatcatggcagccttcagcctgatgataatcacgtcagtttttggagagcctccacagccgcaactgcccgtggtacagggacagacactttcccccgctctttagccgacactttcccccgctctttagcccgccgggaatcagcagagcaaccttctttaagaacatctctgccagtgcagcgtgatgccacccttagaaagcaaaatcgatttccaatctccccgtaaaggagtaggatgttataatgaccgctgaattcgcaccgctttttgagttgagttgcgctgaacggctacagctcgtcgaagacctttgggacagtattgccaaagaagcagatcaaatccctgtacccgattggcaaatcgaggaggtagagcggattcgtatcaaggctgagcagaatcctgcatctttggaaacgtggggctctgcaagagagtggatcgtcaaaaatcatgggtaatcggatcgcgattactcatgaggccaaggccaagttggcggaagctttccaatcgcacgaagcaaaggaacagggttggcgcatgagtttttgcgtgccttctctgcttgttttgcgatggttcaacggcacccagagatttttccagtggtgaagggctatcggaagggtttgcctcggaagttcccgtacacgttcttttacaggtgtgaaaatggcttggtgagtgtttaccagatcttccattgctctgaggattcgcagaaatggactaaagatctgtaaaagacgaattgcgtagcaggagtgaagtgcggagcaaaatgactggagcgcctgaggggagcgacaacagacaaaaggcggcgccctttgcggacgccgccgtgtctgcagcaaccttgtttagcgccgcgaagccaaagtctgccccagatcaaaacgatccagattcatcaccttgttccagaccgccacgaagtcgtttacaaacttctgctgcgcatcggccgacccgtaggcctccgcaatggcccgcagttgcgagtttgaaccaaaaaccaagtcgacccgtgatccggtccacttgacctctccggtcttgcggtcgcggccttcaaagaagtgctcacaggctggggactttttccaatccgtacccatgtcgagcaggttgacgaagaaatcgttggtcagcgtgcctggccgtttagtgaagactcccagttgtgggaaacctacgttggtattcaaaacccgcatgccacccacgagaactgtcatttccggggcggtaagagtcagcaggtgagcccgatccaccaaaagctcctcggcaggccggtcgtgttcattgccgaagtagttgcggaacccgtcggttgcaggctcaaggacagcgaaagactggacgtctgtcatttcctgagtggcatccgttctccctggggagaatggaaccttcacttcgttccccgccttttttgcggcgtcctcaatggcagtgcaaccgcccagaacgataagatctgcaatcgagatcttcttgccgccggactgtgcaccgttgaaatccttctggattttttcaaacaccggaaggaccttttcgagttcagcaggctggttgacagcccacttcgcctgcggagcaaggcgtaggcgcgccccgttggctcccccgcgcttatcggtgccacggaacgtggaagccgacgcccatgccgttgagaccagttgtgaattggaaaggcctgaggcgcggatcttggccttgagctctgcgacgtcggactcagtcaccagcgcgtgatcgaccgcgggaacggggtcctgccacaactgagtcgcaggaacgagcgggccaaggcagcgcacggcgggccccatgtcgcggtgggtgagtttgtaccaggcctttgcaaaggcttgatcgaactctttcggattgtcacggaagcgcttggagatcttcccgtaggcggggtcgagcttcagagccagatcggtcgtgaacatgatcggcgcgtggctcttagatttatcgtgcgcgtcgggcacaatcttcttggcagagtcgcccttgggcgtccactgctgagcgccggccgggctcttggaaagcacccaagtgtagtcaaaaaggttttcgaagtattcgttcgaccatttcgtcggagtggaagtccatgcaccttccaaaccgctggtgatggtatccgcgccattgcccttgccgtagctgtttttccacccgagcccctgctcttcaatcgtggcgccttcgggctcgggaccgacgtggcccttcgggttggccgcgccgtgagcttttccaagggtgtgtccccccgcaatgagcgcaacggtctcctcgtcgttcatggccatgcgtccgaacgtttcacggatgtccttggctgcggcaaggggatcgggctttccatttgggccctctgggttgacgtaaatcagacccatctggaccgccccgagagggttagcaagcttccggtcgcctgtgtagcgcttgtcatcaagccacttggtttctgggccccagctgatgtcctcctgaggctcccacacatcagcacggccaccagcgaagccaaagggcttgaaccccatcgactcaagtgcgcagttgcctgcaaaaaccatcaggtccgcccacgaaattttctgcccgtacttctgcttgatcggccagagcaatcggcgcgctttgtcgaggttggcgttgtcaggccaactgttcaggggagcaaagcgctgggtcccgtaggatgcaccgccacgcccgtccgtgatgcggtaggtacccgcgctgtgccacgccatgcgaataaagagaggtccgtaattaccgtagtcagccggccaccagtcctgcgaagtcgtcagcagggcgatgaggtccttcttgagcgcatctaagtcgagcttcttgaactcctcggcgtagttaaaggactcacccagcgggttgctcttggctgaattctgatgcagaatctggaggttgagctgatttggccaccagtccctgttggagtaggcccctgcagcggtgtttctttcagtgggcgccttttgcacgccgcctatcaccggacatttttcgctggaatccgcggcctttgcattagccacctctttagccgcctcagcgtgcaactgagcgccttgggtcccagcccaaaacccgagagccaaagccgcaagccgcacggaacctgtgcccattaggccgagcctgctgggcttgcctgcgcttgggtgaagggggcaatttttggaggactctctgggtaataacttgtttttcattatattagtttagggattgttcgtctgttcgcaaaagtcatggggctcacccaatctggccgtcttggctccgctcttttcaaggcactcggagcaggttccccaaaaaatcacctctgcctcgtcgatctggaaccccgaatcgtcgaccgccttcaggcaaggcctctcccccaccacgcaggccacatccaccgtcttcctgcaggatcgacagatgaggtggtggtggttatcgccgactcgggcctcgtaaagcgccgctgatccggctggctggatccgccggagaatgcccttttccacgaaagtcccgagcgtgttgtaaaccgcctgttttgaaatggcaccgatctccgagcgaaccgcctcagccagtgcgtccgccgtagcatgtggctgcgcgcccacagctctaagcagggcaaggcgttgggccgtgacggggattcggcgtttcctaagaatgtttacgttagagaacacaggagtggatacttcatcaaaaaatagattctgtcgagaatttgattccgtcaaaataaactcacgaccttatttcagcgagcgaacctttcgcagtctcctcaatggcaaacgcccgctacgagagaaacgggaccagacactttttgatccaccacgggtacgggagaaacggggccagacactttttgatccctagacactttttgatccaaattaacgataaaactgaggctcggatactggggagcaagatgaacgggacgagatttgcaccaaagccagtcttttgccggaaaccaaagccaaactcgcgcataatggccggatttcgctggacggcacgcgtagaatcggggaaaagcaactctcccttaacgctccccggacaggcttaaaaagtagtttcgaggtgtaaattacaaaatctatctgcttcagatcgacggttggtagacatcttattcctacgatttatggcaaccgtttggtcatttgatcttggtattggttctattggtgaggctgttcgtgattccgcgacccacgaatttctccacgttgcatcgcttctgattccacaggagtttgcctccacaaaagaggcaggtaagcggcgacgaatgtaccgaacacgcctcgcgcatcaggcgcgagaatcttggttggatcatgtatggctgatggccggccagattcctttgcagaagcgctcggtctggaagaatcctaccacctcaaagtgggagctaaagcatccggcggatcctaggctggagcgtgaatttgccaaacagggggacaacacttgttacacttcttgtttgctgagaatcaaattattgaggggcgaagttttggagccttggcagatttacaaggccctccattcagcgatccaacgaagggggtacgatccggatattccttggaagaccaaggaaagtgggaggcgcaaggaggcggatgcagataaggaggaaggaacgacaagggaacggatgaaccttttcactcgggaattggaagcgatgtttccggaccatgaagagtgccggttgcagtgttattttgatgcggtgaaaatgggtctgatggatccatcaaagccagcgactctaaaagaacgaattgaccacacagccgacaccactcggaatcaaattgttcctcggtggatggtggaaaaagaggtgcgtcttttgtgtgagcaagctgcactgcaggtaccaagtctacaaggcaaagcggactttttgttgtggggccccgcagagcaaccgtatgcgtcgtatgatgtccaaacgcggaaggaatttggtcttcgcgagggcggcgagacagactggcagggagttgtcgggcagaagattcctcgctttgacaatcggattattgagaagtgttcccttattccccgactgaacgtctgtaaaattaagagcacgggaaaagaaccgcttccagaatcacgggtggtttttgaggccacttttctcatgaagcttcgcaacatgcgggtgcaggctgaaagcgctcagcaaaggggactgacaatgtctgaagtttgcgagattttttcgcaggcagaaaagatcggctataaagtcactgctgcacagtggaagaaatggtgcattaaatttaatgcgaggcctcttccgggccatgaagaggtagaggcgccaagatcaggaggcaggagcaggttttgtcggcctgcattggaaatattaaagcgactcatcttgtctggtgaaccacctaaacgccaacgattggtagagttggagggtattcgaggcaacacaaaccctttgaaaggattgattgagggcgatctgatttttttagatcggatgggcgatacttgggaggggatttatatcccagatcagaagctcgacgccctgattcagagcagcgaatctgaagaagtggcagtgaggcgtatcatcggttctcagaacgatccgattgtgcgacaccgtctaggacagttttttgaacggattaagacgcttcatgctgcacatggcgtgcctgaaaccgtggccatcgagtttattcgaacagacttcatggggcccaaggctttgatagagtaccgcaagtttgtgaaagagcgggagaccctgcgaaaaaagtcgagagacgaagcgacaatgctgggggccagcgctaagagcggcgggctaaagatggaacttttccggattcaaggtggagtatgcctttatacgggtgatcctctgaaagagactgatttggatttgtaccagatcgaccacattgtgcctagagaacggggcgggccggactcgatgttgaattatctcctgacaacacaaaaagccaatgcagagaaaggagtgaggacgccttttgaatggctttcgaggggcaccgcttgggacgcatatgtgaaccgcgttaatgggtcggccagtgcgttacgaaacaagaaggtgaaactgctgctcaatgaagatgccgtcgaacttgcagagcggtacacatccctcgcagaaaccgcgtggatcacaaagctatccagagcgatccttgacgcctattttggctggcgaaatggcgtagataagcagggcgtaaaacgtgttgccgtaattaatggaggactcactgcgcgcgtgcgtcggaagtacaagctcaacagtatcctgcatcctgatacggcggatgaaagtgaggcggaaaagaaaaaccggaacgatggcaggcatcacgcgctggatgccatggtcatcaattttatcccaggttggatgagggatgccgcgaaagaacatttcttccgattcccagacggggtacacaaggagttttttcagaggtacttggaatccttgatgcctaggaagctgtgttttgaaaaaccgaccctcgctgctacggtttacggagggcgcctctctgggcaggagaccatcatcgtccagcggacgagttttttagacatgggctacaagccagtggcccctgggaagacagcctacgatctcggttatttgacgaaacaggtgggctcaattcgagataaaaaaatccggagtcttgcgcaggacttcgtgtcacaagagcccgaggaagtggagtggaaggctttttgcgaaacattaaccctccgccgtcaggatggctcgcctggcagtcgcgttaaaattgtgtcggtgaatgttggcggtgctgaggaataccgggacttttcgaaagacggttgcggtgcgtatcggaaagcatcggggagccacaaggggcaggtagtttatcgggatccggcagggaaataccgagtgcggcctgtgtacgtgtttgagtcggtggctgcggtgagagaagaggtaagaggcaaggacggcgtatttgtggagttttttcagagcggctgcgccgtgtctctggacacactggtggagcattctcaaatgccattagcagctggggtttatgaattatcgacgatcaaatcgaatggccaagtgaaactgaaaacggcaacaggacaaataagttttgcgatcgttttagaaagatttatgaaagccggcttgaagcgcatttaggcatctttatctatgagcttccatgtcctgcacgtaatgcagcacggggccctgctttccaaggaccggggatttattgtttgcaaggcgcaggatggaactgaacgaaggcttccacataccgatatacgtgcggtagtgatcgctgctcggggcgtcacacttacttcgcattttgtgtcctctattcttgaaacagacggactaattttacactgcaacgaacgataccaaccctgcggaatgactgtgggtttaacgagggtggttgatttgagtgcctttttaagccaagtctcccaacctaagaaactttgcgaaagattgtggcagaggatgttggaggggaaaaccgaaaaccagattagggtgcttgacaaactgggctttaaaaacaagcacctggagctcgccttaaagaccggcaaaatcgacgagggcaactgcgcgcgcagatattggaagctttattttccagccatcgaagctgacacctcgcgcagggatcgcgaagagggtacggcgatcaaccaaatgctgaattatgggtacgctgttttgtcggctctttgccacaggagcctgttggtgcatggactattgccatcgttgggggtgaaacatatgccgcgatatcgttcgacgccgctggtgtttgacgtcatggagccatttcgaccgatggtggatatgatgctggctgatttccaaaaatccggaggaggggacatgaaggcgtgggcaaaaaaggtgggaactgaactgaaggaaacccgccttcagcactctaggtactcagtcaaactgatggacgctatcgatatttcaatttcatcgctggcccgcagttttgccgcacggaaacattcggatttttgggtgccgttgctaggggaatgaaggtaagtgcgtttcgtatgggttggatcatggttatgtttgatcttcctgtgctgacgcaggaggagaaaaagacagccgcccgttttcggcatgacctgctggatgacggatatttgatgatccagtggagcatctacgccagaccgtgcatcagttacgagcaaatggacacgcacatcgcgcgagtcaaatctatgactccggaggcaggaaatgtgcggttgatgtttttaacggaccagcaatggggtaagagtgtcacagtggtggggaagaactatcgacagggtaaacggacagtggatcccatgatgccaaaacaggtcgagttttgggattagcgaaggagagcagattgttgatgtgcagacagaaaaagccactcgaacgtgctatgcagtggttcgagtggcttaaattcagttgagacttcaccccccggcggactcaattacggttgcaactctttcgaaaaaagacggatctgtcaaacctattgtaacagactccgccggggggtgaagtcagaacacagccagtaattcttgccgcgcgtcgcccattgtaacagactccgccggggggtgaagtcagaacgtaaccctgcagatagcttgcaacttacctattgtaacagactccgccggggggtgaagtcagaaccgtctcatcgactttgctttcggtggcaacattgtaacagactccgccggggggtgaagtcagaacttcccacgaaaagccagcgtgaagtagcgcattgtaacagactccgccggggggtgaagtcagaacgttaggtctacagggtcgctgatttcaattattgtaacagactccgccggggggtgaagtcagaacaacgatttgttcatcaatccggctttgcagattgtaacagactccgccggggggtgaagtcagaacaccgtcattccacgtcatggtgagcggtggaattgtaacagactccgccggggggtgaagtcagaacatgtggtccgctggtgtcgtgtcatcggccattgtaacagactccgccggggggtgaagtcagaacagaagctgaatgggtagaagctactcttaattgtaacagactccgccggggggtgaagtcagaacatatagtgtgtgtttgcaacatatacccattgtaacagactccgccggggggtgaagtcagaacgtcggttaaataacggcgcgcctcaaggcgattgtaacagactccgccggggggtgaagtcagaacttggtaaccataggttccagccctagcggaattgtaacagactccgccgaggggtgaagtcagaacaacggaatctcgtcagaatcaatcacctgaattgtaacagactccgccggggttggcgtaaaaatcccacgaaagacgcccttaactaagtgccattcgtgtctgtcccctgcggccccacttctccatgcaataaagcccgttttacttacaaaccattcacattgaaccaaatcagactagatcatctaaccttgctgagcggcacaagattccgtgatcttgaaggttaagacaccaccatctccattgcctttctgaatcttgccagcgtttgtgaaagatgcgaccttgccctaagcttttcgcttacgatgaacctctcccacgatctccttccgcttctcgaccgattgggttggagccttcccctgtttctcgttgccttcgccgcactctggtttgctaaagccctctaccagtggacagagcccttcgacttcgccaacgaactcactgagaatgacaatcccgcgttcggtgcagccattgcgggttacttgctcggcgccgcgatcgccctcaccgccgcctttcccagaaacccggcgctggatttaacttcgctcctgagcgcggtggaacttctcgcagtgcagggagtgctggtggcgctgctcatgagggcgagcgtttggatggtggctcacggagtcatacaccgctttggcgtgagtcgtgaaatgatcgaggaccgcaatgctggcgccggtgccgtagtcgctggtggctgtatcgccgccggcctcgtgctccacggagcgctctccggtgaaagcgcctcaccctggtttgccctgcgcgatctgctggtgttctggacactgggacaggttatcttgctctccggggggtggttattcacccgagtagcggggtacgatgtgcagaaaacgctcgaacaaaacaacgttgcggccggctttagtttggccggttttttagtagccgtcggcatccttgtggacgccgccctcactggggccgctaacaaccttgcgctcgaaatcgcgttaactttgggggtcgcagcgatcggtctgttgctgctctttatgacggcgctcatcgcggcccgcgtgtttttgccacacgcggcaatcgccaaagaaatcgagacggatcgcaatcctgcagcgggaattctctcagcggtttgctttgtcgcggttgcacttcttctggcacgggttattactccttaagcggaggcatttaccccatgttttctacaaagcagattattcggtttgcgagcgttgccacgcttctggtcgccactccgtgtgctgttctagcccgcggtggaagtggcggtggcggcagatcgagtagcggcggcgggcgcagctcttttagcggtggcggcggtggcggccggagttcatccagcagcggaagttcttggagtggcggcagcagtcgctcggcccccgcacccgcaccttccagagcaccggcaagctcgccatcctccggaggctggggtgcaggaaaaagcactgacaccgcttctcgttcgggtggtgcgcctccgtccaactcccctcaatccggttggggaagttcctctcgttttagtagcgattcagccggaagttcccgcgccacagacgccgccatcgcacgcaaatctggagaaagctcccgaactttctcgagccgcgccgatgccgtacgcaattttgagtccacccacgcgaaaaaatattcctcctcttacgccagcgaacctacctcccgcccggcgcacatcccccaaaccgtcctcgtcgacaatcgctcctatccagtccattacgacgtcggccaccgcgggtacggttactgggacagctcgggttggcggacttacgaagtggtacgcgacgcggtgatgcttggcgccctgatgcaacatcacaactataattacggcggcggctacggctcatacggtccgagttactcgtcttacgggcaacccttcgacgcgccgccgtactaccataactctggaatgggattggtgaccggactgatcacctgcttatttttgttcgtcattgtccgcgtagcgctgcgaatgattttttaaaatccccttttttaagtcctcaaaaatcttccattcccaactcgccacatggacaaaaccaacccatcagactggcaggctgttaaacccaaaagcatcgtcaccatcagcgacgctcagggaatacaggattcgatgcgacgcggactcggggtgcgcggactggactacacggtgcgctctgtggcacgttgcgaacaactggacggcctctccacgtatgtcattttcacgttggacgacacggaacaggccgcctttcttctggtgaaaatcgtcgatgaccttgtggatctcactctttattttgagccacccggcttatccggcggagaacgagcagacctgcttgatcgcgggatgcattggctgttccaaacccccgccgatctcaattccttcgagccctccgagttgcgttacacgacatctctggtgcaaaccgtgcccggagctgcaggagccccaccgctcgaattgctttacgcgttaaagccgcagggcgaactccagtgccattactccgagtcccccgcccgcgcgggtctaccagcgcaaatgctcgccaccctcgtggaataccgctgcgatcaaccggcagagaatccagaattcctcattctggacgtgggagaagaacgcagtcgccgtagctttttgcgcttctttctcggttgccccatacaactctcagaagttgacgttctaggcatctagactttttcttcgagtccactcaaactgccccccgtctctcgcccctatgctcatcaacactcccattcgcctccagtcctttttagaagcgcgcggccacgctgcccacctgagcgccaactcggtttgcatcgcagtgggcgacgctgaatggccactcaccgccgctttcaccttcttagaaaacgagctgcgcatcacctgtcagattgctgttctcggcgactttacagaaaaccagctcgctcatttctgtttggctgcccttgacgccaacatgcaaatcagcccttacgccttcgccattatcggagcctcggagaacgatgcagaggcttcacaatgtccagtggtacttacggacacacttctcacagaggatcttaatgatgatgaaatcaccttctctctgaacaggctcctggaggcgatagtccttggtaaagacctcatcaccgccaaccgctaatctttcctagaacccccagaatccgcgcttttttacctttcttaatcctatggctgacaacctttttcaggctatccacaattggttccgcgcaaaaaatcaggaggcggccgaagccctttccgatcccgtacgcgacggcaaactagcgatcaccgacagcgaaaagcagatcgaaggcttcacctccaaaatcgccacgcttatcgccgagaccaagatgctggaacgccaaaccgccgaaagcgcttcggaggtaagcaagtatcaggcggtcgcagcccaagcgttgcaagccggaaacgagaccgatgccagggacgctatcacccttaaacaaaaagcagagcaacaagctcaggcacttggcgctcaactttctgcaaacaaggaactcgttttgaagttgcgggagcaactcaacaccgcacgcatgaaggtcgccaaggcgcgcagcaatattacccagcttcaggcacgctcccaagcagcgcaaattcgcaccgacttagccaaggcgtcctccgagtttcactccaacaaaggcgggcttgccgccttggataacttggaaaaatccgtcaacaaacaagaaactgtagcggaagcctacgaagatcttgctgcctccgcagcaccagcgggccaagcccttttggacaaatacgccgtgggtgatgcctccgtggaagcggagttgcagcgcctcaaaagcggccttttagggggcggctcccctagtctttcgttgcctcacggcagttaaaaattcccgctcaagggcggaaagtgcgactcgaatgcaggccgaccggcaggaatctacggttggccaaggagaaccgacggatctaacgtcgggcggctcctttcctcaggttgattattgtggagagaaacgctgctggcatctccttttctaaattgcagacaccggtttacttgttctctggaacttccttggcatttcgcccgccacactcggcgccctctcccgcccgaaaagaatcgccaattcataaatgtacccaaaaaacatcagggaactttgctagtgcgtaagattcagttagcgtgacattctgacaaacgttttacatcgcggaacaaactttggtggccatttagaagggatctgcccggagccaaccatcacttcaccgccccatttcccaaacgcacccaccttccgatgaacaccccacaagccgagcccgccgagccccaatcacaccccgatgtgcagcctcacgcagaggctccgacccctcccgtggaacacgctcacccggaacacgctcacgcggaacacgcccacgcggaacacgcccacgcggaacacgcccacgcggaacacgctcactcggaacacgctcacgcggaacacgcccacgcggaacacgcccacgcggaacaaaacgccccgaccgaagcgcgaacttctgagcatccttcagatcccaatgtgctgagcgaacttctggccgcagcctccgagcgccgcctttgcgtcacgctcgaaaagttggcagcgcagggagtctccgctgaaaacttgggccacgcgctttgccaacaagacgccagcggaacgacgccttgggcagccgctgtgcacgcaggagagtttgcttcgattggtgcaacttacctgaaggcgttggatctccagcacgacgtcggaggcaaaacgtttttggagctctgcctctcccatggagcagaagctggcgattgggcgatcaaacgcctcaagaccaagactatttcccgagccaagcttctgtccgcgtggggacaaaaaaacggggagccactggcccactttctggctctgcacaaccatttacgcgattccttcgtctcacggctttctaagagcgaccttaaaggttcagaggccgcagaggcgaccacccctgggcaagaccacgcagcgctactggaaagcctctctacccaagtgccggccctacctgagggccattttggcaatcgccacatgaatcttctaggttcagcggcagcgggaggccattttgaccagtttggagaatcctttttctcgatcaccgcgacgacggaaacgctcttgccttcccacttctcagcggagaaccaagtacacttcattcaagttgcccatgccaccggccatttgactcgcgttccaggagccgtttggaagcgtttacagcgcctttctcaagaggaattgaacgacacacaaaaggcgcttctcgccgagttgctggccttccacgctgaacttattgttctttattgtgcaaaactggaggcggatcccagcttctatcaccgcgaaatcccccccgatttcaaaagcgaacccgccattcttgccatccaaaggcgcaacgacctgaagcgttacgaggaaagtcccattccgtttgaacacctgcctcagcggttccaacagggtgaagacgcgcttttatcttggtccaaaccttggattaaacacttggccagcgcgattttctcctttgaccgcattccggaacgtttacgcgataatgcggacgcgctggaagcatggtcgcgcccttggattgaactgattaattcagaagcccttgaggcgtacaagattccaccacagctgcgcaacgatcctcgggtgatcaccgctcgggtaaacttctattgcaaggcggtgcaaaccggcgaagagcgcgcgctgcgtgcggttcccgccgagctacatcatttgcctgaaatggccactgcccttgctgatggttggtccgtgtggtttgcgcatcagggaattaagggttgggaccagttgcccgctgaagtccgcacgattcccaaattacaagaacaatgcgcggcgctttggctagagcgaatcgcggaattcgatgtggaatggccgtccattcctgcggaggttcgcgctcagaaacatgtggtcgaggcttggctagccgcccaaccgcttctgccacagatggaagtttcctttgcggaaatcgcagcggttccgaccatcaccaaagtcactctccaactttggcgcaacagcaaccattggaaccgtcaaaaggcgggtaccatgctcatcgaactgcgcaacgctccttggcaattcactaaactgcagccgtctgcgcaaaatcacccaatgattcgcgcggctgcctatgaaggcatcagcgaattggtgcgccaaaattgggcctatttccaagtcgctcccgaggcgttccatcaggacgaggagttgctggagcttgccgtccctgaatggctaaattccgtcaaagagggccgcgttgagtgggagcaaattcccactgaactccgtgccgctgaatcacttcaggactggaaagagaagcaagacgcgaagtcgcgcaaagtcgaacgagaagaaaagcaggccaaagttcaaagccgcgttcgagttcaaccccatctcccagatgcggaaatgagcgccaaagagctcaaggatgccggcatccgcaaggtccgctccaactactgggcccgacgcattcaaagcgatccgttgcagtacttggaagtcccagaaagcctgctcaataccccggcggtggaagcggcgatgcggggccactggggaccgatagtccatagcaacccggattgtttccacgacttgccagagcgtatccgcgcagacgtcgggatccagcgggtgtacaagatcaaaacacggaccacgaccgaagcggaagtagctcccgcagttgagtctggcggagagactgaaggctaaaagccgacgcgtgcgcagttgaaatttggctctaggtcagcctctccccttgagtggggggcagagggagttgggagcgacccgcactcagggttaaccgcgcaagtcgcgggtgtagcgcagagcaagctccaagaggctttctcctgtttccaagccgagcttgctgcggatattgccgcggtgtgcttcaatggtcttcacactcaacgaaaggcgggtagctatggagtcggaactcagccccgtgccgatgagcgaaagcacctccaattcgcggtttgtcagagattcgatgccagaacgcgtcgctcccttagaaggatggagggctcgttcaagcagcagaccagccacgcgtgttcccagataaatgccccctgcgagaactcgatccagcgcctccaagacattttgggcagcatcggttttcatgacgtacccgtgagcgccagcgacaatagcgcgttcagcataaaccaattcatcatgcatggagagaatcagcactctcaagtgcggcacgatggccaccatatcctgaataaggagcaagcccatccgctctctcagggaaatatccagaaccacagcgtccggagtgcaagcggcaacggcatccaaagcctctggccaactggaggcctcggcgcacacctcaaacctctgctcccccgcgagaagaagccttatcccctgacgcacaatcggatggtcatccacaagtaagatccgata

SEQ ID NO: 365 - DNA, 23068 bp, synthetic construct
  source 1..23068: mol_type = other DNA
  misc_feature 1..23068: note = Synthetic
gcctcaaacttgcggatcatcgtgggaaattcgtggccgccgcggaacgccacaaaactgccactcacggcatagacccggctgaaggcatcgggccggttccaggcggcggcgaaggccgcaatgccgccactgctaccgcccgacatgcagcggtcgttgccgtcggtggagagattgagttgatactccttcgcgatgtacggcaggagttcctccgtgagaaagcgcacgttgttgtcgctcacgccatcatattcaaagtcgcggttgcgccgcccgatcgtgcccttcatcggcgccggcacctcgcccgggcgcacaaacacgcccacagtcacgggcatctccttcgtcgcgatcagcgtctccatgagagtcttctcgccagggttgtagccatcggttttgacatacacgcacgccggtttcgtcccgtcgtattgcgccggaatgaagacggtcacctcgcgcgtggtgcctgggaagatcctgctctgggtgaaagtgaactgcttcgtcgtgccgggcagaatgtcctcgggcttgatggccggcggttcataccgggagggaacggcttcctccttggcggcctgaatgggactgcccgcgagcggcttgatcatccattgcaggtgcgggtcgttgccggagtttttccacaggtcgacgcgcgcgccgggggtctgtcggccgcccagcaggtcgatgcccataccgggcgcgtggaaggtggtgccgggcgtgccgaggttggcaactcctggttcgagggtgccggtggtgttgagcgtgacggcgccggtgacggtcccggagccggcaagcgttcctccgctgacggcgacgccaccggaggcggtgagatttccggtgatgtcgaaagtgccgctgctcgcggtgaccagaccggtgacttttcccgcattggcccagttacctccggtgacaccaagagtgccggcgatgctggcactgctcgccagtttaatggtgccgttgccggtcaaggtgactttcccgagaatctttccggcgccggtgagcgtcccgccggtggcgacattcacggtgctgccggaggcaaggctggtgtcgacttccagggtgccggcgttcacgttggtcgctccggtgtaagcctgggcgacaccggtgatgatggtcgtgccggtgccgttttgattgaaggagccgggaccgctgatcaccccgttaataaagtcagcgccggattggagagccacgaaggacgcggtgctggtgctgaggttgaccttgctggagaagaacgtcgcgatggccagatcggtggccaggattccgctgccggagacggtcacggacgtgccgctggccagattgccggaggtgccgttgccaatttgcagggtgccggcggtgacattggtcgcgccggtatgggtctccgtgttggtgaggatggtcgtgcccgggccggtttgatcgaagacgccggggccgctgatcaccccggagaaggtattggtgccagtctgggtggtcttgagggtggtggtggcagcgttgagagccacggcgggggtgaaggtggcggcattcgcgaaatccgtgatcaggctggcggtgccggcgacggcgacgctggaactggtgagattgccggaggtgccattaccgacctggaggatgccggtgttcaccgtggtggcgccggtgtaggtattggcgccggtgagggtgagagtcccggtgccgaccttcacgacggaaccgccgatgttgttacggaggccgccatccgcgatcaccccagagaccgtggtgctgagattgttgccgccgacggttagggcattgtcgccgagaaaataattcccactgccttcgatcgagccgatcttcatgccgccatcaaggccgctaatatcgaaagacccatttccattggtgatggcgcgggcggttccaccgtcggcgctgtcgtgaaaggaggtggtgccaccgcctccaccagcggagccgccattcgtggtgatggtggcgctgccggcggtggcggtatcggagaattgcagggtgctgccgaatgctccattgatcgtgctgccattgacggtgagggtcgcgctcccggcggtggacatttccccgaagagcgtgctggcgccggcggcattggcgacggccccgccgtaggagatgatcgtggcattgccggcggtggcctgctcctggaagctggtcagtccgccgggagcaccgctgccgaatcccccgccattcgtgatcatcgcatggctggcattggcggaaccttggaaagtggtgttgccgccgtttccggtgctgaacgtggccccgttgttcatgatcgtcacggtccccgcgttggataagtcgtcgaacagggtggaaccggcgaaggcggcgtaactcccgctgccgttgttggtgatgttcgcattgccggccgtggacgaattgatgaaactggtgccgcccccgcctccggaaatcacattggccgcgaggttgacgatcgtggcgcttccggcggtcgaggttttttggaaagtcagggtcccgccgttgctggcgccgatcgtggcggcctggttggtgaattgagttccactccccgcggaggcgctgttggtgaaaacgatcgatccaatgttgccattggcgtccgacgacgccgtgaggaaattctgagtttggagagaattgttggtcaggcccgcaccggtgatggtgaggctgttgccagggctgacgctgagggtgtaagcgccagcgccggggataaatcccagcgcggcgaccgtgacattcgctccaatggtcaccgtccccgagcccgtgctgaaaacagcgatcgaattcccccacgccgcggccggactgccaccggagttggtccagttggttgtggcgttgtcccaggtgcccgcgccgccatggatggtgttgtcagccgtggtggtcgcgccgttccaatactggaccaatgggccgctggtgaccgtgaggtcgacctgcttggtggtcgcgttgttggtgatggtgaaattcgcggcagtatatccggcggggagggtaccgagggtgatcgcacccgtggccgtgccggtgtaactgaaaagttcgaaggtgtcgcccatgccgaagccgaagccggcggtgaggttgagcgtgccgccgaggctgagattgcccgtgaccgccgtgaagtcattgaccccggggacacccgcgcccgctgcccccaagagataattcaccttcgcgccggtcttgagggtgagtgggcccatgccgaaattggccgggacgccgctggtgccgggggagaagatgccgccggaattcacggtgacagctccgccaatcttgcccgagccgtcgagggtgccgccggaattcacggctaccgcggtattaccgagcaagctgtcctgcaactggagggtgccggcggtgatagtggtcgcgccggtgtaggtattggtgccggtgagcgtgagggtggatcccgctttgttcatggtcagcgcggaaggcgcggtgccattggcgatgacgccgccaaagctcatactggtgctgctcgtgtcaatgaggctgccggcgagcgtgccggtgccggacaggacgccgccggtgagagccagtcccgcgggcgcggtgagcgttccgccgaggttgaagttaccgctactcgaggtgaccaagccggtgacctggccctggccggcccagttgcctccggtgacggcgagcgtcccgccaatgttccctgcgttgagatcgatgcggccgttgccggtcaaggtcgctttgccatgaatggtcccggcgccggtgagcgtcccgcccgtggccacgttcacggtgctgcctgcggccagcgagccatcaacctcgagcgtgccggcggtgacattggtcacgccggtgtaagtctcggcgttgcccaaagtggtcgtgccggtgccgagctggtttacgccgcccttgccgctgatgatgccggcgaccgtggtactggtgccgaggttgaaggtcagggtgccgttgtccacgacattgccggtgccgagctggccaccgccgctgatctccagcgtgccggcggtgatcgtcgtcccgccggagtaagtgttgggcccggtgaggttcagggtcgcactgccattgttcatgacgagagtggtccccgcgataactccgccaaaagtgctgctgacgctactggtgtaagtgagattgcccgtgagcgtgccggtgccggccagtgttccacccgtcaccgacaaacccgcgtccgcggtgagatcggcatgattaccaatggtcaacacgcccgaactcgaggtcaccaatccggcgaccgtaccctggccgttccagttgccgccggtgatcgcgagcgtgccaccgagcgtggcccccgaactcaaattaatgatgccattgccggtcaaagtgaccttgccattgatttggccagcgccggtgagcgcggcggtcgtggccaccgccacggcactgcccgcggccagcgaaccatcgacctccagggtgccggcgttcacgctggtcagccccgtgtaggtattggcgttcgtcaaaatggtcgtgcccgggccgttctggtcgagaacaccggtaccgctgacgatcccggtgaaggtattggcgcccgtttggatggctttgaatgtggccgtggggtcgttgagattgatgctctgcgcgaaagtcgcggcggtcgccaggtctgtgaccaacgtggcgcccttgtcgaccgtgacgccgctgggcccggtcagattacccgagacgccgttccccacctgcaatgttccggccatgactgtggtcgcgttgatactcgcgttcgtgccgacataagtgttatttcccgtgagcgtcagggtggctcccgctttgttcatggtcacgttgctggcgttatcgatgatcccattgaagatgctgttggaactgctggtgtaagtcagagagctgtccagggttcccgaaccggcgagcgtcccgccggtgacggccatcccgtaacccgagcccaacctgccattgagattgaaggtgccactactggaggtgatcgttttgtcgacgttgcccccaccgttccaattaccgccggtcacggtcagcgtgccgccgatgtcgccatcctctaattggagagtgtcagtccccatgaccaccaggccaaggtcgatgaccccgttgcccgtgagagtgacattgccacggatgaagccgttgccagtcagcgtgccgttggtggccacatgcaccgtgctccccgcggcgactgagcccgtgccatagagcaccaaggtgcccgcattgacattggtcgctccggtataggtatcgttgctcgtcagaatggtcgttcccgggccattttgattgaaagcacccgtgccactaatgagtccagaaagggtcgtggttcccgactgaatcgcggttagcgtggtggtggaaccattgagattaatgttcgcagccaggactgacttcgtcggaaggttcgtaatcagtgcgcccgtgccggaaaccgtcacggcggtcgcgcccaaattcccggtcgtgccattgccgatttgcaaggtgccgccgctgacattggtcgcgccggtgtaactattgtatccggtcaacgtagtggttccgacgccggcttgcgtcaaggccaggacacccgcgccgttcgagaggatgccactgagggtgaggctgccagccgcattggccacgaccaaaccggttccacttaccccatcgctaacattgttgctgagaacattgccgtgcacgttgacgagggtgaaggttcctccggcgcccacgctcaccgggctgttcgcgccaatcgagccagcggaactggaagtgccaatttgcaagacgccgttgctgacggccgtcgcgccactgtaggtgttaccggcgttggtcaggatggtggtgccggagccgctctgggtaatggccaactggcccaatgcaccgtcggtgagcgctccggagagcgtgttcgggttcgtcgaattgataatcaaactgccgacgccagccactccgttgctgacgttattggcgaaggtattgccgctcacgttgaccagggaaagcgtgccgcccaatgcggtggtcacaacgctcgagttgatcccggcggccgcggtggtcgtgccgatttgcaaagtgcccgaggtgatggtggtggcgcccgtatagttattggcgccgctggccaggatgagcgtgcccgccccttcggccgccaacccgaccgtgccgccaatcgggacggcgatggtcgcacttgtgccggagttgatcacatcgattcccgatccagccccggtgagggtcaaagccgaggtcccggacaggacgtaaccggtgctattgaaaatcaaggattgcgcgctgatcggcgaggccagcgtgaccgttcctcccgaagcattgaagaccgccgagcctccctgccaggtcccattggaggcgccggcagagttcgtccaattattgctcgtggcgttccaggtgccgctgccgcccgtgatcgatcccgtggggctgatcgtcggcccgtcccagtattgcgcatttcccgcgtaggaaacgttcagcaccacctgtccgccgctactggtgatcgtggtggcaaatcccgcgagaccattgacggcgccaaaaccattgtcggtcagcgcgcccatgtaggtgaagagggtgtagctgccgacaccaaagccggaaagctgcgtgacattcaaaaatccgccggtggtcaggttgccggtgacattccccaggtcgttgatcccgccgccgctcaccccggactgggcgagccggaagttggaattggcgccgggattcaagaccagattgcccagggttagcgtgccgggagccgaggcgccaccgggactgaggttccctccggaaaagacattcacagtgccagaaacggtgccggtgccgcccaaggtgccgccgctgttgacgttcaccgtgctggccgccgcgagcgaaccgttctcgagcactgtgccaccgttcaacgtggtcacgccggtgtaggtgctggcgccactgaggatgagcgtgctggaaccgtccttggtgagaccgcctgttcccgccgcgcctgttccatcggagatgacaccggcgaaaacggtgggcgcgccgcccagttggttcccgatggtcaggacgttgccgttcagttttacggcggacgtgctggctccggtgagagaggcgatcgcctggttggcgcccagcgaaaggacggaccctccggtgccagtctggtccatgaggaccgccgtgcggacggtgcccgcaccgccatcggccgccggcgcgggcaacgcaccggcgacattggcattgatcgtggcgccgttgatgatgctggtcgagccggtgtaggtattctgcccggtgagagtcagcgccacggtgttggtgacgacgagagaaccgcccgtgccgccgacctggccgccgtcggcgatcaccccggagaccgtggtgctcgtgccattgccgccgaccgtgagggtgttaccgcccagaaaataagtcccgctgccggcgatcgagccgatcttcatcccgccatcagtgaggccgctgatgtcgaagatgccattgccattggtgatcgcgtgggccgttccgccatcggcgctgttactgaaataggtcgagccgccgccgccgccattgctgccgccattggtcgtgatcgtcgcactgccggcggtggccgcttcgccaaaggccgtgctgcccccgccgccgccgctgaccgtggcgccattgttggtgatcgtcgcgctccccgcggtggaagtgcctcccgtgtcaggcccaaacaaggtgttgccgccgctggccccactggcggtcccggcgttgttcatgatgatcgcactgccacccgtggaagcgccgtagaaattggtcaccgcgccaggagcatcgaccacggtgccgccgtcattggtaatcgtcgcgttttgcgcggaggaagtactcttccccgtatccccggaaaatccgaaggtgacgccgcccccgagcgcacccgcgacggtactgcccgtgttgatgatgttggccgtgccagccttcgcggtgccaaagaaagcggtgacgccctgggcactgttcgtgatcgtcgcgctgccggcgctgatgttgtcccataattcgacggagccgttttgattgctgatcgtattggtgctggccagggtgttgcccgtgatgttgaggaaagtgagttcaccgctgttggtgacgttgatcgccccggtgccgatcgagccgtgggtcccgctcgtgccgtaggtgccgacctggagcgtaccggcgttgaccgtggtcgttccgctataggtattgccgccattcacgaggatcgcggtaccgtcgctgcaagtcagagccaattggccggcggtgccatcggtgagagcgccggaaaacgttacataggaattgacgatcaccgtgccgactccgccgacgccgttggtcacgttattggcaaaagtattgctgctgagatcggccagcgtaagcgagccgccgttgctgatcgtcacggcgctggccgcggaaatcgaggctgcggtgtaagtcacgccaatctggagaacgccgccacggatggtggtggcgccggtataggtattttgtccagcgagggtgagggtgcccgtgccggtcacgaccagcgagccgccgacaccaccattggagccgccatcggagatcactccggaaacagtggtgctgcgattcgctccgccgacggtcaaggtattccccccgagaaggaacagaccgctcccggcaatcgaaccgatattcatgccgccatcggtcaagccgctgagatcgaatgtcccacctgggccattcgtgaccagggcggttccgccatcggcgctgccggcgaagtaggtcgtgccattattggtgatttgcgtcaaacttccggcgctggcgctgttggtaaattccaggattccggagttggccgacgtgacgaaattttgcgtgaccccggagttgttcgtgatccccgtgccgctgaggtcgagagtcgtgttcggcgagagggtgatcgtgtaaggcgaagttgcgttcgcagtaaaagtgatcccggcaacggtgattcccgaattgagagagacactggcggtgttcgagaggtcgaacgttgccgtgactgtcgagccattgggcacagttccggtcgtccaattcgacgcatcgttccagaagtcagtggcggggttcgggagccaggtttgggcgcgcgtagaagacggcgccaacgtcagggccatgccgcaggcggccgcgactgcgcccgtgaggcgagccagccggcaacgcttccggagtgtcaggcgagagacacgggagggaacttgagtatggcgcatggggagaacgaatttgcggtggcgctccttcaggcgaggagaattgggcgggaccaaaaagcggcgggaacggccatgccgaacagcacagccgaggcaacaccggagaacgagagttgttccacggggttacggaatacagaagctcggcgaaattgcgaggatttgtatggccaccttgaatgcctcaccgctccgggatttatcgtcgggtttcggtgaaggcccggctggaatggcgacgcgcgtcgcgcagggctgacgttgggaagacggatttttctggcggttgttgcaacagacaatttatgtagtgttttcctttacgctgaatgtactgttccgaacgcatttatcgcatcgaaaacgatgtctaccatttggtccttcgatattgggaaagccgccgtcggggaagcggttcgctgtatcggcgacgatcccagcgatccgcagcccgacgagtttctgcataaggcagtgctgcgcatcccggcggaatttgcgtccaccagagatgcgcgggatcgccggcgcctctccagcacccgcgcggcgcacaaagggcgggaggaatggctcgacgccgtctggcgaagcgcggcggttgcggaaatgcccctgcccttgcgcaaacgcatcgtagagaggaatgaggtcaccaaaaaatgggaattgaagcatcccgccgattaccgactggaacgcgagttcgcgccgcgggccggcgcgtcggcccgggatggagcaccgtccgatgaagccggcagccggatttgctacacgtcgtgtttgttgcgcatcaaactcctgcgcggagaaaagttggagccgtggcaaatctacaaggcattgcattcggccatgcagcggcggggttacgactttgaagttccgtggcgttccgaggaccggcgacggcgggagcggccggcggaggacgaggaagaggcgggcatccggcggcgcatggcccgtttcgtggcggaactccaactcctctttcccacgcgcgaagactgccagcttccctgctacttcgatgcggtgaagatgggcctgtgtgacccggcgaatcccgacgttctgcgcgaacggatcgactgccgcgcggagagcacccggcatcagatcatcccccgctggctggtggagaaagagatccggctgctggccgaggccgcgggaaggcagatcgccggcttcgtcggacaggcggatttcctgctctggggaccggcgcgccggccttatgcttcgtcgcacccggcggtccggaaagtattcggtctgcgggaaggtggcgccaatgactggcagagcgtggtcggacagaaagcaccgcgctttgacaatcgcatgatcgacaagtgcacactcattccccggctccacgtgtgcaaaatcaaggtcaccgggcgggagcccgcgccggaatcgcgtctcgtcttcgagacgaccttcctgatgcggctcaagaatatgcgggtgcagcgcgcgaccggcggacagacgggactgacgacggccgaaatcaaagcgattttcgaggatccggaagtgaagggctgcaagatcaccccgacgcaatggggccgaatctgccagaagttcggcgccactccgttgccgacctacaacgaagtgaagccgctccgggccggtggacgcggacgcttctgccgcccggcgctcgaaatcctcaagcgcgcgattctctcggatcagagtttctccgacttctacgaagaagaactcacccggctgcggggaaacaccgatccgaaacggggattggtagaggacgacttgaagttcctgcggcacctggggccgacgcgggagagcattcgcctgtcggaccaaaagctcgcgacgatcctcgagcgccaccacgacgacgccgaccaggccgtctgggagatcatcggttcgcaaaaagacccgatcgtgcgtcaccggctgcagctctttcaccagcgcttggtggctctgcaggccgcctatggaactccgcaaagggtcgcgctcaaatttgcgcgcgaggatttcatgagcaaaagcaccctggccgcgttccggacatttcgcaaaaaacgagacatggaacggacccgcgcgcgcgccgatgccgcacaggcgggagcgaccgagagcggcgcgggcttaaaactcgaactactccgcgctcaaggcggcgtgtgcctctacaccggcgcaagcctcccggaaagcggactcgcggaatacctcatcacgccgatcgttccaccatcccggggtggaccgcatgcgttcatcaactatacggtcgcccgacccgcgacccacgaggaaaagggtgagcggacgccgtttgaatggttgtcgccaaccgctcactgggcgacgtacgtgaaacgcgtgcgcacccacgcgccgacgttgcgcggcaaaaaggtgaagctgctcctggcggaggacgccgcggaattggccagccgcgccatcacaccggtcgaaacggcctggatcagcaaccttacacgcgccatcgtggaagctcatttcggctggaaaaaaaacggcgatcccggcggtggccagcgcattgtcgtggtcaatagcggcctcgccgcgcggatccgccggcactatcgactgaatggcatcctgcatccgaccgcagccgatgaagaggaggcggaaaggaaatccgactccgatgcccggcggcgcgcgctcgatgcgatggtcatcaacttcgtctccgaatggatcggcagtccggcccgagaggaattcttccggcttcccacaggcgtgggccgtgaaacttttgcccggcacctcgccgaggtgattccgcgcaatctttgcctcgaaaaaccggcgctggccgtgacgatctacggcgcccgccgcggcgcggaaggtcccgtgatcgtccagcgcgcgacgatccaagatctggcctacagttcctccaatcccgccaagccggtttacgacctgagccatgcgccccggcagatcaagaccatccgcgatccgcatattcgccggctactggagaagttcgtgagcagcaggccatcagaaaaagagtggaaagcgttttgcgccagcttcgcgctccgccgcaaggacggttcgccggccagccgggtgatccaggtcctcaccaaagtgggcgctccgaaggaatacaaagacctgtcgaaagaccagaccggcgcctggagaaaggccaaaaacgggcaccggggacaatttgtcttcaccgatgccctcggaaaatgccgcgtccggccggtgtatgcttttgaatccgtgtccgcggttcgccaggaactcgtcgccatgggagccgcgctgacggcattcttccgcagcggttgcgcggtgaatctcaccgcggacgtcccgcatgcccggacgccgctgacggcaggtccctatatcctgacgacattttttgccgatggacgcgcgcggttgaccaatgcgagcgggcagcaaagcctgcccattcacgtgagcaaactctttaccgcagggctgaaaagagtctccgtcaaataagaagcgccgctcggacgtgcgaggcagtggtccgaacggcgctgaatcagttgagacttcattttccccgagaagcgcggttcaaagagccatccgacatgacatcgaatcactctgtcgaaccgatccctcagcggtgaaaagctgcagtcagaacagccccctaccggtcattgattaagatcgagactagcgaccctccacaggaggtaaagcaaacaatggtctggcccaccaccacagacttcaatttaggaagatcaactcgttcatttgcaggacggcctgcgtgtaacgttcccagacgttgagctgcttcgaaggctggagcgctttgagagcgatggctttttgggcccgcgttttgatgtcgtcgttcgtttgcggttccgccgcggggtcgggcacatccggcgggtcgtcggacaggaagttccgggcgaggaccagttccgccgcggtcggctggcgctggagcgcggtccggaagatgaagcgcaccttgtcctcatcgatgccgtccttcgggaagtcgggacgggcgagcagattcttcacctgctcgacgacgaagggactgttcatcatgaagagcgcctgttgcggcacggtggtgagcaggcgttctccggtagtcatctcgggattcgcgaagtcaaacgtgccgaacatatcaggcaacgcgttacgatcgatcatcgcgtagacggtgcggcggtcgacgctggttttcggtaacatcgcatcggtgaccatgcccttgtaccggctgttcgcggtggaggcggcgaggaggaaggggcggccattcacgtcgcgatccagcttgccgccgatggtcaggagggtgtcgcggatcgattcgaaatcgaggcgctggacattggcccgccagagccactggttggtggggtcgtcgcgcattccgcgatcattggccaggctgctctgctgataggtagacgagagcacgatgagcttgtgcagcttcttgagcgaccagccgttgtccatcaaccaggtcgccatccagtcgagcagttcaggatgcgtcggcggttcggagcgcgtcccgaagtcattcacggtccgcacgatcgcctggccgaaatgccactgccagacgcgattcacaatgacgcgggcggtcagcggattttcccgatcggcaatgtgacgggccaactcgaggcggccgctgccgtccttgaaaggctcatctttcccgtacgaaaggacagtcaggaatttgcgcggagcgaccgggccgcgattcgtcggctcgccgcgaataaagaccacggaatcttttggctccggtttgtcgaccagggccatggcgcgggccggcgcgccgggatgggcgaaatcgatgctgctgcccttggcccggatcgtcgtctccggattcgtgaattgcaccccgagcgcaccggtcatcaacttttcatccggcatcatcaccgagtccccgctgaagatctggcggcgcagcgtatccatgggctccggcaacaccgtatcaattttcgcgacatcgaaaatggtcttctttcccggcgtcccaacccggacgtacttcgacaggccgagttgcttgcccaattgcccgagcgcatcggtgtaaacagcggcgacgtcttcgagcgatttcggcgccttggccgcgagcgcctgggcgatgaccggattgacctccggggagttcgccagatcgctggccagggccgggcctttctcggcgaattgatccgcgggcagcgcggcaaagcgcagccagggcccaaaaaccgggtcggtggatttggcattggccgactccttgatccggcgcatacacaccacggcgacctcggactcgaggccctgcttgcgggccatgagcccaaagctggtgcctttcagtcgttcgtccttcgaggtgatgccctgttgcgccatgagcagatattcgccggccttttccatcatgccggagacgagtttcacggcctgcgtgtgccgatagacgtcgacctccttctcgatggtcgccacggctgcctggtagtccttgtattcggccgagtccttgttgacctcggaaatgatcggctcctcggccggttcgatggagctgttgaagatgccgtgcaacgcgtagtagtccttggtcgggatggggtcgaacttgtgatcgtggcagcgggcgcacgccgcagtcaggccgagcagccctttgctcaccacgtcgatccgatcgtcgatgacgtcgttttcattccccatgaaccgcttgcccaccgtgaggaaaccgagcgcggccagtttcgacttgtccttctccgcctcgggcaggcgatccgcggcgatctgctcaacgatgaactgatcgtatggcaggtccgcgttgaacgcattgatcacgtagtcgcgataggtccaggcgaagggaaagagcggctgatgcttggcgttgagccggtcgccgctcgtgtcggagtaacgcgcgatgtccaaccagtgccgtccccagcgttcgccgtaagccggcgaagcgagcaggcggtcgacggtcttctcgtacgcggccggtgaggggtcggagagaaaggcatccatctccgccgggctcggcggcaggccggtgaggtcataggtcacgcggcgcaggagcgcggcctggtcggccggcgcggacggcgtgagcttcttttcggtgagcttcgccagcacgaaggcgtcgatcgggttgcgaatgaagtgttgtggatccgccggcgtgggcaccgcgggttgggagatcggtttgaaagcccagtgctccttcgcggtcttctcatcccaagccgccttgcgcgtcagcttgccgtcgcgcgggtctggcgcacccattttgatccactccgcgaaatccgccaggacggcgtccggaagaacgtctttcttcggcggcatggccatgtccggatcggaatcgccatgcttcatggtgatgaggagcagactcttgtccggcttgcccggaacgatcgccgggccggtgtcgccgcccttgagcaagccctcggccgtgtcgaggagcaggccgcccttgaccttcttcgcatccgcgctgtggcactcgtaacaactgtccgaaagcacggggcggatcttcttctcgaaaaaatcgagttcggcgagattggagggcgcggctgcgaaggcgtggaagaccccgccgaagagcgcggcagccgtgaatacgcaaggagccgtcaggcgaagactcatgaggacaaaattaggaaacaagaccctcgaccacattgccgaagacgtccgtgagccggaagtcgcggccattgtagcggtaggtcagtttttcgtgatcgaaacccagttgatgcaagatggtggcgtgcaggtcgtggacgtggaccttgttttcgacgacgtcgtagccaaactcatccgtcgtaccgtaagcctggccacccttgatgccaccgcccgccatccacgcgcagaacgcccggtgatggtggtcgcggcccggctcgccccgcgccccgcggtcgtgccgcggcgtgcggccgaattccccaccccagacaatgagcgtatcgtccagcatgccgcgttgcttgaggtcggtgagcagtgcgccgatcggctggtcaatgctttcggcctgcttgatgaggttgcccttcacgtcggtatgatgatcccagccgccggcccagacctggacgaagcgcacgccattttccacgaggcgccgggcgaccagcatgcgccggccgatttcgctgtcgccatacaagtcgcgaatggcttgcggctccttggtgacgtcgaaggtattcatcgcctcggtctgcatgttgaaggcgagttcaaacgattggatgcgcgcctcgagcacgggctcgtgggccagccgctcggcatgcatgtcgttcatcgccttgagcagatcgagctgccggcgctgctgcgggcgcgaagcaaactggctgcgaatgttttcgatgatccgatccggcggcgcgctgaccgacccaaccaaggtcccctggaaggccccgggcagaaacgccgagcgccagttcgaagatccgcccaatccgccgccgagggcgacaaagcccggcagattctggttctccgcgccgagcccgtagaggacccacgagcccatggaaggcttcaccagacggcccgagccggtattcatcatcaacgtcgcaaattcgtgcgccgggatgtccgtattcatcgagcgaatgactgcgatgtcatcgatatgcgcgccgattttcgggaagatctcgctcacctccaccccgctctggcccatcttggtgaacttgaactgcgtcggcagcggcaccccgccgatttccttcacttcctggtcggcgaatttctccaggcccggcttcgggtcccaggtatcgatatgcgacggtccgccctgcgaaaagatatggatgacgcgcttggcgcggccggggaacatcggctcccggggtgcgagcggcgagaggttgatcgcgccttgggcgctgctcccgagggattgcccgaacaggccggccaggctcagagcgccaaagcccatcccgaaacggtggagaaactgacggcgcgagaagcacatatcctccgcgctaggttgatgctgggtgatgtccatagtctgagggtagatttactgagaataaacaacggggaaccgtctgcttagcgaaaatcttccgcccagaacggccaacccccttggtggacgtaaacccgtgtcgctcgggcgagttgcaaaaaacttgtgttaacgcagccacccatgcacccggagcaggcgcccgacatctcccctgctaaggtttgccgggccgaccctacttccggcccgcaaacatcaagtaacgccacacaccgccataggccccgtgcaggcgatcggcgaccggggtgaaccgctggcgcaacggcccgtgcaactggccgtccatgcgcacgtgattcacccccatccagcgcgcgaagaccggcagcggcgtatcgtgaaaatccacgaccgcgatgtggccgcccggtgcgaggtccgcgtgggcggcggcgatggcggtctcgaagccgggattaaacatcgagagcgcgtaggaaaagagcaccagatcaaaggccgccggatcgcggagcggagcgtcgtaggcccgatgcaccagttccacccggtcgccaaaacgcgccaccttccgccgcgcgacttcgagcatcgtcccggacaaatcgacgccggtaatcgatgccgcgggaaatcggtccgcaaggcgctccagattccggccggtgccgcaacccacttcgagaatctgcgccggggccggggtggccgcggcgatatcgtcgagaatcgcggtgcgtccaaatagaaagctccaccgcgtcgcgtcgtagattcgcgcgtgcaggcggtagtagccttcgatcgcgttgggagccgccggcgcgctcatcgtcatcggacttcggcgaaatacaggctcccgtaggtgcccacgcggtccgtgagatggagcggttccgtccgctccgggaaaaagcgcagccgcgcccggatatcctcggggacgaagtccagggtcaaccctgcggaacgcagcagcaccttggtgcccgggcggctgttggcgaagattagctcccattcctcgcgcagcgccgcgggatcgtgccaggccagccagtcctgatgatcgagcagcacgaaatgcgaatagaccccgggattctgctgcaaaaactgcgtgacactgcaggtgtgcgttcggatccgcgccacgcgctccgcgagcggcgcgaggttctgcttccggagataattcgggcaacacgccatggtgtaggagcccgtgatatagactcgccagaaatagttttccgaagccggcagttccgccatcacccggcgcagcttgtccttcacatacgcccccaagccaccgggatagtggtcttcgatgagcttgatctggggggccggcacgccgagcagggtcatgaccatccgttggcggatcaaccagttgctcaagttgtcccagaccttgcgttcgaggagggcatacacctcggcctgctgcgccacggaatccgcgtcgagcagacacatcgcaaagtttttgatattcggcttggccttaaacagcgccgtcccgagcagccacgccgccgtgcccgcggtgccatgatagtaaaacgactttttgatcccgcccgggttgaaaaaggaaatctttgagtcccaaaacgtccgggcaaatttgggcaagtcctggcgcacggcgcggtagacctgcttgaactcggtgtgcgaaccgaggccgaagaactcgaagagatcgggaaaatccccgcgccgaatcatggccagcttcagttccaggagcgcattctggcggaaattcacatccaccgcgtgaatctccgccggaccgtcgagcagatagtcgagcgcattgcagcccgcgctggtgatcatcaccacccggctgtcgggttggagggcgagcagttggcgatcgattcgcggatcctcccagcacgcattgtagatgagctgccgaccgtggacatgatggaagatcaggtcctcggtggctttgaggaattgggcggcgggattggtcttgggcgggcgtccgaggtcggctggcatcgcgaaaaagggagggttctgggcaggaattttccagccgtcgagcccgcttttcggggggcggcgtccggggagcttcggggtccgttttccgcactgcaccgcattcatcaatatcctttcccggagcgacttacgaatggttttggcgggaatttctccgtatgttaaatccttgtgacaacatgggggtcagcgcatcttcaccctccaccccaaaaatatttgtcgcaacttgggagtttggcgctgttcttagctttgagtcggcaccacccgtctcgccaaccctctccccgcagccatgaaccgattcctcctcgccctgctctcctgctggaccgccgccattgccaccgccgcgaccatcccgcccgacctgaccggcgatctccagacgactccatccaccgtcactcttaccgatccccagcgcccgcactccatcctcgtccgcggccgcacccagggcggttatgacgtcgatctcactgccgacgccactttccgcagcagcaacgaccagatcgcccaggtcgatcccctcggctggattcatcccgtgagcaacggccaggccaccatcaccgcgcaagccggcgaccacacggccaccgtcgcggtgaccgtgcaactccccggcgcgcccgccgatcccagcttccgcaacgacatcatgccggtgctttccaaggccggctgcaacgctggcgcgtgtcacggctattccctcggcaagaatggtttcaagctttccctgcgcggcgccgacccggccaaggattatctcgcgctgaccgatgaattcgacgagcgccggatcaatcgcaccaaccccgcggccagcctcatcctcctcaaaccgctcggcgaattaccccacgaaggtggcgtgcgcatggatcgcggcagcctcgaggacgagactctgcgccgctggatcgccgccggcgcccaggacgatgcacccactctgcccaagctcgtctccgtcaccattcacccggagaaaatcgtctcgttgcccaaaacgcatcagcaattccaactcgtcgcccggtacagcgacggcagcgtccgcgacgtttcccgcatgggcatcttcaacgtgaacatccaacgcgtggccaaggtcgatgacgccggcctggtcaccgtgaccagcctcggcgagaccgcgatcgtcgcccgctacgagggcatttttgccgtggccaatttgatcgtcctcccgccggacaaaggcttccagcccgcgcccgtgcccgacgccaatctcgttgaccatcatgtgatcgccaagctgaacgatcttcgcatcattccgtccgcgccggcggacgacgagcatttcctccggcggttgactgtcgatcttaccggcattcagcccacgcccgagcaagtgctggccttcgtcgccgacaccgacccggccaagcgggacaaaatcatcgagacgacgatggaacgtggggcctttgtcgactggtggtcgctcaagtggggtgacctgctgcaaaactcgcgcaatacctccagcgatcgcgccgtctatgccttccgcgaatggatccgcgccgccgtggccagcaacatgccgctcgatcaattcgcccgcgagatcctcaccgcccgcggcagctccgaggtgaatcccgccgccgcgtatttcgccgtgagcaaggatcccgatgacaccattcagcgcgtgacccaggtcttctgcggcgtgcgcatgctttgcgcgcgctgccatccgcatcccttcgagcactggacgcagggcgactactatggcctgcacagtttcttcaaccaggtctcgatcaagcccgacccgcgccaagtcggcgtgctcaacgccaagaccatcctcgtcaatctgtccgcgccgaactccgtcaatccgcgcaccggccagccccaacccccgcgctatctcggcggcggtgagccccagctcgcgccgggcatcgaccgccgggccgcgtacgcccagtggctgaccgcgccggaaaatccgcacttcgcccgcagcctcgccaaccgcatctggagctatttcttcaaccgcggcatcatcgatcccgtggacgatctgcggtccaccaatccgccgatcaacggcccgctcctcgatgccctgaccaaggaactcgtcgattcccatttcgacatgcgccatctcatgaaagtcatcgttgcctcgcagacctaccagcgcagctcggtgccgaatgagaccaacgggcacgatgacctgaatttctcccacgccatcccgcgccggcttccggctgaggccctgctcgattcgctcgtccaggcgacggcggtgaaagagaatttcggcggcgtccccgccgggtttgacgccgcgcaattacccgatggcaatgtcaccagcccgttcctctcgcttttcggcaaaccgcagcgctccgaggcctgcgaatgcgagcgcgatctgagcacgaacatgctccaggcgctgcatttcatcaacggtcaggccatcctgaaccgcgtcaccaatcccggtggccgtcccgcgttgttgctgcaaaagaaaccgactgatgacgagctgatcgatcaactctacctctggtcgctggcccgccgtcccacggcgcaggaacacaccctggccgtgaaattcttcgccggctacggcgacaaacgtgccgaggccacgcaggactacatgtgggcgctgctcaacagccgcgacttcaccatgctccaatgatcgcgatgctgcgccgccttcttgtcctcgggtgttcgtgctttctcgcgctctccgcccgtgccgctgatcccactgcggcggccgaagcggcctccgccccggtcagcttccaacacgaagtctggccgatcttcaagcgccactgcatcggctgccacagcgagcaaaagaagaaaggcggcctgcgcctcgacgacgtcgccgcgctgctcaagggcggtaagaccggcccgcttttcgtcgccggcaaaccagacgacagcgaactcatcgatgaaatcaccggcgacgagccggagatgccgcagaacgacgccccgctctcccgcgccaaggtgcaacttctcgcgcgttggatcgcgcaaggcgcgaagatcgacggcccgccgaagtccgacgtgccgcccgtcaccattccgccgttctacaccatggctccggccgtcgccagcgtgagcctcagcgccgatggtaaatccgccgccgccgcctgccggagcgaagtgatcctgttcaacgtcgacgatgacaccg

SEQ ID NO: 366 - DNA, 16257 bp, synthetic construct
  misc_feature 1..16257: note = Synthetic
  source 1..16257: mol_type = other DNA
cacattgccttggactgcaattgctaaacctaagggggtatgaatggtccgttcctcgaacgcagaagtcgtgtgctcggtttgacggtgcattccaacgatcatccccgcaatatgaggcgtccctttgatcatcgtgaaaaggggcgcaccgctatctcctccccaactccggatatcaatcaacatcgttggaatcttggcgacgggagagagagggtgggaggcaatcgttccctgacgaagcactggccaccccgtcgaatttgcttcgagttgagcagggtaacccgggagccaaaccgtctgccccagtttgacttcgctgatcccccctgcggaagccttgagaattcgatcaagtcggatcggcttcatttcgatctgtgacggaatttctacctgcaaagccgcgatatcctcgctcgcgtgcttcttccagagtggctgaccatcctttctaataaggatcacgatttcttggcgactgagaactccgtttgtttctcggccccggaggatcatccgacattcgggtttattcgatttttcgaggagatgagccgcggtcaccaaataaacagctttggcgttgcggacaaaaaaaccagtgccggaatgcccgtcgtgcgtcacacggcacgtagcctctaaggtttctacaaaagcttcatccgcatgtccctgccataccaaacccaatgcaacgacaagcaacgcaagaccccgaagtttttgcaaaaacaccatgcgaatgattctataaaaactagtcgctcgtttcgacacctttcgaaagttgactcggtgcaaaaaaagagcagcccgcttgctctcgcaaacgggctgctttgcttaaacttcttgaactcttattgtcctgcggttgctcggtagaacttagctcccgatccagcacccggagtcaccttgagaggacttactgcgccagcgactgctgagtaagatccattgacagtgctcgattcttggagagttccggtgaaggtgatgttcagacttccgtctccattggaggcgacagaaaccgttggagtcaccacaaccacgccgccggggacgttgaaggtccgcatggcgatgacttgtttagcatcgggattgtcagcaagttgatttttgctcaaccagatcaccgagagggtattaccgcgccaatcaactcgagcgttcgacgttgcgagaacttcggcagtcggtagctctgtttcactgacttggaatacaccgccaattggagctcccgtcgcatcgaagaggcgacccaaggtcaaggaagccgtgccacctacggctgcagtcgcagctgtatcagtgtaaacgacggctactcggcctgaagcatcaatagcagcatccactcgtccgacggctccatgagggagacctgtatcgccggagagcgtatgagcccaacgtttcgtcccatcggcgttcaaaacggccacccagatctcacccgcacctgcagtcgcgagcacataggcgtccttgccgttcccgtggaatccgacaccttcaccgcgaccaccacctgcggagatttcactcccagtcacggtagcggcatcgagttcggctccgacaggatcaccagcgttggtgaacaggcgaagcttcgcccggccctccgcagcgtagcgcacagcaaaaccgtttgcagtgaccgctgttccgtgccagatctcgactttaactggagcggagctgagcaactggatgggcttcacttcggttccatcgggtttgacgatggcgacaagtccgtggttcgcaggaccggctccgccgtaaaggttgactaagtcatccctttgacggctttcacccacgatgacgagattgccgttcgacaggtaatcccagtcaccgatgcgaacgtcgccatcacgctcggcatagtcgtccgacagcccggaaacgatacccttggctgcaccgtcgttgctcagcaattgaaccgctgggaagtcaccagcgttttctcctgcagcgttgttattgattgcggcaaattcgggaatctccaaaccgagatcgaacgaggttgcacccatcccgaatccagccccgaagaggttccccttgatctttggtccccatgaggtgcgacccgagatagcggatccatccgtccggaagtaggataggaaacgtgattggattgattgaccagcgaagtttggatcgatggttgtgatcgtggtaagaggggtgagggacactccgctcggagagaagatcgtccaaaccgcttcttggtcacccaggtcatcgccgtcatcttcccaactcacgacgacgttaccattcgatagaaccgccacacctagtgcttcgctgttgtcattgttcagggtgctgttgggaggattcacatagaccgtgccacccaacggagcaaccccgctatcctgagcgagggctggtttcgtttgcttggaggttgcgatcggtgtgggatcttctgcgggaactggatggctcaacacggtataaaagttcacctcgttaggtgtgtttgcaccttcgtccggtttgttatcacggttgatctcacctttcgcggcgatcatgatttgttttgtggtcatcgccacagtcatacccaccgagcggatggtatcgccgttcgaggcgttgatgaaggccaagaagcttggtgtcaatggtttgaacgttttcgccacgccatccaattggaatactcgtgctgcaacttgctgcttgatgtagccagcgggtaagctgacccacgatacggtcaaacggttcaacgcatccacggctccgttgacgcgatccgcattgcccgcgaaactcgcttcgctgacgtcagagacggctacgaatgatttgtcgcgggaatcccaagccgcaacctgaacgatcgcaccagttgtcagtttcccagccaagtaaacgtaggggctgttgatgtgcccgaagaggcgtgtcccatcgccacgaccgcgatcgaacgcggcaccggaggtggattgatcggcagtcccggtggcgacaccagcattgtcgaagaaataaatcacgccaccagcacgcaccgcaaacccacctttgtaggcagcgaggttgcaccaaatatcaccattcgcgattttgaaggactctgtcaccacagttccgtccggtgcgaaaatagtggcaaccgatgcatttccatcaggattacgcaccctcgagttatcctgcaccatggccacgtaattaccattgtcgaggaacgcgaggtctccaccaaaacggccgatttgatttccgggtgcggcaccttctgtcaggcggccgttggcggaatccaaagctttatggaggggtgtctgcgccagtgtggttgtgtccaaggagtaggcctgaactgttccataacgtccgtctccaagacgatcaaaaccaagcgtccagcgaccgtctgattggaattgctcgaccaagtgcggggaggcttctccacccacaacgaagtttttggctccggggcgtttgtcaccagccacgcgcccagggttcccgttttggcgggagtagttgatttggccttggaaaggtttgccgtcatccccatggaatgcatcacctagacgcattgttccacctgcggcaggttgaatggcaacgacataccgttgcatcgaatccgaagtcacaccatcttcgacggtgaacgtgttcccctcgataaggaacgtgctggtgccgatcacacttgcgtttggttcccagttacccaaggcatttccagcagggatgattaatggagtgtccttgacaatacgtgtcaatccgaccccttcggcacttcccggtctaaaggttccgaacagccgaactgcaactacttggaccacttcaccactcacgagcgacacttccgggctgtttttgctcaaccaagtaaacgccaccaacccatcgcgccatgcaaccctcggattttctgccgagtaactcgcaaatgtttcgggggattcgagttcgctcacccagaacgttcccgattcaggggatccatccgctttcaaaacacgcccgaggacgatgtgttgacctgtgaagcccgcatcggtaaatgccacgaccacgcggccgctagcgtcgatcgccgcgtccaatcgtcccggattcgtcaaaactacgtctgtaatcgctggtttcgaataacgaatcgttccattcgcgttgataaccgtcacccacacttgaggaccgttcgcatctgttcccgaggttgcaaccacgtaggcatccttaccgttaccgtggaaaccaacgctatcaccgcgaccaccggcacccgcgagggcatacccggtcgcttcagcgaggttaatgttggtgctggtaggattgccggcgttatcaaacaaccggaccgtgcctgctccattttgcgcgaatcgcaccgcgaatccattcgccgtgacaccgactccgtgccacatttccactttttcagtgaactcactcaccaagctgtaggctttgacctccactcctgcaggggttactacgcgatacgcagcatgccttagcggtgctgcgcctccgaatttttcggtcaggtcatcgttctgacgactctcacccacgattacgatattcccagtcttgaggaagtcccaatcgccaatccggatatccccagcggtttccgcattagcatcgctcacaccactcacgattcccaaaggcgaaccggttccggtgagcaactgaactgaagggaagtcgccgccgccgcctgcgtcgttctggatctcagcaaatgcctcgacgtcaacacctagctcgaatgatgtcgctcccattcctacgttgttcccccaaggatcggccttaatttttggcccccatgaagtccgacctgaggtcgcggtgccgtctgcacggaaatacgataaaaatcggttcctcacaacctgacctgtgtaatccgggagcaaggaggtctgatcagtttcgggtgtaacataacctccgataggatcgagaatggtccataccgattccatatcggtaatcccatcaccatcgtcttcccatcccacgatcacgttccccgtcccactcaccgcaatcccgaggctctctgagttctcgttattgtgcactgagggcaggttcaagaagacggtaggaccttttgggttcaatccgttttcttccggagtgcctgggacggcctgagccatcgacacgcacgcactcgccatcaccgcagcgagaacgtgcagactttttgttttcattcgagtttcctaggtttgttgttagctgataccatcgcaaaaaagcggcacccagaccacgagacgcagatacgcatctttgaggaaaaagttgctaaacagatcgttggtaacagaagggattctgtagcttcgcaggttctataaacaaggaaacttctagacccttaggttcgattcctaggatctggacattaaatgccccaaaaaccctttaaaaacaggtaaagccccctgcgatgtcaccaaaaatggtgtcgcatccaacaccccctatggagcggtggatttgacttccaaacggccccagtaaccaaattcgttgatccaaccgttcgcgaagttctcggctcgcaacgtgattttctttcccgcaaacgaggagagatccacagttatttttttccaacgatcagcagtcgagttaatgatctctttttttaggagttgcccattcgcgataattcggagctcccaatcgccttcgtcatggctggcgacatcgatgatcagtccggtttttttcccaagtggcacatcgaggttccgctcaaatgcagatcccttttctctggagaacgggtgtgtcatcagaacattcgctcgctccaagtgggtaggtaattttcggggagtattctcgaattgaggagccactagattccatgccggtgcccagagcgcaatcgactctccgtctgttcgtggaggtttcggagttgtcgctgcaacggttcggcttgctgcaaaagttttggtatccgccgtgagtttcgccaaatcccctgcgccttggtgaaccactgcacgatagtggaacgttcgggattggtgagcatcgagactccaatcgccttggattgagggactgggattgatgaacccatagctatccacacgccaagtcgatgggtagcctagattcgctggatgatctaggagtgcgatcccataggtgtttgtcccgaagcgtcggcttacgtcgctccatgttgccctctgtccactcgcggttttgttggttgccccgttcgagttcaaaacctggtgcgcagggtcgaacgccatcctcacggcaagaccaccgaaatcatatcgaccaatcttgactgcagcctcgcgagcttccagtgtccagtcaatatcgaggctataagtattcgcggtcgtgggcagagaaaccgtaattgtttgcgattcttccagcacaacttcccccttcggcgtgacccattcagaaacacttcgccacccagcgtggtcctgctcctgcacaatgtcggtcaaccgcacaaaccgttgctgaccctctttttccgtccagaaatcttgcccgttcacctgatgcaatcctgtgaaaattccgtgctgccacggatggtcggcaggtttgtcctccgtcaatgtcacctgacctgtggagtctttcaccgggtgcaggtaaggtcgcgacttaggatccatcacataagtcactagatcggcccatccagccccattaggcatctttgcacgcacgacaagtgccttatcttttaattcgatcgagatcggcttgccctctttgggtggattcaagatgaaccaaatcagattcctaaaatccgcgtccggcatctgttccagaccctcgggcatgacggaaatctcgctgacccgtaacgaagcaatctccgccttccctacaatttcctctttcggtcccgccgcgagcaggcgaactcgagaatcgctattctcgaccatgcgcccactaaccacccggccgtccttcgtctcgacttccacattctcgtatccgtgacctataatttgattcggatcgatcacgttgctcagcaatgcatccaagctcgatcgccccacccctgtcagatccggcccgacctcgcccccctcgccatagagcttgtggcaactcaggcaaagcttctgggcaatctcatggcctgccttgaaatccacttcatgcggagtgaggatcaacgcttttttctccgcgatcactttcattttatccgcattcgtctcatggaatcgcccgatgacttgcagcgccttggcgcggactgcctcgtccttgcctgtgctgagagcccgaatcacggtcggtggaatatccgcaatggcgacccgcttcgcttggaccgctgcgaggaatggcaacgcccaacctgtccgcgaggacatcacctccgcagccgttcgtcgcactgtaggtgtaaagttttcccactgactcaagatcgccggtgccactggatccccgcccacttcgctcaaactacgcaaaacctccagtcgcactttttccggcgtccgacttttcaacacccgaatcagaccatccctgacgatgtcagatttctgccccctcaacgacccaagggcactgactcgggcttcctctgaggattgggtatccatcgcgacctgtatcgacttctccaccgcgaccaaatcaccccacatcgtgccgagttgcctcgcccgcccgaccaccgcgccgtcgccgtgctgcgtcattttttcgagaaacgccgtggtccacgcaccgggcgattgggtgcgccctcggtagccttcgatcaaaccatccagtgcggcgaccaccagcggcgtggcttccggagttaaactcaaaataaactgagacgctgccaaatagtgagcctcacgctggctatcgctgatccggcgcatgattttggtaatcaccttggtcgcgatcgtctggcacatcatcccgttatcggcaagccacctcagcgcatccgagggatcgatcgcgatactcggctccattgccatccaaaccatgaacgggatcaccgggtcgcttcctgacatcggatgcaacgcgagagtcgccagcacaggcttcagatccgcttggttgttattggggtgaggggtgttgatcgtaagatcgctcgagaccagctggcggagagctgtcgctacggcgagccgcacctgcgcgtcattatccttcgccaacagatccagccgtgtcatgacgttgatcgtcggattccctttctcccccatgaaccgtgcggtccaagtccggatcactgaattggaatccctagcagtaacatcaagcaaatcgtcctccagcaaaccactgctgccaagcgtccacatcgcggcgatccgcccgtccgccgaggttttgctgtcccgcagaagtgttgtcacgagtgacttcgttttcggatcccgccgttcgattaacaacctctgcgccatccttcgttgccaactattcgcatgattcaacgtctcaaccaactgggccgtcgtcgattgacccaatgccattcccgccggatgtgagcgcaccgccgccccgggattcttccccgtatgcaccacacgccagacccgcccatgcgcacgatccacaccctctggatccgcccccgcgttctggtaacacggatacttatcataccaatccatgatccacaccgcaccatccggccccacctgcgtactcaccggcctaaaccagccgtcattcgcccgcacaaaatcccgcacaatcgaactcacaaaacttgaacccttcggagtcagcttatcttggtgcaccgcgttatcgtggatattcccttgcagaattgtgcccttataatcgtctggaaactggttcccttggtaaatctgcactccggcatacgcagctcgaaaatgcttgtgatcattcaccgcgtgaagttgttcatacgcatacttatgcggaggactccccgcttgccggtcataaatcccacccgccgccatatggaacaagtgctcgatcacgcacgccgaaacgaacatattccctgccgcatcataatccaccccccaaggattactcgtcccttcggcgaagatctcgaacttcttcgtcacaggatgcaacctcgccaccgccgccgtcatctccacacccggatcccccggtcgatccggattcctcaccttcgacctcgtaaaaaccccatgcgtcatatagagccacccatctggcccccacgtaaacccattcaacaactcatgccgatcctccagcccaaaccccgtcatgaacaccttccgttcatccgcgacatcgtccccgttcgtatccttcaaaaaaagcagatccggtgcctgccccacatacgccccgccgttccccaacaacaaccccgtcgccaaattcaacccatccgcaaagactgtcaccttatccgctctgccgtccccatccacatcctccagaatcttcacccgatcccgcggcttcgttccctccgccgctcctaatggatattcgtaaagctccaccacccacaaccgaccacggtcatcccacgtcatcgccaccggattcaccacatccggttccgacgcaaacaaccgcacctcgaacccctcgggaaccacaaaccgtttctgcgcctcagccggtgccaacgcgggcgtgctggcaggagcatgttgacccgtcaactgccggcccgcagccaacgctggcgatccgcacaacacaccacccaaaatgaccaccgctgaaatcaagtttttcatcgctagaaatctcactaccatcccacctccacctttttagcaaataatcgcgaccccgtgaagtcaccataatctgcttgctttttctacaaaacggtttaggaaaaggggcaaatcactgacaggcagaaaacaataaggctatgaacgctgacaacaaaaccatctggtcgttcgatatcggtaaagcttccatcggcgaagcggtgcggcagggaatgaaattttcccacgttgaatccttgatcctccctgaggagtttgcagaaaccaaaaccgctgccggacgtcgccgcttcttccgcacccggcaggctcaccgggcccgcgaagcatggctccgaaaagttttcaaagaactcgggttagaagtcctttccggacgtgttgcgaaaccccatccctcccaaaaaaaacaatggatcgagcaacccgccgactcacggcttgagcaagaattcccgggcaaggaggaaggcgaaatctgttacacctcttgtcttcttcgcatcaagctcttgcgaggcgacaagcttgagccatggcaactttacaaagccttccattctgccatccaacggcgtggctatgatcccgacatcgcttggaaaacgaaggagcaaaaacgatcccttgccaatgccaagcccgacgacgacgagggtgtcacgctgaaccggatgaatgatttcactagggaacttgaagccatggccccgggtaatcctgaattccagcttccttgttattttgatgctcgggaaatgggcctgtggtctccagagaatccgcatcatttaatccttcgcattgatcacagcgcgaaaaccacacgcaaccaaatcgtcccacgcagtttgatcgaaaaagaaatccggctaatggtcgaaaaagctgccctccaataccccgtcttgaaaggcaaagccgactacctcctctacggcccatcaggccaagcctacgcctcttactacccggaacttcgaaaaaaacacaacctccacgaagggagcgtctctgattggcagggtgtcctgactcaaaaaatccctcgcttcgataaccggatcattgccaagtgcgcactgatcccacggctcaacgtctgcaaaattcgccctcccggggaaaaccaaaacgaagacgagaaacgaactgggttccatcgctcagcaatcatcgtcgccgaagtcacttacttgatgaaattaaaaaacctccggttttggcggggagaaaaggaggagaaggccacttcgcaagcgacgttgccgggcatgttccagtcatcgagagggcgacccatcgaggataagctcactcctgccgagttaaaggctctctttgaggacaccacctttaccggctacaaaatcacggcgactcaatggaaaaaatactgcaccaaaatcttaggcggctttcctaccaccggggctgaggaagtcgcacctccccgttcctcggggcgatccagttattgccgtccggctttggaaatgatcaaacgactcctcctctccggcctcacccccagccaagctcacgccgcagaactcgcacgtctcaacgggaataccaaaccccaccaaggattgatccctcaagatctccatttcctcacttgcatgggagattcatgggaaaaactctacctacccaatcaaaaactagaggcaatcgccaacctttcgaccgatcgcgtgacggctatccggtcgttgatcggaagccagaatgatcccatcgttcgccatcgcctcaacctattctattcccgcattctccatctcgaggaaaaatttggagaacccgaccacgtcgtcatcgaattcattcgtgaagatttcatgggtgataaagccaagtttgaactcaggaaattccaacgcgaacgggcgaaagaacgcatcaaagcccgcgaggatgccaaaaacgcggggcacgaaagccgcggagcaggtctcaggctcgaactcctccaacaacagggaggaatctgtgtttatacaggggaagctttggtcgtcacaaagctggatgaatatgaaatcgagcacatcgtccctcgtgaaatgggtggcccggattccgcactcaactacgtcctcacaacccacaagaccaatcaggccaagggcaaacaaaccccctaccaatggctctcgggcacaacagggtgggatagttattgcactcgcgtcgaaaagtgcttcgggatccgaagcaaaaaaaaggcaaaactcctcaccgccccggacgcgcatgagttggccgagaaatatactagccttgccgaaaccgcgtggatcacaaaactttctcaaacccttctctcgatccatttcgactggaagaacggcatcgccgatggcgagcgaaaagtcaccgttgtcaacggtagcctcaccgcgcggattcggcgaattaacaaactcaactcaatccttcaccccgatgccgcaaacgaggaggaagcggagaaaaaaaaccgcgacgacgatcgccatcatgccctcgatgcgatgtgcatcaatttcgtgcccgattggactaaaaatccgggccaacgcgactacggtttcttccggtttcccgatgaaatctatggcacgggaggccccctcaaatacttcaaagattatatcgacaaagtcacgccagagaaagtgtgcgtcgaaaaaccttctctcggcgagtccatctacggcctgcgccgcgccgaaccgatcgcaccgaccaaagccaaaggtaaaaaggccaaaactccggatgaccccgcagatctcgaatccagagggatcatggtgaaacggtttccactcaaagaccttgcctacaaaacagtcatgatgaaaaaggtcttcaacccagaattcgcacgcaaaggcatagaaaatctcagagattcccgcatccagtcgttggtccgcgaattcctcgaaacaaaccctctcgaacccgcgtggaacgatttttgtagggagttttcactcacaaaaccgggcaagaaacaacaccgagtccaaagggtttccctaaaccaaggtagcgcagacgagttcagagatcttgccaaatccggcaccaaaggcggccaattcaaaaaaggtgccaaagatcacaaagggcaaatcctctaccgcgattcccaaggaaaccccaaggtgcgacccatatacgttttcgaaagtaaccagaaagtcatcaacgagctgaaagcctcctcagcctcagtagaaatcatcgacattttccgctcaggcgaccgaatccaaatcactaaggacgccgggatgccccaaaaaccgataccaaaaggggtttataccctaaagacaattatttacaccggacaaactcaactcagaagtcttactcatcgcaagttgcctgcactctcggtcgggaagcttctcgaggcggggttctgcaaatacaccggcagttgagcaggaggaggccaccatggaaggggtgggtcggtgccggggatggaacaagcaacatcgatttttttgattatgaatttttatgagccatcacattattcatattctgaagcatgggtgttcccttcatcgagaccgtgggttcgtagtttgtcgcggggacgaccactcggagaaccgcattcccattgaagatgtgcgggcggtgatcatcgccgcccgtggtgtgcaaatgtcctccaacttcatttcgggtgtgctggagcaacacgcgatcatcctccactgtgacactgcttaccaaccctgtggggtcaccatgccagtgaaccgcgtcgtcgatcaacgagcatttttgcaccaagccgctcgcccagatcgcctcaatgcacggctgtggcaacggatgctccacggtaaaacgctgaaccaacgttcggtgcttcttcgtcgccaaatcaactcccctcacttggatcgtgccctcgaaaccggcgacatcgacgaggccaactgcgcccgtcgatactggcagctttattttccagccatcggctacaccggcaccaagcgcgaacgggcccaagaaactccacccaaccaaatgctgaattatggttatgccgtgctcgccgcgttatgtcatcgagcactcattgtctatggcctttcccccctgctcggggtcaaacacaccacccgctaccacgcacatccgttggtctacgacctgatggaaccgttccgtcctgcggtagatttcatgatcgcggaattcttggttgaacccgacgtctccatgaaagcatggtgcaaaaaagtaggaacccaattgcgcgaaacccgtgtccgttacaaagatcattccctgaaactcatggatgccatcgatgcctccgcctgttctctcgctcgaagctacagcgaaaaatcctccgctcccttttgggtgcccgagttgtgaaacagagtccgttccgtatggggtgggttatggccatgttcgatcttcccgtaggctccgatgaggagaaaaaagccgcctcgaaattcagaaaagaccttctcgacaacggctatctcatgatccaattctcggtctatgcccgcccctgtgtcagctacgatcaactcgccaaccagatcaaccgcatcaaagcatttgtgccctgcgccggaaatgtccggttaatgttcatgaccgaacaacaatgggaaaaaagctatacggtcatcggccccaactataaacagggaaaacgcgcagtggatcctaaaatcccgaaacaggtcgaattctgggaatgaaaccttagaagcacaaaaaaatcgcctctggaaacgtgctatggcagaggttccagaggcaaattatcagttaagacttccccccccgaagaagttcactacacgttacgacccttgttcattatgtcaaccgatttatttttaaaaacaagtttttctatgaatcccaaactccacggatgcctccggcatccaaaattgccaccattgtttatcgtgatgccggaggtgctcaaatcttacgccggtgcttttgcgatgccggaggcacccggtctcttcgctggcgattgttacgatgccggaggcatcccagcctgtagccggtggttgagcaacgcgacaccaccggaaaccaattcccaataacccgcaccccggaaggggttccagatccataccaacatgccatccacccacacccaccttctatatcacatcatttttgccacaaaaaaccgacaacccctgatcgcggacccatggcgttcgaggctccaccaatacatcggcggaaccattgctggtttggaaggcaccccgcagggcgtgggaggtgtcgcggaccacgtccacctattggtcggattaaaacccacacatcgcctctcggatttcatgcgggaccttaaaaaaacaacctcagtctgggtgagcgaggaaatcggcgttgcggcatttgcatggcaagagggttacggtgcattcaccgtcagtgcctcggcacgcgatgaagtgcggaattacatcgaccgccaagaggaacaccatcgccgaaaaacttttcgagaagagctgattgaaatactcaaaaaatctggggttacctacgacgaacgatatctagattaatccgccacccctccggggtgaagcagggaagcgtccagcgtaaagatgcccgaataccccgagagccaaatgcgccacaaagctggaatcaacccgatttcataacctctgttgaaccgatgccggaggcatcccagcttgtagccggtggttgagcggagcgacaccaccggacaccaccggacaccaccggacaccaccggacaccaccggacaaccaccggacaaccaccggagaccgcccaccaccaaatccccgcacccctgcggggtgccagcccaatccaacaacatcaaattgataaccaacaccctccgccaaccgaatcatgtctcccaatccgaaactccatttcgaaatccaaatccgcaattcacatcgggatcggctcacgacgaacaatatttcgattaatccgccaccccgctggggtggtaaattcgcgcgtcattgaaccggtggtgtcgctccgctcaaccaccggctacaggcaatcacccctccggggtgaagcaggcaagcgtccaacgtaaagatgcccgaataccccaagagccaaatgcgccacaacgccggaatcaacccaatttcacagcctgttgcggaaccgatgccggaaggctcccgagggtgtcacggtggttggagcgatgccgaagaacccgatctgataacctctgttgaaccgatgccggaggcacccgaacccgcagcgtttggtttcgtcgatgccggagggatccttacttgtcgcctttggttgatccgatgccggaggcatctg

SEQ ID NO: 367 - DNA, 15174 bp, synthetic construct
  source 1..15174: mol_type = other DNA
  misc_feature 1..15174: note = Synthetic
  variation 14836..15037: note = n is a, c, g, or t
tcggattggccccgggatacgtggccgtgacaatcaccgtcggcggagccacttccggatactccgagatggggagctgaaagagcgagatggccccgaggatgaagatgagaagcgacagcacgcccgcgaagatgggacgtgtgatgaagaaggaggaaaagttcatcgggagtggatgttacggtcagggcgtggctccgtgtcattgagcgccggccgcggacacctgcttcgccgcatccgcctgaaccggcgcgacgggcaagcccggctggggcagcctggccatgccgttgatgatgaccttttcccccgccttcaggccggagcggatgatgcgcctgccttccagcgcggggccgatgacgaccggcttgtaggcggacacgagctggccgtccttttcctccacgccgagcacatatttgttggcctggtcggtgagcacggctttttcatccaggagcatggccggatactccgccgtcacaggcagccgcactcgggcaaagagtcccggcgtcagctcgcccttctcattggcgaactcgcagcgcaccaccatgctgccggtggccgcgttcaggcggttgtcaaaggactcgatatggccgcgatgaccgaagccgctctcattggaaagctgcagttccaccggcacgcggccctggccgttggtgtaaagtttcttttcccgccgcagttcctggagccgcagcaggctgttttcatcaatgtccacatacacatgcaccggcgcggcggtgacgatggtcgtgagcacggtgctgccatccgtgacataatttcccggcgtggtcagcgcgcggcccacgcggccgctgatgggcgcgcgcacctcgcagtgggagagctgcagctccgccgagcgcacatccgccgccgcgctggcctgcgcggcctgggcctggtgccacgcggactcgcgcgcctccgcctgctcaggcgcgatggccttggcggccagcagggacgacacgcggtcaaactccagcctggccgcttttgccgccgcctcggtccgcgccagctcggcgcgcgcgccatcgagccgggtctggaaaggacgcggatcaatggtgaaaagcacctcgtctttcctcacgagggaacccgcctcaaaacgcaccccggtgatgtaaccggacacacgcgggcgcagttccacagtctccaccggctcgacgcgtccggtgaactcctcccattcgacgagtttcttctcctcgaccacgccaagggtgacttgggcgggtggcatttcgcccatcggcgggccggcagacggcctgccgcaggcggcgaggagcaggatgagcgggaggaaggcttgagttttcacgaggtgctttgttttttggggatttgccggaagtaaagttgaccagttggttaaaaagaggcgttgaacactcagtcttcgcctttgacgccgaggatgcggcgggcgccagcctccatctcgtcgagaaagctcaaatcgttccagatgcgggcgtgcagcagcaggccctcgccgtaggcaaacacgatccgtgccagagcgggagcatcgggcgcctcgatgacgccctggtagtgggcgtcgcggatggcgctttcatagtagcggatgaactgggccaggatctcctgcagcttgtcccgcagtttgtcatccgtggtgctcacctcggcgcccagggagtgaatggggcagccgagcacgcgaccatgcttttccttcatttcctcctgctcctggcggaattcgcggaagcatctccagatgcgctccagaggcgggatcacgggtgagaatgcctggtccagcttcttgcgatgctccgtccagccatgctcgatgccggtcaccgcgagctcggtcttcgattcgaagaagtggtaaaagctgccttttttcactccagcccgctcacaaatctgatccacggaggtgctgccgtagctgccggtccagatcagctcggtcacagcttcgatgaggcgttctttggcgtcggaggttcgtcccatgacgctctaaagcggcaactagacgattggtcaactattttctttttgaggcacagcttcgggattgaaaacgggtgctgtccgccggcaccgaccctgcgcggtttcaccgggcgcggcattccgcggaatttccttcaagctcatcctcaccgccgccgtctggatgtttcccggccgggcaaagaatccgcgcgcaggcttgaccggggggagcggctttctattctgcgcgccgctttcccccatgaacatccacgaataccaggccaaggaactctttcagaaattcggcgtcgccacacccgcgggcaaagtcgccgccaccgccgacgaggcgggcagggccgctgaggagcttggaggcgccggcctcgtggtcaaagcccaggttcacgccggcgggcgcggcaagggcgccttcaaaaacggcttcaaaggcggtgtccatgtcgtcaataccgccgccgaggcgcgggacatcgcggagaaaatgctcggccagactctcgtcacccaccagaccgggcccgagggcaagctcgtcagcaaagtcctcgtcgccaaatccgtggacatcgtcaaggagcactacatcgccatcctcttcgaccgcggcagcagcagccacgccctcatcgccagcaccgagggcggcatgaacatcgaggaggtcgccgaaaagacgccggaaaagatcatcaaggagttcatcagccccgccttcggactccaggcctaccaggcgcgcaaagtcgccgcccggctcggcctgaccggcaagctcgccgcccaggccgccaagctcttcctttccctctggagcctttatttgaagagcgactgctccctcgtcgaggtcaatcccctcgccatcaccgccgacggccaggtcgtggccctcgacgccaagttcaactttgacgacaacgccctctaccgccagaaggaggtcaccgccatgcgcgacaccaccgaggaggacccgcgcgaagtcgccgccagcgagttcggcctcaactatatcggcctcgacggcgacatcgcctgcctcgttaacggcgccggccttgccatgagcaccatggacatcatcaagctccacggcggcgagcccgcgaacttcctcgacgtcggcggcggcgccaccaaggagcaggtcgccgccgccttcaaaatcatcctcggcgacccgaatgtgaagggcatcctcgtcaacatcttcggcggcatcatggactgcgacatcatcgcccacggcatcatcgccgccgcgcgcgaggtgtcattgaccatccccctcgtcgtccgcctcgagggcaacaacgtcgaagccggcaaagccaccctcgccgccagcggcctcgccatcaccagcgccgacggcctcaccgacgccgcgaaaaaaatcgtcgccgccgtcaaagccgcctgaccccgccggggcgggcctccatcgagcccgttcgtacagcgtgcccgcgcgctgccgcgcatccgcgcgcggctttccccacatccaaccctcatgccagcctcccccaaaaaatccgccctcgccaaagccgcgcccgcgcccgggttcaagcagccccccgtgctcttcgacaaaacacaggccatgatccaaaagatcgaaaagcgcctcggcggcaaactcgtcacctactggaacggctcgcgcggctccgtctgccacaacgacgtcaccgccctcttccgcctgctcgagcacatcggccctcaggacaccctctaccttttcgtcaagtccgacggcggcaacggccgcgccgccctgcgcatggtgaacctcatccgccgctactgcaaaaagctcgtcgccctcgcccccctcgaatgcgcctccgccgccaccatgatcgccctcggcgccgaggagattcagatggggcccatcgcctacctcaccgccgtggacacctccctcacccacgacctctcccccattgaccgcgacaacgaccgcgtcagcgtcagcctcgacgaggtcaagcgtgtcatcagcctctggcgtcacaacgagggcgcaggcagtgacatgaacccctaccacgcgctcttccagtacatccaccccctcgtcatcggcgccgtggaccgcgccgactccctctccctcatgctttgcgaggagatcctctcccaccatgtcagggacgccaaaaagcgccgccagatcgccaccaccctcaactccaaatacccctcccacgcctaccccgtgctcatcgaggaggcgcgccgcatcggcctcaacgccgtgcccatggaccccggcaccgcctccatgctcctcgacctcaaccacatctacagcgagatggggcagaaggccaccaccgacatcagcgaccgcgagtcccacggcaacgagatcatcaacatcctcgagcgcgagcactgccagatctactaccagcaggacaaggactggttttaccgcgccgaggagcgccgctggatcgtcctcaatgatgacagctcctggcaccagatcaccggcagcaaaggccgcatggaccacgaagtcctcttcatgtgattccccccccgcccgccagaaccctgtttcgggcgccgggcttcacatttcctgtccaaaaccggcgcgcggcagccttgatcgtgtgtaaactcccccgtcatgaacaccgtcccccaccacgaactgctcacggaccgccgcgaattcctgcgcaggggcggcgccggtttcggcgcgctggcccttgcccatctgctgggggagagtcctctcgcagccgcgcttggcgacgcgggcggcaagccgggcagccccatgagcgcgaagctggcgcaccgcgcgggccgcgcgaaaagcgtgatctttctgttcatggagggcggccccagccacctcgacacgttcgatcccaagccgctgctgcggaagctggccgggcagcaactgccggagagcttcggcagcgtcatcaccgccatgggcgagagccgggcgcccctgctggccgacaagcgggagtggaggcagcacgggcggagcggcctgtggatctcggactggtgcccgcatgtggcgaggatggccgacgagctgtgcgtcatccgctcctgcgtctccgacggcatcaaccacgcgggcggcgtgtgccagatgaacaccggcagcatcttcggcggccgcccgtccctgggcgcgtgggtgaactacggcctgggcaccctcaatcaaaacctgcccgcctttgtcgtgctcaaggacagcgacgcgcaggtggtcaacggcgtgcgcaactggggcagcggcttcatgcccgccgtttaccagggagtgaacttcgacgcggaaggctcccccatttcaaacctgatgacgccgaaaagcatcagcgagcagcgccagctctccaagctggcctttctcggcaggctcaaccgcgaccacggccggagccgcgcctcgaactccgatctcgacgcccgcatcaagtcctacgagctggccttccgcatgcaggcggaggcgcccgaggccgtggacctcggccgggagagcgaggccaccaaaaaactctacggcctggaccagccgcagaccgccgtctttggccggaactgcctgctggcccgccgcctcgtggagcgcggcgtgcgctttgtgcagctctactccggcgccggcagcaagtgggacgcgcacgacaagatcgaggaaaaccacacccgcctcttcggccagaccgacaagcccgtcgccggcctgctcatggacctcaaagcgcgcggcctgctggaggagacgctcgtcatctggggcggcgagttcggccgcacccccatgagcgagaagggcgacgggcgcgaccacaaccccaccggcttcaccatgtggatggcgggcggcggcatccagggcggccagctcatcggcgccaccgacgacctcggcctgcgcgccgtggaccagaagatgcacgtgcatgacttccacgccaccatcctgcacctcatgggcctggaccacacccggctcgtctataaatacaaaggccgccccgagcgcatagacctcaacgaaggccacgcctacacaaagatgcggatggcctgaggcccggctcagccaaggccgaacgcctccggcagcagctccgcggcagtccgcgtcacagcgcgcccgttttgcagaaaggtcacctccgtggcgccgccgggcagggaaaactccgcgatgacctgccggcacgcgccgcagggcgggaactcatggccggggcagaccaccgccagcctgcggacgcgcatcccgccgccttccgcggccaccgcctggaaaatggccgcgcgctcggcgcagatcgtcagcccgtaactggcgttctccacattgcagccctggaacattccgcccgcctccgtctccagcgcgcaccccacctggaagcgcgaatacggcgcgtgcgccttcgcggcggcttgccgggccagggtgagcagatcggcgggcatgacggtgagggcgcgggagggagggtgggtggatgttgcgctcaggcagggaaggctcactcgaagagctcggggtagcattgccgcgccttgcggcgggtgagctccagcacctcgggggcggaggccaggcggcgggcggttttggccagctcgcggcattcgccggagtgcagcctgcgcaccgcgtgcttcacgcgcgccacctggcctgaggcgacgctgagctcgttgaggccgaggccgatgagcagcggggtcatctcgacatcggcggccatctccccgcagatgcaggcgcggatgccggcctggcgcgccgcctcgacagtgacggcgatgaggcgcaggatggccgggtgggtgggctggtagaggcccgcgacgcgctcgttgagccggtccaccgcgagggtgtactggaccaggtcattggtgcccaggctgaggaagtccacctcggcggcgatgaggtcggcggagagcgcggcgctggggatttcgatcatggcgccgatctccacgcccggcggctcgatgccgcgcgcgcgcagctcggcggcgcactcctccagcagcgccctggcctggcgcacctcctccacgccgctgaccatgggaaacatgatgcccacctcgccatgcgcggcggcgcgcagcatggcgcggagctggcgcttgaagagggcggggcggcccagggacacgcggatgccgcgccagcccaggaaggggttgggctcggcctcggcgagcatctcggcgtccagcttgtcgccgccgatgtcgagcgtgcggaagatgacctggccgggatgcatggcgcgcacggcggccgtgtaggcctcggccagccagtcctcggagccttcggggtcctccaggtggaggaactcggtgcggaagagtccgacatgggcggcgccgcagtcccggatggccttcatctcctcgacgaactcggcgttggcgcagatttccagcggctggccgtcggtggtgacggcggcggcgtggcgctcgatgtgcagggcgtcctcgaactgctcggcctcctcctcgcggctgcggtagccggccagggtggcggcgtcgggattgaggatgagcaggccctcctcgccgtcgagcaggaccacatccccggagtgcagctcctcgcagatgttgtgcaggcggacgacggcgggcaggccgagggagcgggcgatgatggccgcgtgggagttggcgctgccggtctccacggcgaagccgagcaccttgctgcggtcgagctgcacggtgtccgagggcgtgaggtcgcgcgccacgatgatgacgggatcctcgaacatcgggtggtccagcagttcgccgcgcaggtggcgcatcacacgctgggtgatgtccttgatgtccacgaagcgctcccgcaggtaggagtcggacagcccgcgcagggcgtccatgtgcctgcgcatgaggcggtaatacaccgcgtccacgcacacgagcttctcgcgcacggtcttctccacctgcttgcgcacggagttgtcctggaggatgagcaggtgcgtctcgaagatgtcggcctcgtcattgccctgctcctcgcgcacgcgggcttgcagggcctcgatctcctggtgcgtcagatcaagcgccgcgtgccagcgctccagctccctttccacatccccgggctggatcggctcggcgtccggctcgtcgaagtggtccttgagcacatgcaccggcgcgtgcgccactccggcggaaaccggagtgccctgccattggcggatgtcgggagtggcggcctggctcatgcggcggcattttcagccggacacggcggcggcgcaaatgaagaaacagcgcccggcccatgctccggcttgcgcgggacgccgcgcgcgcgaaagtgcgccatgcggacactggccatcggtgacattcacggctgctccaccgccctgcgcaccctgctggaagccgtgcagccgggcgcggacgacgtgctggtgacgctcggggattatgtggaccgcggccccgacaccaagggcgtgctggacaccctcatcggcctggaaaagaccacccaactcattcccctgaccggcaaccacgagatcctgttcatggaggccatgtttgaaaggctcaacctgggagcctgggaggccatcggcggcctgcaaacgctgcaatcctactgcggtgacaagccggtctcctggaacctcatccccgaagcgcacgtcgagttcatcgccgggcggtgccgccgcctgcatgagacggacacccacatcttcgtccacgccaacctcaacgccatgctgcccctccatgagcagagcgatgactggctcttctggacgcgcttctccgactcccacccgcacttctccggcaggaccatgatctgcggccacaccgcgcagcactccggcctgcccgccgtgcgccccggcggcatctgcctggacacctgggtctacaaccccgccggctggctcacctgcatggacgtggcctccggccagatcacccaggccagccagcgcggcgagctgcgcactctcagcctggacgcgctggacatggcgaccctgaggatggactgaggcaatggcgcccgtcagcatcgcaggcgggggaaaatgccgcgcctcccggcaaagccaccccgtccggcccgccgcgcgcgtgactgggcatgagcaaaacgacggcggcctgcagcgccgccagcgcatcacgccacagggaggggcggcggaaaagatcgagaacggagggattcgcgggcaaggcggccatcatgggcccttgcggatctggggcaaggggtttgagaacggaggctgaagcgaggaccgcgcgccagatgtgagcagtaagccaggcttccaactctttgaaaacaaatggattgcacggatttgcattacaaaacgcctggctacttttttaggatggtgaaggtgtccagccggtccgcatccaccgcgcccatgcccggcggcggcgggtgccgccacgactcatgcagccccgcgaaggtcagcagcccctccccgcgcgccgcgcacacccgccagggcagcttggcgcgcccgagcgtctgccactcaaaccacccgtcggcgatgaccaggcacctgcgcaggcggaaggcattgcggaaggcgggcttctccgcagccgtctcgctgcgcgcgttgatcagcttggccgccccctccgcatcccgcgcccaatgcggcaccagcccccagcgcatccgggaaagcgacccgcgcccctcataccccaccaccaccggagcctcctgcgtcggcgcgatgttgtaacgcggcggcaaatccacccgccccaagcgcaccaggtccgcgatctcccccatcttgtccgaatgtgaatatctcccgcacatgcgcatgaatgaacagtgttttatccgcctttcaagtcctcactttccccgccagaaaaatccctccccggattcccatcttgccatccacccccttttcttcgtaatatgcccgccatgagcacgatttgggcatttgatctcggcaaaggcagcatcggtgaagccgtctggaacactcagacaaagcagttcgatcacgtcgcatccctgctcattccccccgacttcgcctccaccaaagaagccgccacccgccgccgcatgtggcgcacccgtcaggctcataaggcgcgcgaggcctggctggatgaggtgtggaaagcggctggcttgactccgctggtgggccgtcgtgtgggaaaggtggatgccgatgggaattggattgagccaaaagactggaacaaaaaaggcccggacgggaagaaacggaagctaacctggaagctcaggcatgaaggtgatccacggctggagcgcgagttcccggccaaaggcgacaccacctgctacacttcctgcctgctgcgcatcaaactcctgcgcggagaaaagctggaggactggcaaatctacaaggcgctgcactcggccattcagaagcgggggtatgatcctgacattgcttggaaatcccgcgagaacaggcgcacaaggaacaagaagagtgaggatgaagacaaaggcaccgcagagcgcatggctgctttcgaaaatgaactgctggcaatgtcgccagagaacgaagatcaccgcatgccgtgctacttcgatgcatggatgatgggtctgtggaatcccgctcaacctgatgaattgaaagaccgaatcgatcatcgttctggaagcacccgcaatcgtatcttgccccgtcatttggtggaacgcgaaattcgcctgctcgtggaggctgcgggaaggcaactgcccgcgcttgcgggcaaggcatggtatgtgatctatggtccggctggcagggcgtatgcctcttattacaaggttgaacgtgaccagttcaagttgcgtgaagggggcgaatccgactggcggggtgttctcggccagaagattccgcgctttgacaaccgcatcgttgagaagtgcgttttgatgccgcgtttcaatgtgtgcaaggtgcgcagtgatgagcaaaaggcgcacggtgagcgtggcacgctgccgcaggaggtgactttcctcctgaagctcaagaacatgcgtgtgcagcggtcacccactttgcaaaatggcctgacgtccgtggagctggcacaagtgttcaatacttattgtgacaagggttggaaactcactgaaacgcagtggcggaagttctgcgccagcattttcactgttccagtgccacccagcctggaagtggagcctcccaaattggctggccgcagccgcttctgccgtccggctttggagattttgaaaagactcattctatcaggtcaaagcccgaaaacttttcatgcgtcggaagtggggcgtttgaatggcaatgccgatccacgcaaggggctggtagaagctgatttgaagttcctgcttgatatgggcgacacatgggaaggaatccatgtcccgaatcaaaagctggatgcgctggcgcagcgcacacaggattcggatgccgccattcttgagctcatcggctcgcaaaatgatccgatagttcgtcaccgtctcggcgcgttctggaaacgtctgcaatggatggaagaacagtttggtgatccccaggaaattgccatcgagtttgtgcgggaggatttcatgggtgaaaaagcattgatggattatcgcaagtttatcaaagaccgggaaaaggagcggaaacaagcgcgcagtgatgcggaagcggcaggctccatggagcggagcgccgggctaaagatggaattgctgcgcctccagggtggcatttgtctctacaagggaacaccgcttgctgagacagctctggatgaatatgagattgatcatatcgtcccccgcagccaaggcggccctgattcggctgtgaactacattctcacgacaaaggtcgcgaatgatgagaagggtaatcgcacgccatttgaatggctctctgcaacgtccggctgggatacctatgtgagccgcgtgaagggcaggcagacagccctgcgaaacaaaaaagtgcggctgctgctgctgccagatgcagcagagctggcagacaaatacactgccttggcggaaacggcctggattgccaagcttgcacaaactctggccgggctgcactttggctggaagaacggcaatgatgagcagggccggaaacgagtgaccgtcatctccggcggactcactgcccgcatccgacgcaagtataaactcaacagtcttttggccgacgaggatgcgagcgaggaggacgccgaaaagaaccggaaggatgaccgccatcatgcgctggatgccatggtgctggctttcattcccggctgggcgcgcaatgagagcaagcagaagtggttccggtttccagagggagtcacccgtgaaaacaccttcaagcactggttaagcaggacgctgcctcgcaatgagtatctggagaagcccaagctcgccgagactatctatggcacgcgcagggatggcctggagactgttgtcgtgcagcgggctgagttggtaaagctgacttacagacagatcaatccttccaagacggtgtatgacctcaaatatgccaaagagcagtttaaatcggtccgtgatcccgtcatcaagcgactgctgcttgattggtgtgatcgtggcgaatcagaagaggcatggaagaagtttgccgctgaattccgcgttccaatgaagaacgggggaaatgggcccttggtgcgccgggtaatcatgaatgttggcaaggttgatgaatatgtgaacatgtcgaaggaccggagcggcgcatggcgcaaggcgaagaagtcgcaccgtggacaggtggtttatttgctgcgaactcagacaaaggccggcaaagtcaatgagtctgccaaggtgtgtcctgtgtatgtttttgagtcagcgcaagaggtgatgaggagactcaaaaaagaacatggcgcaaacatgacagtgcatggtttcttccagagtggctgcatggtgcaaattgatgaagatgtgccgcatgagaagatgcctctgcctgcgggcagctacctgctcaattccattcgaactgacggagtggttaaactgactcgtcaagatggcaaaacttatccggacattcctcgatattcagtggcagctttgatcaaagctgggctgagccgagaagattaaaactaaacaagcaaagtccatgagctaccacatcctccacgtcttccagcatggggccatgctgggcaaggaacgcggccacgtcacctgccagggcagggaagaccccaagccgcgcacgatgccgctggaggatctccgcgccgtcatcattgccgcgcgcggggtgacgatgagcagcaacttcatcagcagcgtggtggagcgggacggcatcatcctgcactgcaatgagagctaccagccctgcggcgtcaccgctccgctgcaacgggtgattgacacccgtgcctttctcaaccaatgcgcgcgccccaagcgcctcaatgacaagctgtggggccggatgctgcatggcaagacgctgaatcaaacgcgggtgctgaaccgctgggacatccgcagcgcccacctgcaacgggcgctggagcagaaacaaattgatgaaggaaactgcgccaagcgctattggcagctctactttcccagcatcggctggagcgccaccagccgggacaggaaagagaacaccgcacccaaccagatgctgaactacggctacaccgtgctggccgcgctctgccaccgcagcctgctggtgcatggcctgacgcccagcctgggcgtgcatcacaccacccgctaccagagtgatccgctggtgtatgacctcatggaggctttccgcccgctggtggactgcctgctggccgagttcatgacggagccggatgcgagcatgaaggcctggtgcaaaaaagtgggcacggaactgcgtgagcgccgcgtgctgcacacgcgctactctttgaaactgatggatgccattgatgccagcgcgtcgagtttgactcgcagctatgcggcgatggatgccgacgccttctgggtgccggagctgcagtagccatcacgctccgcgtgatgagccctgcctggaaacctttttcatcactcggagtgtgatgactgctttatgaaacaaagccctttccgcatgggatggattctcgtcatgtttgatctgcctgtggtcacggaccgcgagcgcagggcggccacgcgcttccgcaacgatttgctggatgacggctatctcatgatccagttctccatctacgcgcggccttgcgtgagctatgagcaccaggaaaaacacatcgccaaagtgaagggccttgtgccggaggccggcaacgtgcgcatcatgttcatgaccgatgagcagtggaaaaaaagtgtgacggtcatcggcaagaactacgagcagggcaaacgcgcggtggacccggcaatgccccaacaaatcgaattctgggaatgaacccattttcagaatctgtgcgctgcgatgaaaaaaaaatggagcggcaatcggacgtgccaggcagaggtccgattgccgctcgatcagttaagacttcaccccccggcgaggaactgctgatcgtaatttctgtttcataatgttcgatttgagcggactgcgcaagtccaattctagcagacctcgccggnnnnnnnnnnnnnnnnnnnnnnnnnnnnnnnnnnnnnnnnnnnnnnnnnnnnnnnnnnnnnnnnnnnnnnnnnnnnnnnnnnnnnnnnnnnnnnnnnnnnnnnnnnnnnnnnnnnnnnnnnnnnnnnnnnnnnnnnnnnnnnnnnnnnnnnnnnnnnnnnnnnnnnnnnnnnnnnnnnnnnnnnnnnnnnnnnnnnnnnnnngccggggggtgaagtcaaaacaggctgggaccagcgacagcgcagaggcctattctagcagacctcgccggggggtgaagtcaaaacgaaccatggtcttgggagtaacgtcgatctattctagcagacctcgccgg

SEQ ID NO: 368 - DNA, 14793 bp, synthetic construct
  source 1..14793: mol_type = other DNA
  variation 8523..8560: note = n is a, c, g, or t
  variation 7196..7219: note = n is a, c, g, or t
  variation 8692..8712: note = n is a, c, g, or t
  misc_feature 1..14793: note = Synthetic
gtgcaatatcttgctccttgtcccgcatttcctcgtatgtctccaaaggtatttcaggaccggttggtcaaatcgtaatcttactaagccagccaagatagggcacctagggaacaaaaagcattcctgatatatcctgaatcccgacaagaataccccgtttgagcaagatgcaagccagcgcatcacgataagccatttgacgggacgcatcgggatatctcgcgtatagctgatgcagcggtgactcagcagagcgcaattgctttacaatttctttgtcggaaaggtttccggcaaaccttgccaccgctgccagttggtcctgtcggtatcgaggttttatatttgccagggctttggaactggaaaacgagaaggcttggccaaaattggcctccgcaagctcgatctgtttcttttctccttcacgatcataagcgaggttccgatccatagcgatcgcacccagcaaaaacggcgcggggacgcaaatgtcgtctttcccgtatttcgggacgttgatcaagatgtacagcggagatgtgcttttttcgtttatggccttattgaacatctccctcgtatagtcgccggcaaaggccgcggccaatgatgctaaaatcaccgctccgaacgctagaacccgcatattcacatctctacgagcgcctagggcaccgcaacaaaatctgagcatctgaatgaaagcaacaccccatgctcgggaaagattccccgccgaacaagtttagccctcacgtttccactcctgataacgctgctgaataatcggcgaaagcgtgtcaaacgtctgccatgtatcacttacatgataaagagtaggcagatcgcttccgactgagttctgataatcatcaagatattgaccgacatcgaaatcaaaatagttcttcgcaaaatcatttccctcctcggagagatcttcatcggtaaacttcccgtcgcaggcttgaaaaaaccacgccccaggtgtcagcccccgattcctgagcttctccagaatatcaggaaattcctcggcatgaatctccccgcctaagccgttcagaaggcaccaggaaacaaacattccaatatgcgtcccgccggctgcatttggaagatccgaggggaaattaccgccataatgccaggaagcatcgtcgtatttcatatttcaatgagtaaagcaaatttcaacaagcgctgcaacctctccaccaatcccgactagagggaggccatttgataggactttctaagataggcgaactggcgattgaacgggctgacatagtgactctcaccagactgcgcgaagcgaatcacttcgccgcacttctttaagatctccgccctgtattgatttttattaaaaaggaacacctttcgccccttggcgtagtatgccttccagagaataagctcatcatcatgaaagaccctaacgccgtgatcaattcccgcgcatccagcatatccgcacgaacaagtgaatatattatattcacaaccaaccgtggtggaacgaagcagcgccgcagcatctatcgtaccagcgaaagggactctgccatcgactttcaacctcagttccgccaaagtccctccacttccgcattcttcataatccacctcgacgagaagctccgagacgtggcccttgagcattcgctggtaatcagaaaacgtccgaggttcgatcaggtcggcattattctcggcaacttcggcggagacatcctcaataaattcatcgtacccgaaatatgtaagcttgggtacgtgcccagcctcatcaatgtgtacacggatgacgtaaggctccgcgaatagatcagaggccgcctcattcaaaacttccggcaccggccccgttccactctcttcttcgccgccgaccgtaatcctcacgtaaaccacggcatagaacccgccaaattccccatagagcagggagttgcagccaaattgcgactcgggaatcgtgagcggattgatcccacatcgccgaaaggctcccgccgctgcgtcgagtccccgctccacaatgtccttggagaggtgagagtttggatgatccagcgccatggcaaaaagcaagaggcaagcccctaatctacatttcctgagggttataaatcatggcccaggaaactccagtcaaggcttatatgcccggcccctgacccgaatggcggtaagataaggccggtttgggagtattttgccctgttggagtgcgtctcaggtggagatctggcttgccgccgcccgatttccctctccccaggcgactctcggagtaaccaagagtctggccgctgggtgaggagcgcgttttcatgcgcctttcgaccatcttggcgggaatttctccctcgaaaaaactcccttatcttaccgccattcgcccctgaccctcaaacacgcaagttcttttacgttgatgaaatctcctaaattcttcggggagcggccaacacttttcatgtacgaacacgaagaccgaccctattaattcgcggccttccctcgccaaaaacgaagggccgactcgtagtcagccgggcagatttgcacaaaggaaaactcctccacggcttcgagccacttcacgatcccagcagcttcgcgagcggagaatcccacgaacaactccgcctgtcttggctgcatatacgccctgtcgccttccgacctccccaagtaaagaccatcaagcagatagatgatcagatcatcaaaagcgacaagccgctcgtccttctgcgcgtctgaataaatcctttccaaaacgccaggaagccacctctttaaatcctctggcaccagtaaaacgagactggatttcaagctgtgaaactcctcttcggaaaagctccagacttccgtcgaaaagtttccaaacgcgaacttaagagactccgtaatctgcttcgtacctcggtgactagacaaattcgcccggcgctctgatttctgatttcgtccagccgccgtcatccgctcactttattcgaaaagtccaacgaaagccaagccgaccctgcctgagccctttttgaaatcttttccccataaccccctctcccccaaccccctacccaaaatccccgccacgtgctcgacaaggcctcctctcgcgccatattgatgggctgctatggagaaggccctttctgaagtcgcaaatgaagttctcgcttcctacgagcgtgtgggagacctgaacagcagcggcgcgaacctgccttccaagcgcgccatgggcgcggtctgcgaggacctcctgcaactgctcttccccgggtttcatgacgaggaggcgattcaaaagcggtcgctgcccgtgcttaccaggcatcgcctcgccaccatcgccgagcggctgaatacccaggtgcgccagagcctgcgcatcgtcgatcccggttgcccgatcgcgctgtcgcacgacgtgacgatcgagttttgccggcagattcccgccgtgcgcgagatcctgcacacggatatcgaggccgcctacgagggcgacccggcggcgctgagccgcgaggagatcattctttcctacccgtcgatggaggccatcgccatccagcggctggcccatttgctctacgaggcccgggtgccggtgctgccgcgcatcatgacggagtgggcgcattcccgcacggggatcgacatccaccccggcgcgacgatcgggtcgcatttcttcatcgaccacggcacgggcgtcgtcatcggcgagacgtgcgtgatcggcgagcatgtgaagctctaccacggcgtgaccctcggggcgcggagctttgccaaggacgactcgggccagatcgtgaaaggcggcaagcgccacccgaatgtcgaggattacgtcacgatctaccccaactcgaccatcctcggcggcgagaccgtcatcggggcgcgctcgaccatcggcgcgaatgtctttctcctgcacagcattgcgccaaattccctcgtcgtttacgaggaaaagcagctccacatcctggacaaggtgaaccgcaaacaggaggccgagctcgagtggtctatctagactacaacgccacgaccccgctggcgcccgaggcgctggaggccatgctgccctttctccacggggggtatgggaatccctcgagcattcacgccgccgggcgcgaggcccgggcgggcatcgacgacgcgcgggagaaactggccgccctgctcggggtgaagggccacgagatcatcttcaccggcggcggcaccgaggcgtgcaatctcggcgtgctcggcatcgcccgcgcccacctgccgcgcggccgccatctcatcaccacggcgacggagcaccatgccgtgctacatgcctgccagcatctattgcatcacgaggggtatgagcttacggtcctgcccgtggatgcctctggacgagtcgacccgcaggatgtggcgcgagccattcgcgccgacaccaccgtcgtctccgtgatgcatgccaataacgagacgggcgtgctccagcccatcgaggaaatctccgccctctgccgcgagcgaaaggtgtttttccacacggatgccgtgcagacctttggcaagctccccgtgcggcccgccgatctcggcgcggcggcggtctccatcgccgcgcataagttctacggccccaagggcgtaggcgctctctacctccgggcgggcatcgccacggcgcgcaccctccacggcggcgcgcaggagaatacccgccgccccggcacggaaaatgtcgccgccatcgtcggcatggtcgccgccgcggagaaggctctcaccgagggcatcgccgaccagccgcgccaggccgcgctccgcgaccggctctgggcgggcatccagcaggtcgagccgcgcgcgatccgcaacggcgcgccgaacgatctttcgctcggcaataccttgaacgtgagcttccccggcgtggatggcgaggcgctcctcatcggcctcgacctggagggcgtgtgcgtctccagcgggtccgcctgcatggtgggctccgtgcagccctcccacgtgctcatcgccatgggcgtcgcgcccggcgtggcgtcgtccaccgtacgcttttcgcttggcctcgcgaccaaagaggccgatatcgatcactgcctgcgtgcgctggcgtctgtcctcgcacggcaggcgcaaatcgcagccgcctgatgaaacacacgcaacttttgctgaagttcagccgcagcatcatgcggagcctcagcctcgtgcccgacctcgccgtcgtggccgaaaagaagtcgcccccaccgcgcaagcccaagccctccacccgccgcgaactcctcctcgaggccctcgccgccgagctcctgcgcgccgccgggtgccacgacctgaaggtcgaggtgtactggaactcccgcctgcgcaccaccgccgggctcgcctcctggcgcgatcacgcgatttacctgaatccccgcctcatggacgtctcgcaggacgaggtgcagcgcacgctgcgccatgagctggcccatttcctcgcccagcaccgggcgggccgccgccgcatcgccgcccatggcgcggagtggaagcgcgcctgcgccgatctcggcatcccgcgcgagtcgcgctgtcacgacctccccttcaagcgcgccaaggtcgcccgccgctacttctacgcctgccccgagtgcggcacccagctcgcccgcgtgcgcccgctgaagcgccgcgtcgcctgcctgcggtgctgccgcgcccacaatcacggccagtaccacgaccgcttccgcttcgtgcagatcgagccgcccaagagcatcgcggcgtaaccccgctggaggctccgggttatcccgtccgccgggtcaaattcgcgcctcggcgcaggatatctttccgccctcggcgcaaccggtgctctttgacaaggtcttaagcttagagcggattaagaaaatccggcgcgtttccgccccatatcgagaagattccagccatgtcgcggcacctcccggcggcgggctgcctgcctgctcgatctccctccgaggcagggggccatccgccgattcctccttttccgaagccgctcggagggcctttttgccattttccgacatcgttccaagatttcccttccgatcaggccgggatcgtgcctaaaagggcgctccagattcttccccacatgagtcaaagcatcgaatccgttctcacggagaagcgcgttttcaaaccctcccgcgaattctcaaagcaggcgaaaatcaaaaacttcgccgagtacaaaaagctctacgacgaatccatcaagaacccggagaaattctggggaaagcaggccgccgagctgctttggaacaagaagtggacgaaggtcctcgactggaaggccccctttgccaagtggttcgtcggcggcaagctgaacgtcagtgagaactgcctcgaccgccacctcaacggcccgcgccgcaacaaggccgccatcatctgggaaggcgagcccggcgagaagcgcacgctcacctaccaccagctccaccgcgaggtctgcgtttttgcgaacatcctcaagcgcaatggcgtgaagaagggcgaccgcgtcctcatctatctcccgcacatccccgaggccgccatcgccatgctggcctgcacccgcatcggcgcgatccacaccgtcgtctttggcggcttcagcgccgagagcatcaaggaccgcctcgccgacagcggcgcgacctgcgtggtcaccgccgatggcagctaccgccgcggccaggccgtgacgttgaaacaaaacgtcgaccgcgcgctggaaggcaacaccgccgtgaagcgcgtcatcgtctttcgccgcgccaacatggacatccacatcacggaaggccgcgatgtgtggtggcaccgcgaggcggattacgtctcggccgactgcccgcccgtgccgctcgacagcgagcacccgctcttcatcctctacaccagcggctcgaccggtaagcccaagggcatcctgcacaccaccggcggctacctgctcggctcgctgctcacgacgaagtacgtcttcgacatccgcgaggaggatatctactggtgtaccgccgatgtcggctggatcaccggccacagctacgtcgtctacgggcccctcgccnnnnnnnnnnnnnnnnnnnnnnnncggccaagcacgacctctcctccctccgcctcctcggcaccgtcggcgagccgatcaaccccgaggcctggatgtggttttacgagaagatcggcggcggccgctgcccgatctccgacacctggtggcagaccgagaccggcgcgcacatgatcacgcccatccctggcgcgaccccgctcaagcccggcacggccacgctgcccttcttcggcatcgacgccgccatcgtggatgacaacggcaaggaagtcggccccaacgagggcggcaagctcgtcattcgcaaaccctggccctccatgctgcgcaccatctacggcgacaaggcccgatacaagaagcagtactggagcgaggtcaaggggtgctacttcaccggagacggcgcgcgccgcgacaaggatggttacttctggatcgtcggccgcatcgacgacgtgctcaacgtcgccggtcaccgtctcggcaccgccgaggtcgagagcgccctcgtctcccatgaatccgtcgccgaggccgccgtggtgggccgtcccgacgagatcaagggccagggcgtcgtcgccttcgtcacgctcaagaccggcatcaaggccaccgaggacctctccgagaaactgcgcaagcacgtcggagccgtcatcggccccatcgccaagcccgacgagatccgcttcgccgaggcgctgcccaagacccgctccggcaagatcatgcgccgcctgctcaagcagatcgccgcaggcaacgccgtcacgggcgacacgaccacgctggaagacttcagcgtcctcgccaagctccgcgccagcgacgaataagaaacctctctcccgcaaggaaagccccgccgcgagccacccgcccgccgcggggcttttccgttttgcccggcagcgccgccttctgtattctcaaaggaacatgcggctccccctcctgctcctctgcgccgccctcgcctcctgcgcagcacctcccaaacccgcgccgccggaaatggtattcgattgcaaatcttccaatgccatcaaaaagaaggtgaacgcgatctactggtcgcgctccgacccccacaggatacagaaggccgcagaagccttgctggcattatcttcctccccctccgtcaacgaccgaaggggggctgcctataccactggggaaatgagctatctgttcgacccccagttcgtccagacgctgctcctgatgcacctcaacgatcccgactcgggcgtccgattcctcgccctccaggaattcacatgcacaggatatgactccacattcctcaagcnnnnnnnnnnnnnnnnnnnnnnnnnnnnnnnnnnnnnngagcccaaggttcgcgactcagcacgacgcctttgcaagcgcgcaagccactactatataattttttagaatcgccatctccccgacctatctctcccaaccaccgctgcctccgccgcacaaatccgaaannnnnnnnnnnnnnnnnnnnntcgcgaccttctgtaaaagccttcctgcctttccttcgttcccttcgcttcctccttgttcaacccttctgcctttccgtcttcctaaagccgcactcccatcaccaccccgcccctccgccacacaaatccgaaaaacttcccacttccgcgatcccacctccgacttcgtcatctccccttgcgcgccgcatcatccgggcggagatttgagcagggccggttccccggaacggaacacccccggcccgcagacgagccatgaaatggaacgcactccgccgctggctgggagtcggattatcctccctcgcctcgatctttgccggtcaccagcttcacgccacccccgtcaccaccggcgacgcaaagcccaagccccgcaacggcaaggaccccgtgcgtaatggcagcagctccggcggcgccttcgccggattcagcctcttccccctctcgaacgccgggaaaaccgtccgccagtacccctggcggtattccatcgtcaccaccaccttctgggtcggcgagcgccccacggaaaacaaccccgtccccaaccacaaaagctgctgggacccgcaatgggcccgcaactacggcggcaccgacacgccgaaaaaatccgcccgcaccccgtcctacacgcccgccgccttcaccccgcgccagaaccccttttacatcgccctcccctacaacgacgtcacctcgcagggcctcaagcccgagacctccagcgtcatcccgtggttctccgaggagtacaaggggccgaaggactccgtctgcaaaggccgctggatcgccatccggttcaaggaccgcgtctgctacgcgcagtgggaggacgccggcccgttccgcaccgaccactggcagtacgtctttggcaacgaacgccccaagcccaacctgaacaaaggcgcgggcctcgacgtctcgcccgccgtccgcgacttcctcggcatgaacgacaccgacgtgaccgactggaaattcgtcgagttcgccgacgtcccgcaaggcccctggtccgccttcggcgacaacaacaccttcgtcatcaaccgccgcgcccaactccagcgcgaagccgccgtcagcgccgagccaggaaagtcacgagcgaaggcggcggtggagtagggaacgagcagaagcgcatatcgatgacgaccaaagacatcatcaatacctgctagccatacaggcatcgaatgttcctgccgagagccccaacagccataagcttgccgttcgaatttaaataaggtagcagtgaaggatggctggcattagccgcaacacagtttggtctttcgatctcggaaaggcatccattggagaagccattcgtgacttagaaaccaattcttttcttcatattgcttctctacttattccatctgagtttgcttcaactaaagatgcccgcaaccgccgacgaatgcatcggacccgaatggcgcataaagcgcgcgaagcatggctcgatgaagtctggagagctactggacaagaaccgctgaaaaaacgaacagtctggcaaaacccagagacaaaaaaatgggagttaaagcaccccgccgacgagcgattggagcgcgaattccccaccaaagacgatacgacttgctatacatcctgcctgctacgcattaaacttctttccggggaaagactggagccatggcaaatttataaggcactttattcctcaattcaaagaagaggatatgacccggatatcccgtggaaagcaagagagtctcgaagacgtgaacagggaaaagaaaacgaggaagaaacgggaactcgggagcgaatggaggcttacgtagatgaattgaatgcgatgagcccgcttcaattggaattccagcttccgagctatttcgacgcctggaagatgggcctttggaaccccaaaaatcccacagaactcaaagatcgaattgattgccacgcccaaagtacgcggaacaaaatcgttccccgatggctggttgagaaagaaattcgtctcctagctgaaaacgcgggaaaacagattcccgagctagcgggtaaatctgactacctcttgtggggaccaactcgtcgcccttacgcatcttacgattgctctgttcgaaaggagtttggactgcgggagggcagcgtgaccgactggcaaggcgtggtaggacagaagacaccgagatttgataaccgcatcattgaaaaatgtacgcttatccctcgactaaatgtctgcaagatcaagagcgatggaaagaaccctctcccggaatcgcggattgtttttgagacgactttcctgatgaagctcaaaaacatgcgtgtacaacaaggcccgaccgagcaacgagggttaagcgccgcagagatcaatgcgattttcaaagatgaaaagtttaggagcttcaagatcacagaggctcaatggaacaaactctgtatttccatgggggtgcgcccacaacccggctatgaaacggtcgatcctcctcgcagtggggggcgcagccggttctgccgtacttcactggaaattctgaagcggctgattctgtcagggaagaatccgccggaatttcttgaagaggagcttcgtagactaaacggaaatactgacccgaagcgcggactcatagcagatgacttaaaattcatcgaaaaaatgggctccacatgggaagaaatccatatccccaatcaaagactggaagcaatccttcagctggcagggggagccgatgcagcggtaaggcaaatcatcggatctcaaactgacccaatcgttcggcatcgcctggatatcttttatcagcgccttcagtcactccgagaagcatatggaacgccaaagagtgtggtgatcgagtttgtcagggaggacttcatggggaaaaaagctgtcatcgaataccgggcctttttaaaaaaacgcgaggccgagcgcaaacgggcgcgtgaagatgccgccaagaccggctcgaccgaacgcagcgccgccctgaagctggaactattgcgagagcaagggggcatttgtctctacacgggctccgccttaaaagaaacggcccttgaacagtacgaaatcgaccacatcgtaccccgttcgaaagggggacccgacgctgtaatcaattatgtgctgacgttgcgctccgcgaacgacgagaagggcgataggactccattcgaatggctttccagaaccaatcagtgggacgcctatgtgcaaagagtggattctcgcggaactgtactcagaaacaaaaagaccaaactgcttctcaatgaaaacgcctcagagttggcagaacgttatacggctctggcagaaacagcctggatagccaagctatctcaggcaattcttgatgcctttttcggatggaagaacggcgttgacgatgaaggtcggaagcgggtgatttccgtgaatggtggtctgaccgccagaatccgccgcaagtatcagcttaattccattctcaacccgagtctgaacgaggaggaagccgaaaagaaaaaccgttcagacaagcgtcatcatgcgcttgatgcgatggtgatcaatttcattcccagttggacacgtgatacggccaaagagcatttcttccgatttcctagcggaatacaccgtgaaacgtttgtccaacagattgccaacgtaactccgcgaaatctttgtttggagaaacccactctgacagaaaccatttatggagcccgccgaggcgatcaaggtctcgtcatcgtgcagcgagccaagatcgtcgatctagcttacaggtcaattactccttccaaatcggtctatgacctgacctacgctgcgaagcagtttaaagccatccgggacgcccacatccgacgtttgctcgaagattttctgaaaagaaatcccaccgagcaagactggcaggaattctgcgcaagtttcgccctacctcgacgagatggaactttaggcagtcgagttgctcaggtgacgatgaacatcggttcagccagcgaatataaagacctgtccaaagacgagtcaggatcttggcgaagaggcaaacgccatcgcggccagatcgtctatttgactgatggaaaaccaaaagtaaaacccatctatgcgttcgaatccgaacaggaagcgctaaaggagttacttttaagcggtgcgaaaattgtcggaattttccgatctacatgtgcggtaagactgaccgaagcggtaacgcatcccaagacaccgctcgtcgcagggctatacgtactcaatacgattcgcgaggacgctttcgccgtcctaacagaccgcagcggtgctaggtctcagccaatatctctgaacaagctgctagcggctggtttccagcgagtcgaaagcttggaaatatagaatatgagctttcatatcctccacgtcctgcaacatggatccgtcctgtcaaaagatcgggggtttattgtttgcaaggcgcacgacggaggagagcggcggcttccccacgaggatctgcgagcggtagtgatcgcggcccgaggcgtcacactcacatcgaatttcatctcctcggtgctggaagaggacgggatcatccttcactgcaatgatcgatatcagccgtgcgggtattccgccccgctgacgcgagtagtggatcaaaaggcctttattaatcaagtgtcgcgacccagacatctcaatgggaggatttggcaacggctcttgaaagggaagacaacaaatcagcgcaacgtcctcgctcgcagcgagatcagcagcccgcatctggatttggcactacgcactgggtatattgatgaaggcaactgcgcaaagcgatactggcagctttatttcccctccattggctggacggcaacaaggcgtgaccgcaaagaaaataccacgccaaatcagatgctgaattatggttacgctgtactagccgcattgtgtcaccgaagcctcattgtccatggattgacacccgcactcggcgtgaaacatgcgacccgctaccgttcggacccgctagtgtacgatctgatggagccttttcgtccaatcgtcgactgcttgttggcggattttatgacagagccggacgtaagtataaaaatctgggctcggaaggtgggaaacgaactccgcgatcatcgcgtccatcacgaacgatattcactcaaattgatggatgcgattgatgcttgcgccagttcgatggcgcgaagctacgctgccctgagcgttgagccgttctgggttcccgagctgtgattgaaaaacggagtccttttcgcatgggatgggtgattgccatgtttgatctaccggtgttgaccgatgcagagaaacgtatggccacacggtttcgcaaagatctcctggatcatggatacctcatgctacaattcagcgtatacgcccgcccctgtgtaacttacgaacagatggacaagcacatcgcacaggtaaaggggtttaccccggcagccggcaatgtgaggcttatgtttataaccgacgagcagtggggaaaaagcgtgacggtcattggccccaattatcagcagggcaagcgagctatcgacccggaaatgcccaaacaagtcgaattttgggaataaaagaaaaaaacatcgttcggacgtgctatgcagtggtccgaacgatgttaaatcagttgagacttcaccccccggcggagtcactttctgctgtaagagtgtatctttcagccccttctgtccatcctattctatcgaacttcgccggggggtgaagtcagaacccgctgagaaatgggaaaagaaccttcccaattctatcgaacttcgccggggggtgaagtcagaactctagtgccgtcatccgtgcgcgttctgccattctatcgaacttcgccggggggtgaagtcagaaccctggatcgggaagggaacgtatcgactctattctatcgaacttcgccggggggtgaagtcagaaccagagccatgccgtcaacgatcaatcggaattctatcgaacttcgccggggggtgaagtcagaacct

SEQ ID NO: 369 - DNA, 5488 bp, synthetic construct
  source 1..5488: mol_type = other DNA
  misc_feature 1..5488: note = Synthetic
ggacgcacgacgagccgggtcgcgcatcaggactacagcaactcagggtatgaccgcggacacatggcacccaactacgccatcggcacgcgctacgggcacgaggcgcagcgggagaccttcctgatgagcaacatagcgcctcagtccccggacctgaatcgcatctggtggcgggcgctggaggagaaggaggccaaccactttgccgtgcggctggaaagagtctgggttatcactggccccatttttgactccgcccccaagcgtctacgcggtggcgtggaagtgccagtggccttttaccgcattctgctcgacgaagaagccggccaaccgcgtgcgctggctttcatcgctccgcagactgccacggggcgcgaatctctcgacgcgttcctcaccagcgtgcgggacgtggaagcgcagaccggcttggacttcttccccgaattgcctctggatgcacagggccgactggagagcattaaagccgcgcgaatttggtgaagttcgccggacatttgacgccttgcaaccaccaacggtttttgagctttgaattccttgccgcttagatcaataaaggagcatgtcagcaaaggattatgttctcgggggaaccgcgcctacggaaagcgcccccactccaaaccacgtctgggctttcgatctcgggaaaggctccatcggcgaagccgttcgccaaggaactgtcttcagacacaaggcatcgttcctaattccgggtgactttgccgagacgcgcacagcgcgcgatcgccgccgcatgtggcgcacacggcaggcccaccacgcccgcgagcagtggctgcgggaggtttttcagtccgctggactgccggtgctttacggtcgcaactacgacgcgaagtcgggcgaatggaagccgggtgaaccaggcgacccgcgcttggagcgcgagtttcccccggcgggtgacgatacctgctacacctcctgtctgctccgtatcaagctgatgcggggtgaaaagctggagccgtggcaggttttcaaggctttccattcagccattcagcggcggggttatgatccgaatatcccttggaagacccgcgaagctcgacgatccaaagcgggggaagaagcaggggaggaagccggcaccgagcagcgaatgcgggacttcgagaaggtgctgcatgagatggcacccggccagacggactaccactttcccgcctacttcgacgcttggaagatggggctttggaatcccacgcagcctgctgacctgaaactgcgtggggactgccacgctcaaaccacccgcaatcaaatcgtcccgcgcaagcttgtcgaggcagagattcgccggctggtcgagggtgccgcaaagcattacccgtcgctcaccgacaaggctgactatctgctcttcggtccgtcgaagcagccgtatgcctcctacaacaccaacccgaacaaggaaccgtttctgcgggagggtgccgcgaccgactggcagggcgttgtgggccagaagattccccgctttgacaaccgtatcatcgccaagtgcgcgctgattcctcgcctgaatgtttgcaaactgcgagaaggcgagaaaggccagccgcatcctcagtcattggtggccgttgaggtggccttcctgatgaagctcaagaacctgcgcttccagcgggcacaacagcagtcactctcggcagtcgagattcgcgttatcctcgatgacccgaggaggaagaactgggccatcacaagagccgcatggaagaagtattgcgtcggcattggtgcagtgccgctacccgggcacgaagaagttgagtcgccccgtttttctggccgtagccgcttctgtcggcccgcgcttgaaatacttaaacggctgattctttccggccagaaggcctcggagtttttacgcgatgaactggcccgtctgaacggaaaccaggacccgcacaaaggactggtggaatccgacttcaagttcctccgcgagatggcggagcgcaatgacacttgggacggcctctacatcccaaatcagcagctcgacgctttggcgcagtcctcggctgaccccgacgaagccattcagcggctcattggccagcagaatgacccagtggtgcgccaccggctcgacacgttcgccaagcggctcagggcactgggcaagcacgggaaacctgaccatgtcgtccttgaatttgtgcgtgaagacttcatgggcaagaaggcgaagatcgagctgtccaagttcatgaagcagcgtgcagaggagcggaagcaggcgcgggaggaagcagccaaggccggggccaccgagaagtccgccggactgaagttggaactcctccgcgcacaaggcgggcgttgcctctacaccgacgcgggcttggagccgtcacgcctcgacgaatacgaaatcgagcacatcgttcctcggtcgcgcggcggccccgatgcggttttcaattacgtgctgaccacccatgccgccaacgatgagaaggatgacggcacaccctacgaatggctctcctcaaccggcggttgggatgcctacgtgaatcgggtgcgctcgcgctcgcttgcgttgcggaacaagaaggtgcaactgctcatctcgccgaacgcggaggaactggccgagcgctacaccgccctcgcggagaccgcgtggattgccaagctcgcgcagaccattgtcggcctgcacttcggttggcgcaacggtgcggacaagcaggggaacaaacgcgtcacggtcatctctggcggcctcaccgggcgtatccggcgcaagtatggtctgaaccgtatcctcaatccggacgcgcaggacgaggaggaggctgaaaaaaagaaccggaacgacgaccgacatcacgcgctcgacgcgatggtgatctcattcatccccggctgggcgcgggacgcaaagaaggaaggattcttccgcttcccggagggcgtgaaccgcgagttcttcaccaaggagatcgcggacgtgatgccgcagaatctctgctacgagaaacccgctttggccgaaaccatttacggtgcgcgcggagttaaagcagagcgcgtcatcgtccagcgcgtcgagttgttcaagctggcgatgaaaggcatcgctccgggcaagaccaagttcgacctcgactatatggccgcccaaatcaaggccgtgcgggatgggcacattcagcggaagcttgcggagtttcacgccacctcgccagatgaggccaagtggaaggcattctgcgacaatttccacctcgcggggaagaacggctcgctaggcagtcttgttcggcgggtgttgatggatgtgggcgagccgacggaatacaaggacctatccaaggatggcacgggcgcattccgcaaggcgctcaagggacatcgtgggcagatcgtgtatgtggaaacgagcaccgataagaaagggaagtcaaaggagaccgcgcaggtgcgccccatctacgcctttgattcgcctgcgctcgtcctaagaaagcttcgggaagagttgggcgagcggtgccgaattatcggtttcttccaaagcggctgcctcattgaggtcacgaagccggttccgcatacgaagctggcgctgccgccggggaggtatttgttgaacacaattcgcaccggctccaaggacgtaaaggttactacgtccgaagggaagacgcatcccgacattccccgctacaacctagccgaaatggtcgctgctggaatgaggcgcgcagattgaattcattgtgaagccatgagccaccacatcctccacgtcttccaacatggggcgctgctctcgaaggaacgtgggttcattacctgcaaggcggaggatcagccggtgcggcggctgccgcatggggacatccgggcggtcatcatcgcggcgcgcggagtgacgctcaccagtcatttcctgtccgcgattctggagggggatggcatcgtgctacattgcgacgaggcgtatcagccgtgtggggtcacggctccgctggcgcgcatcgtggacacgcaggcgtttctcaatcagaacgcacagccgacccggctcaacgcgcggttgtggcaggagatgctgcgcgggaaaacggcgaaccaggcgcatgtattgcagagcaagaacatccggtcggcgcatctggagctggccttgcgcacggaggagttcgacgagagcaactgcgcgcggcgttactggcagttgtatttcccgtccatcggatggggtgggagcaagcgggaccgcaaggcggattcaccaccaaaccagatgctcaattacggctacgcggtgctggcggcgttgtgccatcgcagcctcgtcatccacggtctttcgccattactcggcgtgcagcacaagccccggtatcgggcgcatccgctggtgtatgatctcatggagccgttccgaccggcggtggatttgatgctggcggtgtttatgatgtcgccggaggtgacgatgcgcgcgtggtgcaagcacgttggcacgcaactccgccagacgcgggtgcggcacgggcaatattcgctcaagctgatggatgcgattgatgcgagcgcgaactcgctggcgcgcagctacgcggcgaaggacgcggacgcgttctgggtgccggaactagcggcggcctgaaacacgccagaggaaatctgaaatctaaagactcagatagccgtgccccacagtccgtatcgcatggggtggattcttgccatgtttgaccttccggtgatgaccgacgaggagcgccgggctgccacccgtttccgcaacgacctgctagatcatggctacttgatgattcaattctccgtctatgcgcgaccttgcgtgacatacgatctgctggacgcgcagatcgccaaggtaaaatgcttcatccccaccgccggcaatgtgcggctcatcttcctgacggacgagcaatggaagcgcagtcataccgtcatcggcgggaactatgcggacgcgaataagcagggcgagctgctgctcggcagtggcgtggccccgcccccggccagcggtcggaagctggcacggaaggacaaccgggaacaagatcccaagattccggggcaagtggagttctgggaataaaaagagcggcgctccaacgtgctaggcagtggttgcagcgccgccgaatcagttaagacttcttccccccggaagagctgacttaaactgccttaaatcatattatttcaatgctttgcgtcaagccaagtttaagccgctcttccggggggggaaggcaaaacgatgccttccttggcgagccgttcgctctgagtttaagccgctcttccggggggggaaggcaaaacccgcccgacgcgcacaacgcaccgcgttcaagtttaagccgctcttccggggggggaaggcaaaacttgtcccacgccgccagcatcg

SEQ ID NO: 370 - DNA, 4881 bp, synthetic construct
  misc_feature 1..4881: note = Synthetic
  source 1..4881: mol_type = other DNA
ttccggggcaagcgcagggctacccaagggctacccaagggcggcccaagggctacccaagggctacccaagggggcgacaccggagcaaccccggagcaatgccggagcaataccggagttcccggctatccccttcctgccgccacagtgtcaacaacacaactcgccaggggtcgtctgggcactggggcatttcttttgcggtatcgtgaggacagcccttgcggccagcgacccgctgcccggcgggaaaggagttcttgctatgggccagcatttctgatagtacccagcccacacgaaaggaatctctatggagctaaatcggcaggaaaccgtctgggcttttgatctcgggaaaggctcgatcggtgaggcggtgcgacaaggaacgcgattcttgcacaaggagtcgctgcttatcccagcggagtttgcggaaacaagatcggcagccacgcgccgccgcatgtggcgaacgcgccaggctcacaaggcgagggaagggtggttggacttggtgtgggctgccgccggtcttgagccactgcgcaagcgggaagtctgggagagccccgtcacggggaaatgggaactgaaacagccagccgattaccgcctggaacgggagtttgcgccgaacgttggtgagaagacgcgggacggcgcgccttcggacgaggctggagccaatgtctgttacgcttcctgcctgctgcgaatcaagttgctgcgcggggagaagctggagccctggcagatgtacaaggcgctgtactcggccattcagaggcgcggctacgacccggatattccgtggaagacgcggcaacagcggcgaagtgaaaagccggaagatgacgaaggcacaaccctgaaccggatgcgggactttgaaaaggatttggcggcgatggcccccgacaaaccgctgtaccagaaaccctgttacttcgacgcatggaagatgggtttgtgggaccccgcgcggcctgaggaactgaagcagagacaggactgccacgcgcaaaccacccgcaaacaaatcgtgccccggaccatggtggaggctgaagtccgcgccctcgtagaggccgcggcagagcaaatcccggcgctcaagggcaaggcggattacctactcttcggccggccaggaaaggcctacgcctctttctacgcggacgagcggaagcgccacggcttgcgcgagggtggcgccaacgactggcagggcgtcgtcggccagaagattccgcgctttgacaaccggatcatcggcaagtgcgtgctgattccgcgcctcaacgtctgtaaaatcagaaccggcggtgatggcgagctgcacccccgctcgcgagtggcggcggaggtggtcttcctcatgaagctcaagaacatgaggtttcagcacggcggcggtgtgcgcgggcttactgccaaggagattggcgagattttccatgaccccaaacgaaacaaactggggctcacgccgacgcagtggaagaaatgctgtctgagatttggcggcttgcctctgccgggccagtacgaggaggtggaggagccccgcttctccgggcgcagccgcttctgccgtccggccctggaaatcctgcaacgcctgatcctgtcgggcgaggcgccgccgcaggcgcacgcgaacgaattggcgcgcctgagcggcaataccgacccgttgaaaggtctcgtccaagcggacctcaagttcctcctgcaaatggggccgacctgggaaggcatctatgtcccgaaccagaagcttgaggcgctggcccgctccacggacagcccgcacgaggccatccggcaactgatcagctcgcaaaacgacccgattgtccgccaccggctcacgctgtttgccgaacgcctggattacctcgctgtgacgaagaagtttggcacgcccgactatgtcgtgctggagttcgtgcgcgaagacttcatgggcaagaaggccaagtttgaatacttcaagttccaacgcgaccgcgcccacgaccgggccaaggcccgcgaggaggcagccaaggccggcgcgacggagagcgcggccggattgaagatggaactctacaaggcccaatgcggcatttgcctctacacgggtgaggggctggcggtcacttcgctggatgagtacgtcattgaccatattgtgccgcgcgccaaaggcggccccgatgcggcggtgaactacgtcctgaccacccgccgcacgaatgatgataagctggacctcacgccctatgaatggttatcaaacaagccgggctgggatgcttacgtcgagcgggtgaagaagcgcgtcggcacgctgcgaaacaagaaggtgcagttgcttacctcacccgacgctcacacgctcgtcgataaatacaccgcgctggcggagacggcctggatttccaagctggcccaaaccatcgtggctctgcggtttggctggcccgggggcattgcgaacggccaacgcaaggtcatcgtcgtttccggcggactcaccggccgcatccggcgcaaatacaagctcaaccgcctgctcaaccccgacgcgcagtccgaggaggaagcggagaccaagaaccgcaatgacaagcggcaccatgcgctggacgccatggtgatcagcttcatccccaactgggcgcgcaatgccaaattcactggcttctttcgcttccctgatgcggtccatccggagctgttcgcgaaggagattgcggaggtcgttccacagaacgtctgtttcgagaaacctgctttggcggaaacgatttacggcgctcgcaccgattatggccaacgggtcatcgtgcaacgcacggaactgctgtcgctggcgatgaagccgacagcaccgggcaaatctgtattcgacctcaagtatgccaccaagcaggcacaatccgtgcgcgacgcggttattcaagagaggctgctggagtttctggcgaccaagcccgatgaagccacatggcggaggttttgcggcgaattccatctcaagcgcaaaggcggctctgatgggccgcgggtggaatacgtgactgtgagtgtaggcgagccgaccgaatacaaagacttgtcaaaggacggcagtggggcttatcgcaaagcgttgaagggccacaaggggcaaattgtttatctggaggagaacaggaaaccacgggttcgcccagtctatgcccacgaatccattcgcgctgtgcgcgctcaattgctcatggagagcgcagccatcacgattaaaggtttcttccagtcgggatgtctggtcgagctcacaggaaacgtggcgcatcccaagactccgctgcctgccggcaagtattcgctgaatacaatcagaagggatggatttgtggtgttgaccaactcttcgggtcaggtttcacagccaattggattgactaagctcctgccggctggattccggcgaatagaagaaaccgcatgagccaccacatcctccacgtttttcaacacggtgccgtgctgggccgggagcgcgggtttattgtctgccggaccagcgggcaggaggaccgacgcttgcctctggaggatgttcgcgccgtcattattgccgcgcgcggggtcactctcacgtccagcttcctttccggactgctggaaaccgacgggatcgtgctgcattgtgatgaacggtatcagccatgcggctggactgcccccttggggcgcgtcgtggacttgcaagccttcgagcaccagaccgcccgccctcggcgtctcaacgaaaagctgtggcacgaaatgttgcgcggaaagaccctgaaccagacgcgcgtgctccagcgtaagcaacttcgctccgggcacctggaactggccctgcggcagggagaattcgacgaaggcaactgcgcccggcgctactggcagctttacttcccggccatcgggtggacggccagtcggcgtgaccgcagacaggacacgccggccaaccaaatgctcaactacggctacgccgtgctggccgccctttgccaccgcagcctgatcgttcacggtctggtgccgcaactgggggtgcaccacaaacctcgctaccgctccgacccgctggtgtatgacctgatggagccattccgcccggccgtggatctcatgctggcggagttcatggtggagccggaaatctcgatgaaggcctgggcaaagaaagtaggcaccgaactgcgcgaccggcgggtgcgccgcggaacctacaccttgaagctcatggatgccattgacgcgtcggccaactcgctggcgcgcgcgtacgccgagcagtcggcggcgcgcttctgggtgcccgagttggccgaggccggcaccgggccatgaacaatagtccgttcagtatgggctggctcatggccatgtttgatctgccggtgatgacgcatgaagagcgaaaggtggcgtcgcgcttccggcatgacctgctggacgacggctttctgatgatccagttctcggtctatgcgcgcccatgcgtgaatttcgagcagttggacaagcatattggcagcattcagaaggtcgtaccggaagcgggaaacgtccggctcatgtacatcacggacgaacagtgggccaaaagcgttaccgtcattgggcccaactacgaccagggcaaacgcgcaaagaatcccaaagtccccaaccaagtggagttctgggattgaacaaaaagggcctcgctgccgtgctatgcagtgggcagcgagaacccatatcagttaagccttccccccggaaacgcgtaacttgacttaacttcaccacactcagccacttctggcaagcccattctaacgcacgcgcctccggg

SEQ ID NO: 371 - DNA, 15009 bp, synthetic construct
  source 1..15009: mol_type = other DNA
  misc_feature 1..15009: note = Synthetic
aagaccgtcgtccgtttcggatgctgatcggtaagtcggtcctctatgacgtgaaaccgggggcggccgagcgcaattcgccgcaagggaccatcacggccgatctcgagaagatggatctcgagcatggccccaagccgaccctcaagatcctcaagattgtctcgggctattcggccacgattcagttcggcatcgaatttgtcgtccccaactgcggcggcggcaatgacgtcaataactgcggactcgtcaactttcgtttctggatcacggaagatatcaactgcgacgactggctcacctcgcggacgtacagcggtagcctgcgcgtcgcccataaaggaattcatccgcacgccctcgcgcggcaggtcgccattccgccgctgcagcgtggctttaagcgagaagtggtgcaaatgtctgaaagcgaggatgggctgcatctgcagttcaccatccgcgatcaagagatcatcgcagctgctccgtttgaaaaagatcggggtgtcggtgcctcgagctggagcggcacgttccagatgagcacgcagaacttctcgaactgcatcagcgatctcaacttccgattgacgggtcccaaaggaacgaccaaacgcgatctcttctttgtcggcatgaaggttgtctcggcgaagacacacttcctcgagatcgccagcgcaccagctacggagcccagctcggggatggtcttcctcgagcattttggagtgaaagaagagctgcatgccaacacggtcgagtttgcggtacgcattcgccataacggcacgactgcgcaaatgatcgggctgttcaacatcggtggtaagttcgagattggcaggccgctcggcgatatggggatcggttacgacccgcaagtcgctttccatccaggtccctcggcgacactcacggggctctttctctcgacgctacaaaccccgtgttctccggcgcgcatgcccaatgggatcgatcagccccccaagaatgaaaagccggagagcaagccaggcattccggactaccccgccgaatcacagtcgcagatccccagcgccccgaacgagaaaccgagcgacagccatctcaaggcgatgtacctggactactcgatccattccgaattgatcgtccacagtggtcagattgcgatgcccaccggcgcggtcgatggcggcgcggacgaaacgctggcggtcgtgagtctctttcggcctacggccagacggcacatcgcgatttccgcatcacgcgtcggcactccccccgagattcccgacccggtgaagagtttcaccgacatcaacggcatcgagcacaagcggattggtgaagcgaagatcgattcgcagttgccgcagctttcggccgatgcccggcgtctgctctatgccgtcgatatgacgatcgactacgccctctcgcgacctccgaaggataccgaaaaggtcccgatcggcgtgcttccgtatcgaacggtcaccgactccgatgcttcgcgcacgctacctcccgagatcttcgttgatccaaagaagatgctgacatgaccattaactttaccgaactattcacgcggctcggcaaattcctgcagacaggcaagtcgctggcgacggcgctcggaactaccgtcccgggcgatgtcgatggttcgctgcaaggactcggtgatgcgctcccgacgcgctacgaagcggtgcgcgagaacatgctgagcagcttgggctcgctgcagagtgccggtggtagtgcgatttcgggactggttgccgcccccgcgcgcggcctgctcctcctcaccgccagcgacgatctctcgagcgtcacttccgaggcgcaggcgatccgcgaactgattcgtcaaatgcagaccgaagcggaatcgctcgatgccagcagtgtgagcgcgactctcagcttcgacgccggcaacatcggcacgggggaggggattgccggtgtgaaaacggctgcaggcaacgcctgcgagtttgcgatcggggaagagattctgggcgtcgtgacagcagtcgacagcagtggcattgccaccttcgaggtcaccggggagccagccgtcgggcttctttcgccactctggccgaaaggatcgggcgcgcggtcgtcgcttgtctccaagcgtgccagttcgcgcgggaatctgatcgtcaatggcgagatggaactcgccgacagcaactccgcgcatctaccggcagggtggctggcaaccacggcaacccttggaacgactttgaagctcacctccatcgaagtgcaaacggtggtgatcactggaacgccgaccggcggctactactcgctgaagtgggagaacggcgcggggcaagtggcatctaccacgctgctcccttggaacgcatcgcagcagcaagtgcaatcggcgttgcaggcgattcccggtctcgagcgaatcactgtcgtctcgaccggtacatcccccaacttgacgcacaccatcaccttcaccggtgtgacggatcccggccaactcacgaacgttaatgcgctcaccggcggatcgagtcctacgattacccacaacacaacaactgccggctcggcccacgtgctgcgcggcgcgcggtcgctcgagctcgatagcaacggctcggagctgacgacgatcctcacgcccgtcacgctcgcccccgccacccgttatgccttcaatctcttcctgaaggcagatgttgagccagctgcaggcctcgtcgaggtgtcgcttttgaatggcattggtggcgctacactcaccaacgcgatcggagattcgtcggacaacgagctagagatcgctgcggtcgatatcaccaccacctggaaaggtttcggggcgatcttttcgacccccagcacaatgcctgcacaggtctatttgcagatccgcatcgcgaccgccatcacgagtggcacgagcctcttcctcgatgagatctacctcggcccgatcgatgaactctatgccgatggtccgtcactggcggtattcgacggcgacaccaatttcgtcgtcggcgaccggctgaccctcgcggtgacgaatgatcgcgcgggggaaatgcatgaatggatgaaccggatctttaacctgcgcgagaatcgattgcagcttcccaccgtaagcgacggaagtgaaacgatcgaagacacggtaattacctagccccttcaggagatggaagcatgagtttctcgaccgacatggatcgcgccctcgatgggatgtcgaccgaccacaaggctgccgtgaaatcggccttcaccacgtttcaagcggcgattgctgctgagcagacgtcgtatcagtcccccacgccagaaaagatcgcgctcgacgagcggctgctcgaactgggacgcgatctggctgtgcagcttcagtaggcgatttgcatcatggcccagtcccttgaaacgatcgatggaaccgacttcgacctactgcgggccgtgcaggccaggctctgcgcgtcggttccaaaactcgcgccggggatctgcatgatctgcgacgaaccagttcctccggggacctacttcccgcgcggcgacctggcttgcaccattgcgctttcggacgggacgttcgatacggagaagtacgacggggccggggctaaccagctctgcgagcgaaagtcgctgattgtgacggtcttcacacgcagcaagctcgatcagccgccgcgcgccgagtttgcattgctcgacgagcagcgtgggatgttgactcgctacaagccggcgattcttcgcgcgctgctcattcacgatcctaaggccgagaccctcgagccgtggcagccgctgcggggagagcatccgatcttgcgcggcgcgctggttccaacgcgctcgcaaggtcctcggcaactgctcgacgacgactggctcgggctttccctcttcttcgatgtcgagttcgactgggaactacggactcccgtcgaggagtgaggagtcgcgccatgctgacctatgccgatgtaccgctcctatttcccgatccgacgggtgaactcgatcgctggctgaagaagcaccatccactcgacacaaccgccatcttctcgagtcgatcgctcagtgagcttggcacgcgccgcgggctgcacgcctggcatggtgcacggcgtgggatcggtctaacgagcgctaactatcctgcgatgccgcagctcggtctcaacacgctctactggccgaccggtgccacgcgttggtcggccgggctctttctggcctctcgcgacagcaaggataaattgctgagcgctggcagtggtggcgcgagcagtcatccactcaaaatggcggcgggcaagatggagatcgagacggagatgtttctgctccctccgctcccactgggaagccaaacgcccactgccgatctctggatcgtgccgctcgttgatgcccgctactggtggcagtatcgatctttcggcactagcgaagtgacttacgacaccacctggtcacagctctttagcaatctaggtgccctcttgggaaagagcatcgacctcgggagtggtgtcgacacggcctacttgcagcctgacccgatcgagttcacgcgtcccaatgaatgtgccgctgcaatgctcgatgcggctgccttgtcggtcggaaaacggatcgtgcggcggctcgatggccaggtgattgcccagtctccgtcggaagcaaccgccacactcgaggaaaacctaaaagctggctggccggtcatgagtggcggggcgatcgattcgagcgagatcgcttcaccaagcaagctgaccgtcacgtatcgcaagtggcgcgactacatcgcacatcctgaaggggaagttttcacgcaggaccgcagcggcccgagtggagcgccacccagttcggaggtggtgatccacagcacggcatttgccaactgcaacacgagcgacactccatcgaacagttccgagctcgaggggctgaccacggccatcggtaacgacttctttgcgtggcgctcgagtcgcttcgatcgagttttctcgagcattcccccatggaagccgaccgggttcgacaacgccgtgaactggaagttcgggccgctttgcgatggcgagcatcgcgtgcaaacgcgcgtgcagtcgctgccgcacgattttcgctgggacctgcagttgtcgcaggcacccaacctgaaactgcttgagccgctgcagatcggcaagaccgatgcggcgatcaatgtggatgcttcaggtgtcgtatcgatctggcacggtgctgcgggtagcgaaaccgacagcaccctcaacgtcacagcgaccaacaaatttgccaacgtagcgagtggcaggtgggtcagcctcaccaacattaaaggctactggtatctgaccgcagcgaggtgcgtggcatgatcgacattctctttgcgatggcgctgacactcacgatgcttccgctggggttcttttggccaacgtgctcgtgctgcgtttgtacgtctttttacaatgcggcatttacatcgggatcactcggcaccaactttgacgatatcgctggcacctggacctactctagctcgcagcttcgcacgagcgacgatgatgcaatcgtaatgtgcaccattccgagcaaccagccgactggcagtgtgcgtgtatcggttgcgatgaatcgtgcaagcggcgctttggcggcaaacgaatcaatcatcgtgattggtgcctatgttgattcgtccaactatctcaaaggcaggatggtcagaagcggtacactgtaccatgaacttgagcttatctctgtcgtcggtggcgttgagacggtgctagagtcgcgaaccgtctacaacggtggattcaacggcaacattcccattacattccgactgtcttacgattccggcgaggctaggttttgccatacatttcctggcgttggtgcaagcgtgcaggctagttacacaccggcatcgggcggattgtacgcaggctttggaacagacagcattgacgtagaggcaagatttagctctttcgttttcacagaggacgatagcgtttctgcccaatgcaccagctgcgccgcctgcaactgcccggccaatgtggtaactaccactgaatgtccttgtgaaattcaggcggaaatcacaggcatggctgatagtgcgtgtactgactgcaatcgttttaatgggacgtttatttttgctcatggcacagatactacttgccaatattttgcatacattgacccattgccaacgtgcggaggtttttttaacaacccgtttattcttaccctaaacgatttctcgggaccaacgtggcgtgtgtggattcgccgacttggcgacggcgttgtcgcaaatgacatgttttcagaaagccaaagtagtgagatcgattgcaacttcgcctcgttcaacgtatcgccaaacgtaacttatattcagtgcgatgcaacggtagcaacttgcgagctaaccgcgttatgagatgcgattttcaagagatcgaaggcgagcaagtcaacgaacgcggcaagcgtcgtgtgcgatgctctgtttgcaagcgtaccacggcaccaacagccagtccgctaagtgcaattcatgctcaatgcaacgcccatccgaaatcgccccccggtatcggcgaccacctgcactattggctgacccgctggggcatcaccaaggaactctggctctggctaaagcactacggataccctcccgaggatgcttcctgcggctgtgacgagcgtcaggagcaactgaaccaggccggatggtggatcagccgaacagcctcgagattcgtgcggtggatccgaggcagacgaacagaggtctgattccccgccatcgttgatttcacattgcaattacctggaatcattttgcgcccaggaatcaagtgaacttgctcgtcgagaagttaagttgtgccgcgccaggcaagatgcgggaacgttctagctatgcctcttcagggctcacgctaaagtcactcggcccctggatctctttaaccgattttcgatgttaagataacagattgttgctctctgccgattcagaaaggaactcaaccaatgagtgatggaaatggatcgctggtgactgcgatcttcggtagcctagcagtgggagttggctctgccttgcgaccggtcggggtggcgattgccgaaactattcgtggtcgatttcgtcctgacgaaattcgtggccaagcagaagcagaggccgatgctcgtattaccagggttgagggtgatatccgcgagcgacagcttttgcgacttgaggcacttgagcgtttggcagacgaagaggcctactatcagtcgaacatgcggaaaatagcgcgtgatgcgatggagattgcccaagctgaattggcaatcagtggcgcgaatcaagttgcaattcccagcaacgattggttgcgcaacttttttcgacatgcacgctatgccggagatgatgacgttcgaaaattgtggtcgaagattcttgcaggtgagatcaagcagcctggaaggttctcgaaacgaacgatcgcatttctggagactgctgaaacgaaagaccttcaacttttgaatcatctgtaccgccttactttttttctcgatcgaccaattccagttgtgatagggttgacccaggtcctgaacataactgaagagagagaggatcgtattgtcgatcagctacaagctgtcggccttctaatgcatcgaaattcagcccataaagaccatgtagcaacttacgttgagccaataaaagctagatacttcgacaccgtcgtagagttctggcaaggaaacaactcataccctcaatcaccaacatttggtggatgggagtttacgactgttggccgagagttagtgcttctctgtgaaggcttgccagtgccgaatcttctggaggttctctttagggaacactgggcccacttcgatatgcgaatctcgcaggcctcctaatcggtgagtttaccagccccccaccgtctgaacggtcgggagtcacgtatctcggctgtctcgctttcgggattttgctgcgttgcaccatcagatgatttccccgatcaggaccggcatgcggtcgctacgagtcatcgtgcggtagtagtagctggccggggtgacgatcatgaacgcttcaccgttccagtagattccgcgcacccctcggcggatgcgaaaccagaatccattctcgtagccagctgaggcgaggatgtcgatcggctccgcaccgatgcatttgccgctatcaatcgtcgtttgccaggtgaggccgcagcctctgcgtccccagcgaaggacttcgaactggccgtcacgccaaacgggaagaaggggagtcttggcgtgccgcaggaaccagagttctcgatcgccgcctcgatcacgggcgaggggggcgagctggtgtctctcgatcagttcagccggcaggtcgcagtaggcaatggcgagcccttgcatggtgacatacctctaggggaagtcgcaatcgacatccgccagatggtatatgcgcgttcactatgtgtcaatctgtccactaattcagcggagctacgcactcgggaaaatcgttcttcaccgaaccaaccatcgccgcgaccggataggcctccatctcgtcggccggatagggatctagcaactgctgcagtggagctgggtattcgacttcatggtcgagccagaacctggactcttcgagcgtgaggatcacgggcatcctgtcatgcagcggttccatcagctcgttgggcgtcgtggtgatgatggtgcagctttcgatcggctcttcaccttgcgtccagcgctcccagagtccagcgaacaggagaggctggccatcggctcggtgaatgaagtagggctgtttctctttcccgttcttcttccactcgtagaaaccatcggccaggactaggcatcgacgttttttaaacgcggtacggaacgatggtttctcggcgactgtttctgatcgcgcgttgatcaggcttgcgccgatcttcgtgtctttggaccagctcgggatgagcccccagcgaaatagagtcgcctcgggagtgggcgatccgctcaccgctcggacggccatcacgcgctgcgtcggtgcgatgttgaagcggggcgtccagggtggcggcggcgaggtaatgcccagctcggccagcacctggttgagctgcgctcgcagcgtgaagcgtccgcacattcctaggctcccatagctagaggatcgtcgctggtaagcctgatgtttggcagccccagcacatcgtcttcgaggatgatcaactcgaactgacctggtgcgattcgaacgacttcgtagccatcgcggacacacatcgtgccattatcgagaatcaacacttcgtgctcgcaccctcgctcgtccaaggcggtgaaacttgcgatcgtctgcggtgccatgttcctggtgctctcgagtgcgaaggtgttgaaatcctcaaccgattctagcttcgctgaacgcgtgagtcagctgcttgcagtatcggagcgggctccggaaagggcgtcccacgcagatggcgatctatcgttcgtatgcgtctgctctgcggcattcaccctgaataatccactcgagtggagtctgccggctagtgtagatggccgtgtcaccgatcaagatacggtctgtcgagtcgcgtacgccgtagatgaccagacgcaatttgattgcgactaatgaagtgtgctcaagaaataaaaaaagggggcaactttgggcccccaccggtttgaccgggcatgcaagcggaagcttacacttactgtaataggaagggtatatgcaaccgccgcttggatacacttcctagtagcatagcagggctttagtgaattacaatccagctaaacaaaatggagcgagaattgtatggctgagtttgttctgaagcccgaatcgtattcactgggattggatataggcacgacatccataggctggagttgcgtacggctgcgcagcgggaaaccctctggcatcatagcttcaggtgttcggctatttgatgcaggaatgtcaggtagctcagttgattttgatcgtggcaaggagttttcccatgcggttaaacgtcgccaggcacggcttgcacgacgacagattcgtaggcgaagctcaaggcgatggaaagtattcaggattctgcaggaagcgggcttgttgccttcggaaccgataaagcgaggagctgacgtttccgcgtttgttgagaaactagacacgagccttcgtctgaagttcctgaagcctagagaccatgtttctgcgcagttactcgtttatcgaattcgatcagctgcaacgagagaaactgtcgaggcttttgcacttggccgtgcgattatgcaccttgctaagcgtcgtggctttaacagcaatttgagaggcgttcccaaagacgatgaagaatctggcaaggtcaaaccagcgattcggtctctcggcgaagatctgaagaaaacagattcaacgcttggtgcacacctgtcgacgctcaatccatttgagaagcgtattcggcaaagatggaccggtcgtgaaatgtaccttcgagagttcgatgtcatttggaagcggcagtcgccacatcacccacagatgactgaggatctgtacaaaatcctccaaaaggcaatcttctttcaacgcccgatacgaagtgccaaaggacttgttggaaaatgcagtatcgagaagaaacgccgaaagctggcagctgcccatccacttgcccaagaggtgcgcatgcttcagttcttgaacaatgtgcgagtctctagtcgaggggaagtagaccgcgttctctcagaccaggaacgccagcgagcgatcgaagccctgtcgaaagttagccggctttcaatgacaggttttcgctccgctctcggacttaattcaaagagcgagaagctaaactatggtggagatgaggattcactagctagaggcctgggaaccgtctctgactttcgcgagatcctcggggagcaatgggacaaactatcacctcaggatcaggagagattagtttacgaagtccttagtttcaccaaaagagatgcattgattcgacgtgctcagaaatattggggattcacacagtctcaagcggagttgatttcagagctgacacttgagcctggatattcgagtcattgccgagcagttctggagaatttgcgcgagaaactttcgtccttcgacgagaagttgcagcgatatccgacgtactcagaagcgaaactggctgcttatcccaacatcgatcatgggataccgatctacgaccaactcccaccggtagtaaaggctttacctgaccttacgaaccccgcagtgattcgagccttaacggaagttagaaaggtggtgaacgaactcattcagaggttcgggaagccatttcgagtgcacatcgagcttgccagagacctcaagaagtcaaaaaaagagcgaaagaatctcgacgaattaaacagggaacaagcctcgaaacggcgtatcgcactgcagaaaattcgggaggagtttacaaactaccctgaaaaaaaggggtacgatcgtggagtcgagatgtggcttttggccgaggaatgtggctgggtatgcccatacaccgcagaacctattcgcaacgtccgcgaccttttgggcgataactcacggtttgacatcgaacacatctttccgcgccggtacttggataattcatttgcgaacaagacgatctgtctccatgaggagaatcgaaatgtcaagcgagacaggcttccttcgctggcctacgaaggtgcacctgagaaattcgatgcaatcattaagcgtgtcaagggattcaaggggcactttgcttctaagaaacttgcaagatttctagcccgagaagtacctgaaggattcgttgaacggcaactcaacgaaacgcggcatacgacagttgcagcagcagattacctgggtctgatatttgggggacggattgatgccgaaggccggcagcgagtcttcaccttgactggaggtttaacggcgatccttcgaggccaatggaagttgaatcagattcttggcctcggagatgagaagaaccgagctgatcatcgccatcacgctattgatgcgattgttgctgcttgcaccgacatgtttacagttagcaagcttcagaaggctgcggaactcggatggcaacagagcaatactaggtcctttcccgaaatcgatcccccctggagttcactcctcgatgatgctaggcgatctgtgctgagcattgtcgtctcgcatcgtcaacatcgaaggctgaatggaccgcttcatgccgatactaactactcaccagcggctgtgttgaacggcagagaaatgcacaaggttcgcaaacccctcgcttcgctatcggtgacagagattgcaggtgatgcgatagtcgatccggtgatccgcaggttggtgcaagagaagtacaacgagctgaagaccacgctgaatgcgaaagagccaaaacaggcatttgctgctatcgagaatcatcctgccataccaccgaagttctctcatacatcacttccaacgccaatccactcagtacgagtttgggtgaagaagaagccaacagaagtacggaagggcgatccaactcgactggttgatgcgactcaaggttcgaatttctgcgcagacattgtcatcatccgcgacaaacatggcaaagaaattgcctggagcgacagggtggtctcgaggcttgatgccctaaaaaccaagaatcattccagcgacacaggcgagattaagtttactctcttctcaaatgactacgttatctatgcaggcttggatggaaagtggcaaatctatagggtgctgagtcttgcggagaaagatattgagctgcggttgcacaacgacggtcggaagtcgagcttggttgaaggaggtgagcgagtaaggcttcgcggtggggcgctcaagtcgatgtgttttaggagggtagaggtttcaccaaccggagtcgctatagagcccagttctggtgagattattgatgacagataccttgaactgctttcagctcccaatcagactgagaaaacgtctcgcaaacgaaaggacacctaatgcgacttcttcatggatggttgctacggccttcaagaaggcacagccatgcaccgcattctggatttctcggaatcacccgcacgacttcgagttcatagtggctgccttgcgatcgaacgtgacaaacaccagcaagtacgtttgccgtttcgtgagatatgtgcaatcgttctatctcacccacaaatcacttgcacgcaatccgtcttatcggaattggctgcggcgggtggaattctaatcgtttgcgattcgaaacgattaccggtgggcatgcagctacctctgcaagcccactatgtccagtccgagagatttatagcgcaatcgcaagcaaaacaaccactcaaaaagcaattatggcgagagattgttcaagccaaagtgcggcttcagggaaatgttctgaagtcccgctttgataccgatgcagggctaacagccctgtctcgaaatgtgctgagcggtgattcgagtaacgttgaggcgcacgcagcaaggcgttattggcaatatctttttccagggcaagattttcatcgcgatcgggaatcagccgaccagaaccagctcctgaattatggctatgcagttcttcgagcgatcgttgcacgtgcaacttgtgctgtggggcttcatctttcattgggtctgcatcaccacaatcgctacaacccatgctgtcttgctgatgacctcatggagccatttcgaccagctgtagatacagtcgtctcagcgattgtggatgagcatggtgctgatcagcctttgtgtcatgattccaggcagaggcttcttcatggactctatcagcgatggcgtattggagatgttagtcgaactatattcgacgccgcagagctactagcctcaagtgtcgccgataacatgctaggcatacgatctcctttgcggcttccaacttcgctggagactgccaatgccttacctagcggttgaagtatcggagtaccgagccatgtggttggttgtgatgttcgatttgcctgtaaagactaaagcggagcgaaggagatactccagatttcgggcattgctgttgggcgaaggatttagcatgcttcaattatcggtttatgcacgcccattcccagctgaagaggccagcgagccaacacgaaatatgcttcgacgtgaacttcccccaaaagggtacgtgcggcttttgatggtaactgatcgtcaatttggaaaaatgaagtcgttctatggcaataaagaagctccaatcgaggaaccgactcgtcaagcactactgttttaggaggaaagtatgtcgcaagccttgctgccaattagacttagcaggaaggtagtgtatccaagcggcggttccctccgaactacagcgatagcaacttagttacgaattggcaaccgagtgtatccaagcggcggttccctccgaactacagccgcggcggctcagggtcgagtggtgggaagagtgtatccaagcggcggttccctccgaactacagcctgttttttcggcgtagtgattcgctcggagtgtatccaagcggcggttccctccgaactacagccgttcgaagcacagcagcacgtttgcaccagtgtatccaagcggcggttccctccgaactacagctcctattcgttaggctcgaaagtgtaaaggagtgtatccaagcggcggttccctccgaactacagcaacacgatcacccacttcggcatcggctctagtgtatccaagcggcggttcc

SEQ ID NO: 372 - DNA, 15235 bp, synthetic construct
  source 1..15235: mol_type = other DNA
  misc_feature 1..15235: note = Synthetic
cggcagaggcggaatcgcaaactgctgcggagggaccagtcgctcggacaggagttgagcactcgccgtcgaggaagtcattcccagtgcaatgagcgtcacggcgatcaggcgaagatggaacatgggattccttctttgtcttgaacagaaggtcgcaaagatcgcgaagaatttttcataggcgagcggggcggcgtcagccccccggtctatgaccgacgaaccggggggctaacgccgccccgctcgccgagattctttgcgtccttctgttcaaaaaatggactagggaccattcgtcagggaacttgaatcacgagcaacacatccgtgccgacttccggcaagaccttggtattcgtatcgagcttgataagcggctcgtctttcatcgtgaggttggtctgaaagaccgtctcgtcggtgaccgggaagatggcgatcagcgtgccggtggagtcggctccgtaaaccttgtccggcttgttgggatcgggctgcttgctgatcgagccggtgaaggtccacttcaagttgggcatcgtcttgcccgtcttgcgatcgacgaggactttctcgatcggcaatcgtttggccaatccgcccgcaccgggcaactcaatgaagattttcacttcgggtccggcggcctcggcaccttcgcccttagccggcttccctggcttcagccccaagctttcgagagccttgtggatgtcgctcggcttggcatcaaaggtgacgaccgtttcgtgtgccttctgccccttcggtgccgccagcgaggcgatgacctcaatcggatagacctcattgagattcggcagcttgcgcggagcgatcttgcatgccagcgtgaccgtcttcttgtctttgtcgatcttgatcgcctcgcctggcttgtcctgagccgacaacggcatcgcgaaccacacggccaccaccaaaccaatttgcaatttgcaatttgcaatttgcattttgcaatctcctctcaggttgcaggttcggggtcgggtgttcggtttttcggaattggcgggattgggcgtcgtttgcaatctccgctttcttcccgccaattccgaaaaaccgaacacccgacccctcgttacttttctccaatgcacacgacggctgtgttggctttcccgccggcttccaaagcacatgtcgccacgaacaaccgtccgctcgcgacgatcggtccgccgtaaaccatgcccggcgacttcaccgtggcatcagtccccagcgagagtttccagcgcagtgccccatccgtcaggccaatcgctcgcacgacggctttgagatctgccagatagaccacgtcgccagcgatcgctgcgctggcgaagaacggagcaccgccatcgacggtccatttctcattgccggtggcgacatcgaccgctcggactttgccatccgtcgccgtgaagaccgcgatctgatccttcaccgcaatcgccgagacgatgccagcggcaaacgctcgtcgccatttcacggagccatccgcgagcgacaccgccacgacttcgccctgaccactggcgatctccttcggttcgagtcgcacgctgctgcacccgatcagcacgatatcacccgcgaccgtcggcccggcccacggattgaacgtcagcggcgtcttccactgcactccgccatcgccgagcttcaccgagcagatcgcacgctcaccggtcttctcggaatcaaggaacgcagtcgccacgagcactcgatcaccgaccgccgccaccggcgcatcaacatgccacttgcctgctccggcttgccacacgagcttcggtttgggtttcggcagcgagtcctcgctgggagcgatcgcgaagtcgggatcggtcttcttctcttgctcgtacttcgcgagcagttccttccatttcttatcgagcgccgcctgagccgacgcagcatcgacgtccttgccgtccaactccaaacgagagggatcgacacacaacacacccgcgttgccgccaccgatcaacactttgccgttgacgatgctcggcgaaccttcgagatgcaccaactgacctggcaccggcaactgccacagcggcaatcccgtatcgagccgcactccatgcaacgtcgccccgtcggtttggtgcataccatcaccgaacacaacgacgttgccgaccaccgccggagcacacacagtcggcaacttgagatacggtaccgacttcgcccaccgcacgcgctgcttgggagcggcctcggtgctcagcgcctggaagatcgaagtattgaacgcggccagcgccgacacaaacacgctgtctccggccgccaccggagcggcgatgtaatgatcgctcgacttgtggacccacagcaccttgccggaagttggtcccggttgcccatcgacacaacctgtccgcgcgacgttgccgcggttcgttggccagtcggcggcgattgatgaggagttcgtgatcgcgagccacatgacgacgccagcgaacatcgtccggcgaagacagtgcaaagtgcaaagtgcagagtgcaaagtgaagagtgtcccaaacaagcgaatgcccgtcactttgcacttggcactgtcagattcttgaaaaaagagtcggctcatggttgtgagatgtctcgatcgtttcgcgagttaattatctggcactcacttgccccaccgccgcgggtgtgggacgtcccagcaagacggttgattcttgcccttcgttattcagcagcaggtccgaagcgccgtctgcgttgatgtcagcgaccgccaagccgcgcgtgttgaagatctgttgcgagaggccgacttcgtccgtcgcatccacgaacttcccttggccgctgttgcggaaatagcggttggagcctttcaggcaaccgatcaccaaatcgactttgccatctttgttgaaatcgaccgccgccgcgctgactgcgttccccatcggctgagccacagcgccgcactgagccgtgatgtcggcgaagcgaccggcgcgatacgcgaagactcggcaggcacccgactgcggcacgaacagatcgagttgcccgtcgccatccagatcggcaaagaccggccgcactttgccggcttgaaattgaattgccgggtctttggtttccacgaagccttgggccgtgctgaacgcgaacaagcccgtaccggcgctataaagaaaatcggagcggccgtctccgttccaatcggcgacggcgagatgatctcccttgtgctgcccaccgactccgtccggtcccagcttggcggcgaccgtggcatcttcaaagcccgcgccggtgtttcgatacagacgtaggccgaggaatccatttgccagcaaaatgtcgggccgtttgtcgccgtcgtaatcgagccacgccgccgccgtgacgttgtaatacggttccttcggcaagatgggagtgtcgtccttgaaggcggctccttgattggtcagcagctttggtcccgtcgaagtcgcgagcaacaagtccggtctgccatcggcattgaagtcggcccagtcggccgcgcgagctccaccggaatgcggcagaggcagttcgctgagtgctgggccatccatcttcaggagagtgactcggcccgatccgtagaaacagaaatccggcttgccgttgccatcgacgtccgccaccgcgaccccttgagcctccgggccgactgaggtgacacccgcgacatgcgtaaagccgggcattccggcgatcgagcggaagtcatcgccgccccagcccgcgaagtcgcgctgcgggttgtagtcctgcaacttgaggctggctttcatccgttgaatcttggccgtgcgaagctgcaaggccatcttgtctccatcgaccatgcaggggacgacgacctcttggcccgccagcatcgactgcacgatgccaatcaacttgtccgaggtgccggcatagctgcgaagcaaatacggctcgccgtggctcatgttccaccactcgccaccggcgtaggcttgataccaatagttgccgatgcaggtctcactggctccgccgttattgaagaagacggccgtcttgcccggctcggcccactccatgatcgctttccattcgcgttcatgaaatccggcacgggcgatgttgtgcttgaccgtctcgccgggaagcgtccccttcacgtcttgcaccttgcggaacaggatcaggtttttctctttatcaaccttctccacgcgcagcaccgagatcgacgtggcttcctgaaccactcgaccgagcgtgtaggcttgctcgatgtaggcgagagcgatgcttccaccgctgaggatggcaaccaagatcaagcacgaggtcacacgtcgatttggcatttcaacccccaatccaattccggaatcccgcccgttcctcggtactgcaaacgtttgaaaccaatgcgtgagaagaagattttcagccacggatgaaacacagaccaaacacggattagtaaagagtgtccgaaaggatcatgacggtgaatgtcactcatctctcgtttgtctggttttgtttgatccgtgttccctccgtgtttgatccgtggccagaatcttttgtgttgcggagaggtcggacaatctgaattcactcgtcctaatctcgcttggccagcggcaaaccagccagtcgttgttcggccatcttggaccattcggtgttgggataatccttgcggaccttctccagcagccgagcggcttgttcgggttgcttcatttcgagaaacacgcgcgacgcctctatcagcgcgaccgcgctccattcgggatagtcgtaggtaaacggcacgacgagcagcgcgttggccgcttcggggagtcgtttctgttcgaggcgacacaacgccgattgatactgcgccttcgcggcgatctcggccgccgtttctttgatgacttcttgataggcgttgaccgcgttgtcgaactgtttttggttctgccacgcccagccgactccgtagcgagcctcctgtcgccagacgctttgcgggaagcgttgcagcaaaacctcgtgagtctgccggctttgatcccattgcgtggcgagtgcgaaggcgtgacccaaacggagcagcacgcgatcgctcagaccggtgaggttctgcaacggtccttgatcgcggaacggcagccaaagttcgatcgccttcgcccaggctttgagttgcatctggcattcccccgcgcgagcacgcgcctccggagccagcgggctctttgggtcagccaacacggctgagaactgcgagaacgcattcgcgtgatccttcttcgcgacgaggcagacgcccagccgcagatgcaatcgctcttcgacatccggtgcgggttcaagattcagagcctcgttcagcaacgcgattgccggatcgagttcttcgcgccgagcgtgcatctcggcgagttccaggcgtgacgtgatcgccagcggcgagtctgagttcgcggtgatcaccgctttgtactgatcgcggccgagtttctccgacggctgcaacgggatcgctgtgatcgggaactgcgggactttcgcgttgacgacgccgaccaagccggccggttgtttcgcggcctcttccttttgtttcttgaccgcgtcctcgactagcttcgcgggagctgcatcgacctcgacatcgccgacccactgcgcacaccacgcggcttcgtagagcatccgctgatgaatctcggagccgaccgctttcggccccaacgctccagcttgagcgatgaagtaagtggcggtctcggaaagttgcttgatgctctcggcgatttgctgatttgcggcggtgagttcttccggtttggcgtccttcttgaccaacatcagtcgcgcggcggccagcttcggagcgaactcttcgcggcgacattgacccgctcgccatgtggcgtcggccgcttcaggactcgctccgtatttctgcttcaagctctcgaactgcgtgcgcgcttcgttgagcttcgcgacgtccaacttcgccgggtctttgtaagccaactctttgatggccagcgcgtggtggtagtgcagcagcggagcccaggcggctcgtgtcgggtcggcgaccagcgcggcttcgtagttggtccgagcttcctgcaatgcagcggcagcttcggtcgatttgttctgtgctcgcagcagcgtcgcttgtcgcaggtacgccagcggcgcaacctgggcttgtttgaacggatcggctttgaaccgattcagttcattgatcgcaccgttgacgtcgttctgctcgaccatgcagttcgcgcgttcgagcgacgcggttggcgcggagggactcgccgcgtattgcgcattgattctctcaaacgcttgccgagcggcagtcaggcgctcgttgcgttccttcggctcggcaatctgtgccgcgactcgttgatagcagtagccgagcttcagcagcgcatcgggagtttgcggggcggtcttggccggatcgttcccttggccgctgacgtaattctccagcgacttgatcgccgaggtcagcacctccagttgccggccggccgcgagagcgtcggtggtgtcggtcggcatcgcgcggagcaaacaatcggcgaggtagtacggaacaacggccagctcgcccgattgatcggcttgcgggaccgcggtcagcgtcttcaacgcggccggataatcgccgagccgatattggctcagccccaatcgaccgcgcgacagcgcggcgtagacgaactccggatgcttatccagcacgagttgataccgcttaaccgcctcaccgaaccacttcgggatgtctgggttcttgctggccgggttgttcggttcgatcgcggcggcgcggacgtaagcgttctccgccgagcgaaacaacacggccggcagcagcgtgctcttcggatacgtctgagcaaactgcgcgcagacttgatcggacacatcgaactgagccgcgaagtgcagcgaggtcgctcggcgttgcaggaattgctcggcacgatcgggagcgtgattttcttttgtcgccgtttcgtaggtcgcggcggcttgtgggtactgcttggccaactgctgatagtcgccgaggtcgagcaagatttccgctcgacgcagcttggcctccggatcggccgcgatctgctgattcgccttgtcggccgcttgagtcagcgtgccgatcgccgtcgccagcgcttgggcatacggggccggctgagttggatcggccgctccaaactgagcacgtcccagccacagcaacgcgcggtcactcaattgcggatgtgcggtgagcggttgcaacaacgcgatcgccggagcgaatccacgcagttcgacctgacacatcccggctcggagttgagcttccggtagcagcggcgactgcgggtacttttgattgaactcggtgaaacgagtcagtgcctcgcccgtcttcttctgctcgtacaacaacacgccccaataaaaactggcgcggctgacgtagtcggggggtgatttgatcaacgcttccagccgagctttttcctccggctgattcgcgaaggcggcttggttttgcagagccttctgcgaatccaccttctgcttgtcgtagcctttgacgaccgcatcgtagagggcggtcgcttcttctcgttcctccgcgatgtgatgcacgcgggcgagcagatactgcgtgtgaactccaaacaccggatcggtgaacggcacaagctgagtcagcgagcggccggccgtgatgaaatctttcagcaagaagctcgcgtgaccgtgcaagtacaacatctgcggccggtacttgctcttggtgagcgtcgcgtcggccagcagcggagtcagcagatcgctggcctctttgttcttctcaattcgcagcagcatctcggcctgatcgcaccgcgcccgattggcccattccaaatcgacagccaactcgttcgcggccggcggcggagccgtcttggcgcgtgccaggaacgcggtgatcgtttcgctgaatcgctgattcgcctgcgtgaattgatccttcgccgtgttgcgatgctgcgccgcttcattcggcttcgcgactgcttgagccagcgcgtcatgcccctgtccgcgataggccaacgcgaggtagtacaacgccaacggccgatcgggaaactcctgcacgccgaccacttggttgagcgtttcgatcgcgaccttgaagtccttctgcggctgctccagcaagctcaacgccaagccgtaccgagccagcgtcacgtccttctggttgccgtgagtcttcaggtactcgcgataccgctcgaccgcgaccgggaattgcttctcgttgtacgccttgttggcggcgttgatcacctgagccgcaagttcttccggcttgagcgttgtgttctgcgccgagcagggtggctggagcaaggccgctccgatcagtgcgagtcccagaagaacgattcgacagactggcgtaggatggcccccctcggccgtccagcgttgtgtcactctcaagcagggacggccgggggcggccatcctacgcacggaccgagccaattgaatgcagagcatcgcaagtctccggggtcaaaagtcgtcacgtcgaggaatcggcgagcagtatgggacggtcggtttcgcggcgtcaatcaccggcgctgtcaaactaacccgaagcatcagcgagggcgaacgcttcaccgacttgatttgcagcggaacgttttggagccttcgccctcgctgacgctttttagaagttgcgcacttttggactgcggtgacttgtcaccgctttgtgattgcggcggaggcgcttttttgacacgaccgaaaagtcgctccgcgacgatgaaaagcggtgacaagtcaccgcagtccaaagaaacaggagactcgttatgcagcgtaggaaatggaccacggtcagtgtgactgcgttgatcgtcgcgctgctgctgactcacgaggcgatcgcgttcatccaaaagctattcccgttgcaggagttcatcgacgacagcgacttcctcttcacagccaaggtggagaaggtcgatcccgcgaaaccctccgccgttctggtgctgggcgagcatctcaaaggcaaagcgccgttctcacgcatcccgatcaatctgaccggtgacaagcaaaagcacacgccgcaactcttgaagcgcatcgcccccgacctgccgttggtagtcggagtcaaaaagcaggacgacggcaaattcatgctgctggccttcacgaacggcacgtggttccaagtgctcggccaaaccgacggcgaccaaacccgctgggccttcacccactgcgagatctacttgcgacgcaccttcaaaggaaccaccgccgagctacagcagaccgtgaccgacgtcctcgccggcaaagccaaggctccgccgccgaatcccaaagagcctcccggtttcggcccacccttcgaaccacctgcggacgccaagaagctggattgatccaaactccgccgggcgaccgaataccacggagctcgctgccaccggtaccgccgacctcgtcgccggagattcgcgcacgctcgacaaagactcgtggaccttgaaaacctacctggattgcgattgcggtcgcggcatcaacgcgccgagcgcgcgtgaccattttgaagccaagcgttccctctcttcgtgaggaccgcagccctgaaagtcgttgaaatgcaagcgttgattgagttgctcgacggaatcggtcagcggcagttcgagtaaaccggtgagccgaaagcaaagcaccccggccgagcaaactcggcgcggggtgcagagggttggacctatcgtgcaaaagccttactgtgaccaggaggcaatcgccgctcggatacaacggaacagattgaatctcgctccgacggcggcgtcaaggagtcacgacaatgacgcaggttcgaggccagaacaaacaacaaacgccgctgtcagaaaacagtggtccgtacattctcggtttggacatcggcacgacctcggtcggttgggcggtgatcgactcgcggaataacaagccggtcgggctacgacaggccggtgtccgcatttttgaagccggtgttgagggcgatatcgaaagtggacgcgatgcgtcgcgtgcagcgggacgacggaatgcacggttgcaacggcggcagacgtggcgacgagcggatcggttgcgtcgcacgtttgtcgaattgcagcgacacggtttgttgccggacggagcattcgattcagcagcccgtcacgagttgctgttgaagctggatgccgagttgaaggtgaagcacgttccgaaagatgacgaacgggccgcgcagttactgccgtatctgttgagatcgaagggcgtgatcgagccgctcacgttgctggagttcggacgggcgttgtttcatctcgctcagcgacgcgggtatcgcagcaatcgcaagacagaccaaaaacctgacacggactcagacgatgaactggacgcgaccggcgagccaccgaagaagagagcgaagcggaaatcgaaagcgaccgccgaacagacttcggcgcgaacgctgaatgccgatcagtcggcgaatgattcgactgcttcagggaaggaagatgcgctcaaggtcaaagagtcgatcagccgtttgcagcaagagatgggcactctcacgctcggtcaattcttcgcgacgctcgatccgctgaagcaccgcatccgtcagcgctggaccggacgcgaaatgtacctggccgagttcgaacggctctggactgagcagtcgaagcatcatcccgaactgacggccgaggtgaagcgagcaattcatcgggcgatctttcaccagcggaagctgaagtcgcagaagggactcgtcggcaagtgcgagttggagccgaaacggcggcgatgtgctcaagcactgccgatcgcgcaggagtttcgtatccggcaacaggtcaatcatctcaagcttcgtgaagccaatggatacgagcggtttctggaggcggacgagcggaatgccttgatcgaacgactgaagaatcagcaatcgctgagtttcgcaaaggctcgtgaaggactcggcaagggcgcgaagttcacagtggaactggatgaaaacggagaagacaaactcgttggcgatcgtacgacgaatcggctgcgcccgattttcggcgtggcgtgggacgagttcagcgaagcccagcgcgagcaaatcgtttacgacgtgctgcactttcaagacgcggaggcgctggctcggcgagcgaagcgggcttggaatctcgcgccggacgcggccaagaaactggcaaatacgcagttggaaccgggctacgcgcggcactcgaaacgagcactgacgaaactcgctgagcaactgcggcaaccgtcagccaaagacccgcaggccgggaagtcgtacatggaagctcgcgaagcggccggttacggcacatcgaagacgacggcagttcacgatctcttgccgccagtcttgaagtcgatgtcgcagcttcggaaccccgctgtttgtcgtgctctgacggaagtccgcaaagtcgtgaacgcgctgattcggaaattcggcaagccggatgtcattcgcgtggagttggctcgcgatctgaaacgctcgcgaaagaatcggcaggaagtttccaaggcgaacgacatgcagcggaaatcgcgtgagcgagccaagcagcgaattctcagcgaggtcggaatcgctgagccgagacgctcggacattgaaaaggtgctgctggcggaagaatgcggctggcagtgcccgtttaccggcgactcgatcagtatgcagtcgttgcttggtccgcagccgcagttcgatgtcgcgcacattttcccgcgccggtatctcgatgattcgttcgtcaacaagacgctttgccgagcggatgtgaatcggcatcggatgcacgacctgctgccgactcaagctttcggacaagatgctgagaagtgggacgacatcttgaatcgcgtccgccagttcatgaagcggacgggacgagtcggctttcagaagctggaacgcttccagatgactgaagtcccggacgacttcgtcagccgacaactcaatgacacgcggttcacgaccagcttcgccgccgattatctcgcgtgcttgtacggcggacgttgggacgagtcaggccgcctgcggattcaagccagcaccggcggcattacggctcatctgcgaaacgagtggcggctgaattcaattctcggcggtggcgagaagacgcgcgacgatcatcggcatcatgcggttgatgctgtcgccatcgcgctgaccagtccgggaactcaaacaatgctgcaagcagcagcgtcacgcgcggcctcacggtttgaccgacgcccgttcgccgaagtcgaagaaccttggagtgacttcttgccacaagttcgcgaaatcatcttggccatcgacggtgttcgccaagcggtctcgcatcgcgtgaatcacaaactggaggggacacttcatgccgacacgctctacagcccgctcaagacgcacgccgacggcagcacggcgcatcatgtccgcaagatgctgcacaagctgagtctaacggaagtcaccggcgacaagatcgtcgatccgatcattcgcgagctggtgcaacaacagtttgaacggctgaaggggaccggcttgaaagaccccgcgaaagcattcgccgatccgggcaatcacccgtatctcacgagcaagaagggtgggctgattccgattcacaaagtccggctggccgtcgatgtcaaaccgaagaccgttggcaaaggccatcgcgaacggttcgttgcaccgaccggtggcagcaatcatcacaccgtcatcatcgccgagttggatgaagccgcgcacgaaaagcgatggcatgattttccaaccacccgtttggatgcgtacgcgcgttggtcggagaatttgaaagcgaagaccgatggtgatgtcatccgaagagattgggggccgggtcatcggttcaagtttgtgcttttcatcgacgattgcattgcgatgaaggacgactctggagttgagcgaatctaccgcgtggcgaacctctcgaaaggagacattcagcttcaagatgcgaatgatgcaagagacgcaaagacgctcaaggcagagaaagcacgaattcgggtgagcgcgaaacaattgaaagatcgagaagcccgaaaagtttgcgtcacgcctttgggcgagatcgtgccggacgaatgaatggaggatgggcactcttgcccgttccggaatcgggcagaacgcaggacgggcaagagtgcccatcctctggaattttgttgcaagtcaaacgacggcttggccagaatgacgccgcttgatggagacgtggcgacacggagggtcgtgggatcgcggtgatcgaaagatcgccagcagcgagaaagccccgaccgatgcacaaccggattctggatatctctgagggcggagcgcggctgcggtcgtcgctgcaacggctggtcatcgagcgggaccaacagcccgacgtgacgattcccttcgacgatgtcgccgtgctgatggtggctcatccgcaggtttcgtattcgcagtcggtgttggccaatctgtcggcggcgggcggagtgttcgtaacgtgtgatgagcggcgtcatccggttggaatgttgctgccgttggcgggtcacttcacgcaggccgaacgcttcgcggctcaggcgagtgcctcgctgccggctcgcaaacggctgtggcaacaaatcgtccgagcgaaaatccgtgggcaagccgaagtgctgacgcaagtgaatggctcggatcatgggttgctggcaatggtctcgcaggtccgctccggtgataccacgaatcatgaagctcaggccgcgcgacgctattggccgcatctcttcggttcggcgtttcgtcgcattcatgaagcgactgagcaatcgcgatcggatgacgattcactcgaaggcgaaggcgaccaacagccagcggccgaggtcgatgacctttcactgttgtcgcttcagaaccgctggttgaactacggctatgcggtgctccgagccatgaccgctcgcgcggtatgtgcgtcggggttgcatccgtcgctcggtctgcatcaccacaaccggtacaacgccttctgcttggcggacgatttgatggagccgttccgtccgatcgtggacctcgccgtcgtgcgactcttcgagcaccacgtcgacttgtgggagctcaatcgcgaagccaaacaggaattgctgttggcactgacggagcgctgcctgttgggaggcgagcaacgcacgctgttcgacacgctcacgcgagccgcgtcgtcgctggccgccgcgctcatggacgaaaccgacgtcttggacttgccggagtcgctccatgccgcgccgtgaactcacgctttcagggtattcgggaatgtggttgttcgccctcttcgacctgccagtcaaaacgaaacgcgaccgcaagcggtacgctcagttccgagcgaagctgttgtccgaaggtttttcgatgttgcagttttccgtttacgcgcgatattgctccggcgaagacatgagcgattcgctgcgcgaccgagtccgcaaagtcatccctcaagagggccaagtccgcttgatgtcgatcaccgatcgccagttcggcaagcaggaggtgttctttggaaaatgcagtcgatcggttgagaaacctccgtctcaattggttcttttctgaaggtcgcgtcatgccggccgcattgtggtcaaggagttgcgcgggaagcgttgtatccgagcggcgattccctccaagccacagcacggcagcgcggtctacgctgacgcgcctggttgtatccgagcggcgattccctccaagccacagcagtggcgtaacgtcagccgcgcaacgtttagttgtatccgagcggcgattccctccaagccacagctgtcgaatccgtcggcggccgagccggagggttgtatccgagcggcgattccctccaagccacagcctcggacgccgtggagtctgcaccggttcgttgtatccgagcggcgattccctccaagccacagccga

SEQ ID NO: 373 - DNA, 11194 bp, synthetic construct
  misc_feature 1..11194: note = Synthetic
  source 1..11194: mol_type = other DNA
agtgagtaaactgtccctgccatgccctcaacgaccgacctgcaaccgctgatcccgctggccgagcaacgcttggctcgatcggctctgcgccggctgctgaaatcaacctccgacggcaaaggccgattgttgtacctcgttggtccggccggctgtgggaaatccgcgttgctggcggagtctttccgcgagctcccttcctcgcaagtcccgccgctgcaactcacggctgcggagttcgccgcgcaactggccgaggcgtcgagcaatcagcaagtccccaacttccaagagcgcttccgatctgtatcggtgctggtctgcgaggacatccaaggcatcgagcgccggcctgaaacacagagacaactgttggcggcaatcgacgaattgctcgctcacggcagcgacgtggtcgtgacaagcacaaaacttccggggcagttggagtcgttcccggccaagttggtcagtcgttttcgtggcgggattattgtcagcctaaaactgcccggaccagaaagccgaaccgagcttctgcgactcttttgccggcaacgccgcctgtcgatctcacgtgatgctctcgcattgctcgcggagttgttggaagtctctcaaagagagctgatcggtgtcgtgactcagctttccgagttgcaccgctcgctcaaaagagccgacatcgaagagtttctacggaacaaacttcccaccaagtcgatcactcccctgacggtggctcgcgccgttgccagagaattcggcatcacattgcccgcgatgcgttccagccgacgttcgcaagcactcgttttgcctcggcaatgtgcgatgtggctgtgtcggaagctctgccacgcctcatatccggaacttggcgagttcttcgcgcggcaacactcgtcggtgattcacgccgtccgaaagctggaagctcggctcgacaaagaaccggcattgcggcaacggctcactcggctggaaggagtctgtcgataagctgttggccatccgttgataaccgtgggctcctcaacagcgcccggaacccagccgcgactttgttgatttgatggttcaaaaacaggttccttcgacacggctggacccccactccacacgttgtcgacaaccactttggctcgttgtgagaacgtaagtttttcgctatcctcccgctccgtttttccccgcgatttcactgacaaaaatcgctctctctgatacgacgactgctctctaaagatcttttagaagaagcccatcacaccgttctccagcttccttcccaagtgagcaaaccatgaagttacattgccatcgaccgactctggccaccgcatttcaaattgtcagcggcgttgtgccgtcacggaccccgaaagacatcttaagaaatgtgaagctccaagtcggtggcggaaaagcaacgctggtgggcaccgatcaggaagtcggtatccggtacgacatcccaggcgtagagaccgattccgatggggaagtgctgctgcctaaagatcggctcatcgcgattctccgcgaactgaccgatgatggagtcgatcttgaagtcacagaaaaagctttatggattcgatcaggacatagcgaattcaaactctcggccgaagatcccgccgagtttccgccggtacaggcgttcgatgccaccagctatcacgtcgtcccagccgcgtcattcaaagagatgattaagcgaactgtctttgcgacggataccgagagcacgcgatatgcccttggcggtgtgctgatggaattcggagccgacaagctgacgatggccgcgaccgacagtcgtcgcttggcggtcgtcagcacctccagcagtgtgatcggaaccatcgagccgcgagcgacacaaccggtggttcctgcgaaagctctcagcctgatcgaacgcagcatcacagagaacgatcaagacgtttatctggcggtgtatcccaacagcgttttggtcaaggttggcagcagcacgatctatagccgtttggtggaaggtcgcttcccgcgttacgcggacgttatcccttcggctggaggatcggtcatcgacatgttggtctccccattctactcagcagtgcgacaagctcagattgtcacgaacgaggaaagccgcggcgtcgatttcacgttcgacaacggagtcctacgtttgacgagcgttgccgctgatatcggacaatccaagattgaaatgccaatcagctacgacggcacagcgatcacgatcactttcgacccgcgttacatcgctgactttctccgaattcttgatgcttcgacgtcggtcaaactccaattaaccgatggcgaaagtgcagccgtcctccgcactgatgacggctacacctacgtcatcatgcccctggccagggatcggtaactttggagtgcggtgtgtcagcatcgctttggatttccttgtgtggaattaacagtgcggatcaaaaagcggtgctggcacgccgcacttcaaagatgacagacccgtatcgcgatctccgaggtttcaccgccgaaaaaaaaccggctgagcctcagcacgtcagtaaggtgctctcggagttgatcgctcgtaaaggactcgcgcgagttcacggtgtcgagcaattgcagcaagcttggcgaacagtcgccgggaacgagatggggaaccaaacaagagtgatggaattgactcgcggagtcttgaatatcggtgtcggtagctcagctctattcagtgaactggctgggtttcacaagcaagccttgcttgagcaactccaacagcagttcgctcacctgaagattcgagacctcaaatttcgactgaagacggatctgaagtagccaatcgaaaatggataaggacgtatgagcgaccaaacgaccgaagcgacaccggacacctacgacgaaacacagatccaagccctcgaaggcattgaaggcattcgccaccgaccttccatgtacatcggcgatacgaccggtcgcggcctgcatcacttggtttacgaggtcgtcgacaacagcatcgacgaagcggtcaataagtacgcgacgacggtctcggtgaagatcaacgccgacggcagcgtcacggtcatcgacgacggccgaggtatcccggtcggacgtatggccgatcaagggggcaagtccgcactcgaaatcgtgtttacgaaaatccatgcgggtggcaaattcaatcgagctggtggctacaaaaccggaaccggcggcttgcacggagtcggcatcaccgccgtcaatgcgcttagcgaatggctggaagtcgaagttcgtcgtgaaggccacgtctggacgatggagttcgctcgcggcgaggtcattcacgacgtgcagaagatcggcaagagcgactcgaccggcacgaaggtgacgttctcgcccgatccgcagatcttccccgagaccaagttcacttacgacgtgttgcacaagcggttgcaagagttggcattcctcaacgccggcgtcgtcatccgcattctcgacgagcgcaccaatcaaaccgacgagttctgcttcaagaacggtctattggagttcgtcaaattcctcaaccgcaccgacaatccgctgcacgccgaagtgatccacgtcaaaggtgatcacgaacacgtcacgaccgacggcgtcaaacaaatcatcggcattgagatcgctctacaatacaacgacagctcgtccgacatcgtccgctgctacgccaacaacatctataaccctgacggcggcacgcacctcagcggtttcaaaagcggcctgactcgcgcgctcaacaactacggcaagaagaacaacttcttcaaagacttcacccccagcggtgacgacttccgcgagggtctcaccgccgtcatcgccgtactcgttcccgaaccgcagttcgaagcccagacgaaagtcaaactcggcaacagcgaagtcgaaggtgccgtctcgtcgatgatcggcgacggactcagccgcttcctcgaagagaacccgcagaccgccaagacaatcctgatgaaaggcatgatcgccgccgaagcccgcgaagccgcgcgcaaagcccgcgaactcgtccgcaacaagaagggcggcctgacgaccggtggtctgcccgacaagctccgcgactgccgcagccgagaccttaacctcagcgagctgtacctcgtggaaggtgattcggccggcggctccgccgacaccggccgcgactccaacacgcaggcgatcctgccactgcgcggcaaaattctgaacgtcgagaaggcggtcctcaccaaggttctcgacaacatcgagatcggcaacattttcaaagccgtcggagtcccccccggtgccgaactcgaagacgtccagaaacgccgctacggcaaactgattctgatgaccgacgccgacgtcgatggtagccacatccgcacgctgctgctgacgttcatcttccgccacctccgcaagttggtcgaacacggctgcatctacatcgcccaaccaccgctcttcaaagtcgagcagcgcagcaagatccgctacgtccaatcgaacgaacaaatgatgggcgagctgatcgagatcggcctcaacgaaagcgtcgtcgtcctggaagacggcacgcgcatcgaaaccgagagtctgcacaagctggtcgcgctgatccgtcgcctggctgacccgctcgaaacgatggagcgccgcggcatcgacctgcgtcacgtcgccacgcatcacttgtccccggacggcagcttgccgcgcttccgagtcttcgtcggcaaagaccagcattggttcttcgtcaaagaggatctcgacaagttcctcgcctccgaagaactacgccgcggcgaagagttcacaatcgccgccgccgaaaccgtagggcaagctgccagcttgccaaccccctccgacaccgatggccaacacaacttaaaagccatcaaagacggcgtcctgcaaatcgtcgacctccatgaagtccgctctatcaacgagacgttgaaggaactgaagaccttcaatctcgccatgaaagacctgctccccgccggcaaccgcaacggcgagccgtactacccgttccacatcgacaaccccgccggcggcatcaagctcaccagcatccgcgagttgatccactccctccgcaagctcggcgagaaggggaagaagatcacccgcttcaagggtctcggcgaaatggacgccgaagaattgtgggctacaacgatgaacatcgagacccgcacgctcctgaaagtcacaatggatgacgccgccgccgccgatgaaatgttccgcgtcctcatgggcgacgccgtcgaaccccgccgcgaattcatcgagaaacacgcgctcgacgtcaaagacttggacgtgtaagccatgaatccgaagccatttcccaatgatcgagagtatctgcgcgtgctccgacaactgacgccgcagcagcgattacggaaggcgttcgagttatcagacctgacgcggcgtctctttcggcaaggtctgagacaacgatttgcgacgctgtccgaagacgagtttcagaggctgtatctggagcggctcaagcaatgtcacaacagcagcttctgagccgcgtcattcacgaaatgcgacgcctcaatgttccgtgcatgttgaccggatcattagtttccagcttgcagggcgaaccgcgatccactcacgacattgatctggtggttgatcttcatgccgaccgaatcgaggggctcttgcgggcgttctcctcctcggagttttatgtcagccgatccgctgtcgaagaggcggttcgtcagcgtcgcatgttcaatctgctggaactccagtcgggagacaaagtcgatttctgggtgctaacggattccccgttcgatcaaagccggttcgcgcgacggaggacaatcgagttcgatggcatcacgatcgacgtcagttctccggaagacacgattctgatgaagttgaaatgggcgatggattccggcggcagcgaaaaacaattccacgatgcgctccgggtcttcgaggtccacgcatccgtcttgaaccggaattacctggatcgttgggtgatagaattggccgtgagcgagttgtggagccgcgtgctctccgaagcgcagcccattgaataactcctccaagaacgaagtcgcttcttcgcgatcagccgcagggcgctagccccggtttgtgtcgtctccgaaccggggctagtgccctgcggctcatagcagaacgagccggacgtgtagagcagtgcgcttggtcgattgaaaattcgtccgaccggcttacgctgacgtgtgctccaagtcacccgcgctcgtcgtagctccaggcggctcgcctgaagttccacagacggaggccgcgcagcatgagccaacacaccgccagcaagtaccaagtctgctgcgaaatctccggcccgaccgcgatgtggactcgccccgacaccggcgacgccccggtcagctaccccgcgccgtcgttcgcggcggtgaaaggcatcttcgagtccatcgtctggctcaacgtccgtcggcggcatcacttttccgcgcgcaagaaaaagcaccccggccgaggtgtactcggcgcggggtgccatagggttgaacctgtcgcgcgaaagccaaagctttcacacttactgtgacttgaaggcaatcgccgctcggatacaacgagaatgatttgaacagtcattcgttgtgccgtcaaggagtcaaagccatgtcgaaagcacgcgcggtcgccgcccagcgagagactatctccgacgagaggttcccgtacatcttgggactcgacatcggcacgacgtcgattggttgggcgttgatcgagacacgaaatggaaggccggtgaggttacggctcgccggtgttcgctgttttgaagccggagtcgaaggtgacatcgagcggggcaaagacgcttcgcgagccgccggccgcaggatggcgagattgcagcggcggcaattgtgccgaagagcgaatcggttgcggcgcgtgtttgttgagttgcagcggtacgggttgttgccggagtgtgattggtcgtcaccggcgcggcatgagcggttaaagcagctcgacgctgaactcgaagcgaagcacgtcccggagaacgatgtccgagcggcgcaattgctgccgtatttgttgcgagcgaagggagtcactgagccgctgacgcttcacgagttcggccgcgcgttgtttcatctggggcagcggcgtggctatcgcagcaatcgcaagacagatcagcaatcggaaagtgcgacggacgatgaacagccgaagaagccgtcgaagaagaaagcctcggccaaagaattggcggccgcgcaacaactcgcggccggagcacagccgaacgatgcggcttcggggaaggaagatgttctcaaagtcaaagagtcgatcaaccggttacagcacgagatggcggggcgaacgcttggccaatacttcgcgacgcttgacccactggagcaccgcatccgtcagcgttggaccggacgagagatgtatctcgatgagttcgagcggttgtgggcggagcaatcgaagcatcatccggaattgaccaccgatgcgaagcgagcgattcaccgggcgatgttcttccaacgaaagttgaagtcgcagaagggacttgtcggcaaatgtgagttggaaccgaagcgacggcgatgcgctcaggcactgccgatcgcacaggagttccgcattcgacaacaggtcaatcacctcaagcttcgcgaagccaacggatatgagcggtttcttgaagcagacgagcggaatgcactgatcgagaagctgcggaatcaacaatcactgagtttcgcaaaggctcgtgaaggactcggcaagggtgcgaagttcacgcaggagctggatgaaaaaggggaagacaagctcgttggcgaccgcacgaccaatcgactgcgcccgattttcggcgcagcgtgggacgaattcaccgaggctgagcgggaggaaatcgtttacgacgtgctgcactttcaggatgcgaaggctctcgcgcggcgagcgatgcgggcttggaagcttgcgccggacgcggccgagaagctggcgaatacgcagttggaaccgggctacgcccggcactcgaagcgcgcgttgatgaagctcgtcgagcaactgcttcagccgtcgagcaaagacccgcaggccggcaagtcgtacatggaagctcgcgaagccgctggctatggcacgcacaagaccactgcggtccaagacctcgtgccgccggtgttgaagtcggtgtcggagcttcggaatcccgctgtttgtcgcgctctgacggaagtgcggaaagttgtgaatgagctgattcgaaagtttggcaagccggacgtgatacgcgtggaattggctcgcgacctgaaacgctcgcgaaagaatcggcaggagatttccaagtcgaatgacatgcagcggaaagctcgcgagcgggcgaagcagcgtattctcgacgagctgcggatggctgaaccgaagcgctcggacatcgaaaaggtgctgctggccgatgagtgcggttggcggtgcccgtttaccgacgatggaatctccatgcagcaactgcttggcccgcagccgcagttcgacgtcgctcacatttttccgcgacggtatctcgacgattcgttcgcgaacaagacgctctgccgagcagacgtgaatcggcatcgaatgcacgacttgctgcccatcgaagcgttcggtcaagacgcggagaagtgggaagaaatcttgaatcgcgttcgccagttcatgaagcggacggggcgagtgggctggcagaagctcgaacgctttcaagccactgaagtcccggacgacttcgtcagccggcaactcaacgacacgcggttcacgaccagcttcgctgccgattacctcgcgtgcctgtacggcgggcgttgggatgagtccggccgcttgcggattcaagccagtaccggcggcatcacggcacatctgcgaaacgagtggcggctgaattcgattctcggcgggggcgagaagacacgcgacgaccatcgccatcatgcggtcgatgctgtggccatcgcgctgaccagtccgggaactcagacgatgttacaagatgcggcatcacgagccgcagtgcggcatgaccgacgcccgttcgcggaagtcgaagagccatggaaggacttcttgccgcaagtccgcgaagtcatcttggccatcgacggcgttcgccaagcggtttcgcatcgcgtgaatcacaaactggcggggccgcttcatgccgcgctgttttccagtccgccaattacacatgcggatggaagcgtgagacatcatcaacggaagcagcttcacaaactcagcctaagcgaagtcaccggtgacaagatcgtcgatccaatcgttcgagcgttggtgcaacagcagtttgaacggctcaaggcgaccggtttgaaagacccggcgaaggcattcgcagaaccgggcaatcacccgtatctcacaagcaaaaagggcggcctgattccgattcacaaggtgcggctggccgtcgatgtcaaaccgcgaaccgttggcaaaggtcatcgtgagcggttcgttgcgccgaccggcggcagcaatcatcacaccgtcatcgtcgccaagttggatgccgccgggaacgaagtgaaatgggaacagaagctcgtgactcggttggaggcgtatctacgtctgcgcgaccgcaagcaatcagggagcggtggggacgacatcattcaaagagatttgggaaaggactaccggttcaagttcttcctgatgccgaacgactgcgtcgagatggatgatgcgagcggtcagcgacaggtctatcgcgtgtgcagcatttcgcagagtgcgactgagaacgaaatccagtttcttgagcagaacgatgcccgcaagatcggtgatgcgcgatcgccgtggaatcgcattcggtcgatggagagcatgcggaaacgacgcgctcggaaagttcgcgtcacgcctttgggcgagatcattccggacgaatgaatggaagatgggcactcttgcccgtcctgaaattaggtaagacgcaagacgggcaagagtgcccatcctccggaattttgttgcaagtcaaacgacggcgtgaccagaatgacgccgcttgatggagacgtggcgacatggagggtcgtgggagcgcggagatcgaaagatcgcgacaaggccccgaccgatgcacaaccggattctggatatctctgacggcggagcgcggctgcggtcgtcgctacaacggctggtgatcgagcgggaccaacagcccgacgtgacgattcctttcgccgacgtcgccgtgctgatggtggctcatccgcaggtctcttattcgcagtcggtgttggccaacttgtcggcggcgggcggagtgttcgtgagctgtgatgaacggcgtcacccggtcggcatgttgctgccgttggccggacacttcactcaggccgaacgcttcgcggctcaggcgagtgcctcgttgccgactcgcaaacgcctgtggcaacaaatcgcccgcgcgaaaattcgtggccaagccgaagtgctggtgcaattgaacggctcggatcacgggttgctcgcgatggttccgcaggtgcgctccggtgacacgacgaatttggaagctcaggctgcgcgacgttattggccgaaggtcttcggttcgacgtttcgtcgcattcacgaggccagtgagccaactcggtcggaagacgattcgctcgcaggcgatgacgaacagcagccagcggacgcggtcgatgagctttcgctgttgtcgcttcagaaccgttggctgaactacggctacgcggtactccgagccatgacggctcgcgcggtgtgcgcgtcggggctgcatccttcgctcggtctacatcaccacaaccggtacaacgctttctgcttggcggatgacctgatggagccattccgtccggtcgtggacctcgccgtcgtgcggctcttcgagcatcacgcggacttgtgggaactcaatcgcgaagccaaacgagaattgctgtcggca

SEQ ID NO: 374 - DNA, 6843 bp, synthetic construct
  misc_feature 1..6843: note = Synthetic
  source 1..6843: mol_type = other DNA
  variation 2057..2138: note = n is a, c, g, or t
acgtggcggagagcagatcggttgcgtcgcacgtttgccgaattgcagcggcacagtttgttgccggacggcgggttcggttcgtcaagccgtcacgaagcgctgctgaaactggatgccgagttgcggccgaagcacgttccaaaagatgacgaacgagccgcgcagttgttgccgtatctgctgagatcgaagggcgtgaccgagccgctcaggttgctggaatttggacgcgcgttgtttcatctctctcagcgacgcgggtatcgcagcaatcgcaagacggatcagcaacccgaagcggattcgggcgatgaactggacgcggccggcgagccaccgaagaaaagagcgaagcggaaaacgaaagcgaccgacgaacagacttcggcgcgagcgctgaatgccgatcagccggcgaatgactcgaccgcgtcaggcaaggaagacgcgctcaaagtcaaagagtcgatcagccggttgcagcaggagatgggaacgctcacgctcggccaattcttcgcgacgcttgatccgctggagcaccgcatccgtcagcgcgatctttcatcagcgaaaactgaagtcgcagaaggggctcgtcggcaaatgcgagttggagccgaagcggcggcgatgtgctcaagcactgccgatcgcgcaggagtttcgtatccggcaacagatcaatcatctcaagcttcgtgaagccaacggttacgagcggtttctggaggcggacgagcggaatgccttgatcgaacgactgaagaatcagcaatcgctgagttttgcaaaggctcgcgaaggactcggcaaaggcgcgaaattcacggtggaactggacgagaagggcgaagataaactcgttggtgatcgcacgacgaatcggctgcgcctcatctttggcgcggcgtgggatgagttcagcgaagctcagcgggagcaaatcgtttacgacgtgctgcactttcaagacgcgaaagcgttggcacggcgagcgatgcgggcttggaagctcgcgccggacgcggccgagaaactggcgaacacgcagttggaaccggggtacgcgcggcactcgaaacgagcactgacgaagctcgttgagcaactgcggcaaccgtcgagcaaagacccgcaagccgggaagtcgtacatggaatctcgcgaagccgctggctacggcacggcgaagacgacggcagttcacgatcttttgccgccggtgctcaagtcgatgtcgcagcttcggaaccccgccgtttgtcgtgctctgacggaagtccgaaaagttgtgaatgctgtcgtgcggaagttcggcaagccggatgtcattcgcgtggagttggctcgcgatctgaagcgctcgcgaaagaatcggcaagaagtttccaaggcgaacgacatgcagcggaagtcgcgagaacgggccaagcagcgcattctcagtgaggtcggaatcactgagccgagacgttcggacattgaaaaggttttgttggcggaagagtgcggctggcagtgcccgtttaccggcgactccatcagtatgcagtcgctgcttggtccgagtccgcagttcgatgtcgcgcacattttcccgcgacggtatctcgacgattcgttcgtgaacaagacgctttgtcgcgcggacgtgaatcggcatcggatgcacgacctgctgccgattcaagccttcggacaagacaccgagaaatgggacgacatcttgaatcgcgtccgccaattcatgaagcgaaccggccgagtcggctttcaaaagctggaacgtttccagatgaccgaagtccctgacgacttcgtcagccggcaactcaacgacacgcgattcacgaccagcttcgccgccgattatctcgcctatctgtacggcggacgctgggacgagtccggcctgcgcatccaggctagtaccggcggcatcacggctcatctgcgaaacgaatggcggctgaattcaattctcggtggaggagagaagacgcgcgacgatcatcgccaccacgcagtcgatgccgtggccatcgcgctgnnnnnnnnnnnnnnnnnnnnnnnnnnnnnnnnnnnnnnnnnnnnnnnnnnnnnnnnnnnnnnnnnnnnnnnnnnnnnnnnnngtgtgaatcacaaactggaaggaacgcttcacgccgatacgctctacagcccgctcaagacgcacgccgacggcagcacggcacatcacgtccgcaagatgctgcataagctgagcctgaccgaagtgactggcgacaagatcgtcgatccgatcattcgcgagttggtgcaacaacaatttgaacggctcaaggggaccggattgaaagaccccgcgaaagcgttcgccgatccaggaaatcacccgtatctcacgactaagaagggcggcctgattccgattcacaaggtccgactggccgtcgatgtcaaaccgaagacggttggaaaaggccatcgcgagcgattcgtcgctccgaccggcggcagcaatcatcacacggccatcattgcgaagctggacgccgccgggaacgaagtgaaatgggagcagaagctcgtgcctcgtttggaagcgtatcaacgcttgcgtgaccgcaagcaatccggcaagggtgaatccgacatcattcaaagagattggggaaaggatttccggttcaagttctttctgatgccaaacgattgcgtcgagatggacgacgcgagtggtcagcggcaggtctaccgcgtgtgcagcatttcgcagacaccgtcctggaatgaaattcaattcatcgaacaaaacgatgcgagaaagattggcgaggcgcggtcttcatggaatcgagtcaactcgatcgacagccttcgcaaacgtaaggctctcaaagttcgcgtgacgccgttgggcgagatcgtgccggacgaatgaatggaggatgggcactcttgctcgtccggaaattgggcagaacgcaggacgggcaagagtgcccatcctccggaattttgttgcaagtcaaacgacggcgtggccagaatgacgccgcttgatggagacgtggcgacacggagggtcgtgggagcgcggcaacaagatcgcgacaaggccccgaccgatgcacaaccggattctggatatctctgaaggcggagcgcggctgcggtcgtcgttgcaacggctggtcatcgaacgggaccaacagcccgacgtgacgattcccttcgatgatgtcgccgtgctgatggtggctcatccgcaggtctcgtattcgcagtcggtgttggccaatctttcggcggcgggcggagtgttcgtgacgtgtgatgagcggcgtcatccggccggcatgttgctgccgttggcggggcacttcacgcaagccgaacgcttcgcggctcaggcgagtgcttcgctgccggctcgcaaacggctgtggcaacaaatcgtccgggcgaaaatccgtggacaagccgaagtgctgacgcaagtgaatggctcggatcatgggctgctggcaatggtctcgcaggtccgctccggtgacaccacgaatcatgaagctcaggccgcgcgacgctattggccgcatcttttcggttcggcgtttcgtcgcattcatgaagcgaatgagcaattgccattggatgacgattcactcgatggcgatgacgaccatcagccgtcggccgaggtcgatgacctttcgctgttgtcgcttcagaaccgttggctgaactacggctatgcggtgctccgagcgatgaccgctcgcgcggtgtgtgcgtcgggactgcatccgtcgctcggtctgcatcaccacaatcggtacaacgctttctgcttggcggacgatttgatggagccgttccgtccggtcgtggacctcgccgtcgtgcgactcttcgagcatcacgccgacttgtgggaactcaatcgcgaagcaaaacaagaattgttgtcggcactgacggagcgctgcctgttgggaggcgagcaacgcacgctgtttggccgccgcgctcatggacgaaaccgacgtcttggacttgccggagtcgctccatgccgcgccgtgaactcacgctttcggggtattcgggaatgtggttgttcgccttctttgacctgccagtcaaaacgaaacgcgaccgcaagcggtacgctcagtttcgcgcgaagctgctatccgaaggtttttcgatgttgcagttctcggtttacgcgcgatattgctccggcgaagacatgagcgactcgctgcgcgaccgagtccgcaaagtgatcccccaagaggggcaagtccggttgatgtcgatcacggatcgccagttcggtaaacaggaggtgttctttggaaaacgtagtcgatccgttgaggagcccccttcccaattggttcttttctgaagttcgagccgtgccggtcgccttgtggtcatggacttacggaggaagtcgttgtatccgagcggtgattccctccaagccacagcttggctggtcgtaacgacgttgctccgttggttgtatccgagcggtgattccctccaagccacagccctcctggtagtgagtaaaatccgcccggcacatagcccatgtactcatggcctgctcccgtttcttgtgccagggcggaggctcaataacgcgctggatttgagaaaccggccctggcacgagaaacgggagcaggcgaattattcggcaattcccggtgcagtctcaggcgatgatttcgtggattggtttgccgaggtcgatttcgaggcggcggcggccggggacttcgagggccagtggatcgaggccgagttgatgcagcaccgtcgcgtggatgtcggtgacgtagtgcgggtgctcggcggtgaagaagccgagttcatcggtggagccgtgagtgacgccccctttgatgccgccgccggccagccaactgcaaaaggcttgcgggtgatgatcgcggccggttccttgagcggcaggagtgcggccgaactcggtgccccacacaaccagcgtgtcgtcgagcaagccgcgtcgcttcagatccttgagcaacccgccgatcggcttgtcgacttgagcggagaggttggtgtgattgctcttgatctcgccgtgagcgtcccaggctccgccacctccgccgccgtggaagatctgcacgaagcgcacgccgcgctcgacgagacgtcgggccgacagacaaagttgaccgaacgactgcgttgtcggttggtccatgccgtagagattctgcgtctcggcggtttcggtcttgaggttcaccacttcgggaatcgcagcctgcattccgaaggcgagctcatacgacttgatccgtgctcgcaacgctttgtcgtccgggtagtcgatgcccgacagcgcgttgagcttgccgagcagactgaattcgcccgcttgttcttcgggaaggacttgcccgtttggtggcacaacgaacggcagcgggttcgctccgccgacgttcagccgcactccggcgtactgcgggccgagatagccggctccgtgagtccactcgccgccgcaacaatcgccggtcggcacgccgagcacgacgtagtccgggaggttctgattcatcgaaccgagtccgtaagtcgcccacgagccgatcgtcgggaacgagccttcgcgcggatgccgtcccgtgtgccaggtgagttgcgtgccgtgatcattgtgaatcgtccagagcgaccgcacgacggcgagatcgtcggcgcactcgccgatgtgcttgaaccagtcgccgacttcgagtccgcagtcgccgtactttttgaacccggtttgcagtggcatcagttgcttccgctggtagtgaccgggattcacgccgacgaggtttttgttgatccgctgctcgtcgtgcaggtttttgtacggcgtgtcgtcgatcgacttgccgccgtacttggtgagttccggtttgatgtcgaagctctcgacgtgactgactcccccgcagagaaaaatccaaatcacgctcttggcccgctgcgcaagatgcggccccgattgcggcccaacacgagtcgattcggcgcgagcaattccgtcctggaacaacatggcacccagagcgacgccggtgaagcccatgccggtatcggccaagaacgaacggcgagaaactctgccgcatccgcaggctggatgatcgtagttcatgtcgaggtctcccggttcgctctcagcggatcgtgacgaagtcgttgtggttcagcaaaacgtggacaagattttctctcgttcgcaggatcggatcggcggcgggcttgctggtgtcggcgatctgaccgccggtttgagtgaggcgttcacccgtcgccactagcttctctcgctgctgatcgaggaacgcgagcgaggcttgtgtttcatccgacgttggcggacgagacaggactcgctcgaacgctgcaacgacgaaggcagaattgtcggccgccgtcgtctcgtgcaattggcgggcgatgatgcgggcttggaccagcgtcagctcgctgttggccagcgcgagggcttgttgcgggacgatgctctccttgcgctggtagcactcagtgaccgcggcgcaatcgaacatcttgaggaactccatctgcttctcttgcgcgtgacggaagtagaggctgcggcggttcaccttcagtccgagttcgtagtcgatgtccggcccgccaaaggtgaggtcgagcttgccggcgacgaacaggatgccgtcgcggaccagttccgcttccatgcgtcgcgaggacatgcgccatagccagcggttgtcgggatcggcggcgagattgttgtcg

SEQ ID NO: 375 - DNA, 15884 bp, synthetic construct
  misc_feature 1..15884: note = Synthetic
  source 1..15884: mol_type = other DNA
tggtcctatacctttcacgccgtcgaagagagtacttatctgacccttgctgcggcgattgcggtgatgggtaatgccgaatcggtgagcctcgtcgcgcagatgttgcaccacgcgcagcgactcgctgtttttatcgatatacagcggcacactatcgcccggaaagtatatttcttcgagtcgtttggcaatgcccacgagcgccactttgccgcgaatgcccatttcatcgaatgcttcgaccgccgcgctcaactgacctttgccaccatccaccaccacaagttgcggcagttcctcaccctcctccatcaggcgggtatagcggcgcgtgagcacctccttcatcgaggcgaaatcgtcgggaccttccacggtgcgtatattgaagtgacgataatcttttttcgatggtttggcgttcttaaacaccacacacgaagccacaggattggtaccttgaatattggagttatcgaaacattccacatgtcgaggcaactcattaaggcggaaatcgcgctgcatggtcatcaaagtgcgagtgacgcgctgctcgggatttaacttctccattcgcttcaagcgatccactttatattgcttggcattgcttagagagagttcgagcaatttgcgtttatcgccacgttgcggaatcacgaaacgcacatcggcaaattcggcatcaggtatcaccgacaccaccacatctttcagcggcaaatcgaatcgctcacggagttcgtcgattgctatcgacatgagttcttcgtcggtttcatcgagtcgaatcttatactcaatggtgagagttttcactatagcgccattgcgcacatgcataaaattgataaacgcggcatcctcgtcgcgcagcaacgaaaatacgtcgatattatgaacctgctgactcaccacttcgctcttggagcgatatttctcgatgagttgatatttctccttcagcacctgtgcctcctcgaagcgcagctcctccgagagtcgcatcatttcgtccatgagatgctcggtgagttcgcgagtgtcgccgttgagaatcttcttcacaccctctatatattcggcatattgctccttgctcaccagtccgcgacaacagccttcacaattatgaatgtgatattgcagacagagcggaattttggcgcgctctatagtgttttggtcgatggcatggcgacaagtgcgcaaaggatagattttgcgaatcacatctatcaccacacgcgccatattgctatgggcataggggccgaagcatcgtgcaccgcgctgaggcttgttgcgagtgatgaaaacacgtggataatcctcattggtgatgcaaatccaaggataggacttatcgtccttgagcagcacattgtagtgcggctgatattccttgataagactgttttcgaggtgaagcgcatcttcttcggtagccaccacggtgtactgcatatcgtagatgtttcgcaccagtatgttggtgcgagccaccgagtgaactctattgaaatagctgttcacgcggcgcttcagatttttggctttacccacatatatcaccaccccatcgcggttgtaataacgatacactccggggcattcgggcagcagacttatcttcagtttcagttcttcgcttggcatcatcaccctactaaaatgagaaaaacttgttgttataatatgcaattatccccctgacgacagacctaagcatcatcaaggggcataatcgatattaatacactatcatagcatttacaggcacatcggcggggaacaatttgcgaccttcgaggccggagagttccacgataaagtcgatgtagaccttcttgggattcatcgatttcacgagttcgtaggcagcgagcatagtgccaccggtggcgagaaggtcgtcgtgaattaccacgatatcgttttcatcgatggcgtcgcggtgaatttcgatggtatcgctgccatattccttggcataggatttgctcacagtgtcggcaggcaacttgcccggcttgcgtaaaggcacaaatccagcaccgagttcgcgagcaagaatcgagccgccaataaagccgcgggcttcaacgcccaccaccttggtaataccgagtccggcatatttttccacaaggctctcagtgatgattgccaatccctcagcgtccttaaatgctgtggtcaaatcgcgaaacaaaattcccttcgacggaaaatcaggaatgtttctaataaggctttttaccttttcaattttttcttgttccataagtatgatttgggtttatgtaaaattgttccacgtgaaacaattttgatttatcttcctaataataaaagcaatatattgatgtcgctgggcgaaatgccggggatacgcgaggcttgtgccacggtctcgggattgatgcgctcgagtttctgtcgagcctcggtagagagggcattaatctcgctataattgaagcgatcttttattttgaggttctcgagacgctgtatcttatcggcaataattcgctcgcgctctatgtagccttgatacttgataagtatctcggcggcttcgattatctcttcgcggcgctcggcttcgaggctatcgagtagttcggcgagcggctgaatcatcgtggcgagcagattgattgtgagctgcggtcgcaagatgagttcatacaacttggtgccttgcttgagggcgggaagtccggcttgctcgagcatgggattgatgatggctgcctttaccgaaaattccttggcgaactcgatgatgcgctctatttgctctcgcttcgacaccataagctcgtagcgttcgcgggtggcgagacctaagcgataggagcgctcggtgaggcgcatgtcggcatcgtcttgacgcaaaagtatgcgatactcggcgcgtgaggtgaacatgcgatatggttcgtccacgcctttggtcacgaggtcgtcgataagcacgcctatgtatgcttcatcgcgtccgagcacaaagggttcgccgcctacgacattttgatgtgcattgatgccggctatcaagccctgccctgccgcttcctcataaccggtggtaccgttgacctgtccggcaaagaagaggttgcgcacacgtttggtttcgagcgtatgcttgagttgtgtggggtcgaaaaagtcgtattcgatagcatatccggggcgatagatttgcagattggcaaaggcgggaatcttgctcagcgcttcgaattgtatcttccacgggagcgacgaggagaatccgttgagatacatctcttgggtggtttcgccttcgggctctatgaaaagttggtgttcggtcttatcggcaaatgtcactatcttggtttcgatgctgggacaatagcgtggacctatcgactgtatctggccattaaatagcggtgattcgggcaaacctcggcgcagcacttcatgcacttcttcgttggtgtaaactatgtagcaagggcgctgcttgagggtgcgtttcacaccgggcagataggagaatttatggaagtcggtatcgccttcttgcactccgcagagcgagtaatcgatggtgcgagcatcaaggcgcacgggggtgccggttttcatgcgatcggtggcaaatcccatagcgcgcagctgctcggtgatgccatgacttgcgggctcggagatgcggccgccggtcatctgcacggggccgatatgcatcaatccattgaggaaagtgccggctgtgagcaccactgcttttgccttaaactccacgcccacggcggtcttcacaccagccacggcatcgccgtcgaagagcagttcgattaccgaatcctgccacatccacaggcgaggggtgttctccaccacgctgtgccattcagccataaattttgttcggtcggcttgcgcgcgagggctccacatagcgggacccttgctgcggttaagcatgcggaattgtatagccgaacggtcggtaacaatacccatctggccacccaaagcgtcgatttcgcgcactatttggcccttggcgatgcctcccacagcggggttgcaactcatctgggcaatcttgttcatatccatagtgatgagcagtgtgtcggagcccagattggctgccgcgcaagctgcttcgcaacctgcgtgtcctgcacctatcactatcacgtcgtattcaaatctcatcgttctattgcattgtttgggagaatggcaagcgcctcattctcatgcatttccattatttctctttcacccggacctttgtcgttgatgccgcaaaggtgtagcacgccgtgtataatcacacgcataagttcctcattataagcacgtttgaagagttcggcattgcttttaatggtgtcgagcgatatgaacatatcgcccgatatgcgcttacggctgctatagtcgaaggtgataatatcggtaaaataatcgtgctgcaagtattggcgattcacctcgagtatcttctcatcgttgcagaagatgtaagtgaggtcgccaaccacacgcccatggcgttgcgccacttgcgcaatccattcatttacagccgtttgattaatcggcgggagttccactccctgtgctaaataacttatttcactcatatcaatgcaaagttacgagttttcgttgagttattgattatcaagataaaaagaaattgcatcgcgcagggcgaaaataagcgcgaaaggtgcgttgtaatcacctcttgcaagacaatctccatcgcagcgcaaaaagcccgactgcgtcgcccggagtggcaaataaagccatgcgagcgactgaagcatcacattcagtcgctcgcatggggtaatattatctgtttcggctcagccggactatccgaagaagaaataagccacaagcaccgcagctatgctgcccacaatgtcggcaaagagtgcataaggcactgcatagcgagttttcttcacacctacactgccgaaatacacagcgagaatgtagaaggtggtatcggtggcgccttgcatacatgccgacactctgcccacaaatgagtcggcgccgaaggcattcatgcagtctaccatcataccgcgcgaaccactaccgctcaatggcttcatcagagccgttggcaatgcccctacccactcggagtcgaagcccatccaatcgacggcgtttttcatccaatccaccaccacggtcatagcgcccgatgcgcggaagcaacctattgccaccaatatagccacgaggtaaggaataatcatcacagcggtcttaaagccgtccttggcgccttcgataaaggcatcgtacacattcaccttcttgcgcactcctgccagcaggaatgtcactatcacggtcaggagcaagaaattggcgaagaaactcgaatacttctgtatctcctcttgagagagttgggcgaagaaatacaccacgctgcccacaaaggctatcaagccgagcaggaaggcgagcagcacgcggtccatgtggatgcgctgcttgaagcacagtgccatcatgcctacgagcgttgccactgtggtggctatcaatatgggcacaaacacatcggtaggattggcggcgccgcactgtgcgcgatacatcatcacacctatgggcaccaagcacagtcccgacgaattgagcaccaaaaacatgagcatggcgtcggtggcggtgtccttctctttattgaggctctgaagttcttgcatggctttcaagccgagcggtgtggcggcgttgtcgagcccgagcatattggcggacatgttcataaatatcgaacccagcgcggggtgatcttttggcacaccggggaagaggcgtgtgaacagcggactgatgagtcgtccgaaaaattgtatgatgccgccgcattcgcctatcttcatcaatcccatccacaacgacaggatgccggtcaggcctatcgaaatctcgaaggcttgacccgacgaattgaacgctgcattcattatgtcactccatatcgacaagttgccattgacggcggtatcgattaatgccaccaaaaatgtgataaggaaaaaagctacccaaatataatttaatgccattttaataattttggttatctcgacttgtcgcaagcgaaataacaggtttgaaagtgcaaaattacagaaaatcactcttattcgctgactaattgcacgaaaaaatgcagttttggcgtttcgcaatttttttgacgattttgccgaaatgccatttttgcgcttaaacagcaaactttcaggcatttacgtcaattttcaccccgcgagaatcaaaaatttgccaagcactcggtggattaccgggattttttgatgattttttccaaaaatttctgtccggcgcgaagcatcgccacctcggagtcaaaaaaaatttcgccggactactgtggagcaaaatcttcgcctctcgcggagtgggactgaaaaaatctcatcaaccacggccgagagaaaaatccgaaatcgcacatcgtgccccgatgccgaaaaaaaatatttttcttccccggcgcgggcgggttatgattttgattgggcttttcgtaactttgtaaaaaaattaatttcaacattctctatgtcgacttacaccaaagatgacttgcttgcgctcatacgcaaccaatcgcccatgacgatgcggcagcagttgctgctcaccgccatgctcagtgcgcctgccatcatggcgcaactctcgtcgattttgatgcaatatatcgatgcttcgatgttgggacgcttgggcgcaatgcaggcggcttcggtgggattggtgtcgaccaccacttggctgtttggcggattgggatttgctttgtcgtcgggatttgccgtgcaggtggcgcacttggtgggcgccaacgactactcggcggcgcgctcggtggtgcgacaggctttggtgacttcgctcatcgcaggcgtggcattgggcgtggcgggaatgttgctcagcccgcacttgccggtgtggctgggcggaggcgacgacatctgccgcgatgcttcggtctacttcctgatttatgccgcggcttatcccctattgatgctattctactgctcggcggctatgctgcgagcctgcggcaatatgaaggtgccgagtgggctgagcatcggcttgtgtgtgctcgatgtggtgttcaacttcctgctcatttttccacaaagacattacactgtggcgggactcgaaatcaccatccccggcgccgacttgggcgtgacgggcgcggcactgggttcggcgctggcattcctggtggtgagtgtcggcatggtgtggtatctgatgcggcgttcgcccgaattgcgcatggctgaaaatcgcggatcgtttcttcccacgcgccgatgcttgagccgcgccgcgaaaatcggttcgcccatcgctctcgaacgcaccgtgatgacttcagcccaaatagccattaccgccatagtggcgccgctcggtgcggtggccatcgctgccaacacttttgccatcaccgccgagagcatctgctatatgccgggctatggcatctccgacgctgccaccacacttgtaggtcagagtttgggcgctcgacgcaaggctctcacgcgccgatttgcctacatcacgctcgctttaggcattgccattatgagcctcaccggtgcgctgatgtatgtcgccgcgccgctgatgatgcagctcatgacgcccaacgccgagatagtggcgctcggaagccatattcttcgcatcgaggcgttcgccgaacctatgttcgcggcttcgatagtgtgctatggcatatttgtgggcgcaggcgacacgcttatgccgagcatcctcaatttctgctgcatatggctcgtgagactctcgctttcgctggcgctggtgggggcaatgggtctgacgggcgtgtggatagccatgtgcatcgaactttgcgtgcgcggcgtggtgtttctctcgcgtttcgcttggggcaactggatgcgcgctctgaaataatctttttttaaatatataatcatgaccgacaattcttctctcactctcctctcgtggcaacaacagctccaagctgctgcccaacccgaaaaagtggctattctgagcagcttcttcaagtgcggcaagggcgaatatggcgagggcgacctctttctgggcatcaccgtgcccgtcaatcgcgccatatcgcgcctctactacctgttgccgctcgaccaaatcgctgccatgctccacagcccctatcacgagtttcgcctcggcgcattgctggctctggtgcgccgctacgagcgctgcaaagccgatagggcgcagatagtggatttctatctgcaaaacactcggtatatcaataattgggacctcgtggacctctcttgccctaaaattataggcgaatatgtgcttactcagcccgacgcggctatgctgatgcgcctgagccgcagcaaggatatgtgggagcaacgcatagccatagtgtcgaccctgacgctcatccgcgccaatcggttcgacacgaccatagccattgcggagagctatctcagccactcgcacgacctcatccacaaagccaccggatggatgctccgtgagatgggcaaacgcagcgagcagcacctcactgcattcctgcaaagccacgccgagcagatgcctcgcaccgccctgcgctacgccatagagcgcctcagccccgaccaacgcacccactggctcagcatcaaaaagcgataatccccccgcagatggaacttaaccacagattttcacagtgaggggattttgaccacggattttcacaaattgtagcgcatctgcgagataaaatcatccgcgaaatctgtgaaatctgtgtgagattacccgccacggcattaaaccttttgccgctatatgcgtcatatatgataaaacctcttaaaaacccacatagatatgaaaaaaggatacattgccgaagccataatactcgccataggcatcatcgtattgggctttaacatcaagggcggcatcgacaacttcgtcgacaaggaccgccaagtaactgtgaaaggtcttgccgaacgcgaagtgcccgcatcgcgcgtcacttggcctattgtcctcaaggagatgggcaacgacttgccgagcctttactcgcaaatcaactccaaaaacgaagctattattcgcttcctcaaatcgggtggaataaccaccgacgaaatcgtggttaacccgccttcggtctacgacaaaaacgccgaaatgtatgagcaaaacaacatccgttcgcgctacaacatcacctcggtaatcacagtcacttccgataaagtcgacgccgtgcgcaacctcattgcacgccaaggcgaactcctcaaagacggcatcgcaatactcaacgactactcctatcaggtaaaatatgaatacctcggcctcaacgacatcaagccccaaatggtgcaggaagccaacctcaacgctaaaaacaccgccgaacagttcgccaaagcatgcgacagcaacctcggcaaaatagtaaccgcctcacaaggccaattctcaatcgaagaccgcgacgacaactcccctaacataaaacgaataagagtagtcaccaccatcacctacaaactcaaagactaactatcacatacacacacaaaaaccaaccaatcgccaacggaaaccgttggcgattatttttttgcacacctatataaaaaaggagggatgccgcaatacgacatccacttaatgttttcacaacggaataatccttattgtgaattgctttcaattttgtactacaaaactataatgtatttgtgaaatttcaaaattatttcgtaacttttttcaaaaaagaaatttttgattatctttacaaacaaattattaacctaaaaaaaccacacgcaatagtatgaaacgaattctcggactagaccttggaacagccagcataggatgggctgtaatcaacgctaatgacgatttggaccctttatccattgaaaaggccggaagtagaataattcctatgacagccgatgaaattagcgattttaataacgggacgcttcaatctaatgcaagtactcgaaccaggtttcgaagcattagaagaatgattgaacgttctcataatcgtagatatcgtcttttacgatgcctacgattaattggttttctgcccaagcactacgatgattgcatcgaccgatatggcaaattcattggcgatagcgagccaaaaattgcttggaaaccaaatgaagtaaccaaaaaatttgaatttttgtttcagtcttcatttaatgaaatgattgacgaattcaaacaaaggcatcccgaattagattcaaacaaaaagattccttacgattggacaatttattatcttcgtaagaaagcgctatcacaaccgattctaaaagaagagttggcttggattttgttacaatttaacaaaaaacgtggatattatcagcaacgactattggacgatttgccaaatgaaaacaaactagaggaatatgtagaagctatagttattcgttgtgaagaagataatgaatcaaaaaagaacaagaaaggagaatcttggttcaatatctatttagacaatggcatgactattaggcgctcatacaaagaaatgccaaaattagaaggcgagttgttgaaacttatagttacaaagacaattaaagatggtgagtttgaaaaagataaagacggcaatatcaaacaatcatttcgatcagtaaaagatgaagattgggctgttctcaaaaagttttcagaagacagaataaatcaatctaaaaaaactgttggagaatttatatttgataatatcctcgacaatccagaccaacgtgttgttggtggcattattcgcactattgagcgagactattatttgtcagaattgaccaagattcttgaagtccaaagtcaatttcataaagaattctcaaatgcagaattatatcgctcttgcttggaagaactatatccaactaataaaacccatcaagaagaaatttcaaaaaaagatttgaaattcttacttgttaacgacattttgatgtaccaacgtccattaaaatctcaaaagaaacttataagaaaatgcccttttgagacttttacatcaaaagatggtagtatattaagttgccgctgtgtgtcaaaatccaacccattttttcaagaatttagaatttggcaatttatctcttctttacaaatataccagcgaaaagaagaaatagatggtaatatacatttggatgtaaacaaaacatcgcaattcctaaaaactgatagcgattatgtaaaattattcaaaacgctgtacgacaaacgttctatatcacaaaatgtgcttcttaaatattttaagctggacaaagagaattacaggtggaattttgttgaagacaaggagtacccatgcaatgagacaagaaatgccattattaatgcaataaagcattgcaaacttaacaagactgtgtatcttgttccaacttacgaagaagatcagattattcaaacagataaccgcatccagttaaaagaatctgagatatggtactatttgtactcaatttccgacaagaaaaaattacgcaaaactttcagcaaatatgtagagcgcaacaatcttccaatagagcttgctgaggcattaacaaacataaagccatatgcaaagacgtacgcttcatattcattaaaagccataaaaaaacttcttactttgatgagaaggggtgaattgtggcatgctgaagctatagataatgctaccactacaagaattaacaagataattgatggtgaagcagatgaaaccatatcagaacgcactcgggaaaaggtgtccggacgtaatgatattagtcaatttagtggtcttcctttatggacagcatgctatgttgtctacaatcgtcactccgaagcagccgacactactaaatgggattctcctaacgatatcagagcatggattcaaaattttagacacaattcgttgagaaacccggttgttgaaaaagtaatattagaaactatgcagttagtagctgatatttgggatcgttttggcaaaattgatgaaattcatcttgaactaggaagagagatgaaaaacaacaacgagaatcgcaaattcatcactaatcaaaatcttaataatgagaaagaaaatcgccgcatatataatatgctctgtgaattttacgagcatctaaatattacagatttaaatcctaattcgccttctcaacaagagaaatttaaaatcgtagagaatgcggcatttttatcttttgaagacagcatagatactacatctaactttaaagaatcaaaagaatacatagaatataaagagtgtgaagctattagaaagaaatttgccgacaaaaataaacgtccaactaaagccgaagtaacaaagtattatctatggttggaacaaagatatttgtctccttacacaggtaatcctatacaattaagcaaattgttctctgccgattatcaaatagagcacattattcctaaatctgttttctttaatgattcgttctcaaataaggttgtctgcgaagctgtagttaattccgacaaaggccgaagtcttgcttttccatatattaaagcaaatgcgggaagaacttttagtatgccttcaggaaatactgtaacaatattatccgtagataattataagaaccatgttactactatatataaacacaatcagaaaaagcttaaaaatcttctattagaggatatctctgactcatttattgataggcaactgaaagatactcaatatataagcaaatatatcaaacatttgctttctaatattgtgcgcgaaaacaacgaacaagaatctatgtcaaagaacattattgtctgcaatggcacaataacatcaatcttaaaacacgattggggtatcaatgataaatggaatgagattattcttccaagattcttgcgcctgaatcagattacaagctccgcaaattttacttatatcaataaaacaggtcatcttgtgccttgtgtcccaaactttgcgttttcttttatggtaaagagtaaaactaatcagtttaatccacaagacgcaacctcaagattgaaacgaattgaccaccgtcatcatgctatggacgcaatagtgatagcttgtgccactcgtagtcatataaatctgctgaacaacgaatatgcaaagtcagataaccgacatcttagagatgcactatctagaaaactgagggtcttagaaccaaaacaggataggaatggcaaacagatactagtaccaactacattctctctaccttggaaattattcccaatagatgtttacaaagcattatgcgacataatagtgacgtataagtacaaaactaaaataatcaagaataacaaaaacaaaaattgtaagaatattgttgacggagttaaccttaaccaaaatattacagttaggaaaccccttcatgccatgacgtattatggactggtggatatttgtaaaaaagatagtgtagcactcaaagatgcattaaaccctatatatacaattattgataccgaattgagacaagttattcaaaaaatgactgcagaaggccataatttgaaaacaataacaaaattctttgataataataaagataaatacccccaatacaacaagaaggctatcgaagttatgtattttacaaacgatactaacgatgtcgggcaaatgcaagtagcatctcgttacaacttggtatccttatttaatgatatcaagaatcccccaaataattccgaaaaaaaatcagacaataatgaatttaataaaaaattagattcaaattttaaaacggtaaaggatattttggagaaaattgcagataaagatgttcgcaatattgtattaaatcactatctcgaatatcagaataatccggaatttgcatttagtgatgaaggcatcagaaaaatgaacgaaaacattattcgattaaacaatggcaagaatcacaaaccaatatattctattagaaaattagagccattgggagctaagttcaaggttggtaataagaaatgcaaaaaagcacaatatgttatagctgaaaaagatacaaatctattttttggtgtatacttggataaagatggtaatagagtattctctactatttccttaagagactctattaatgcactaaaagcggggaagaatcctgttcctgcagttttgaacaataacactcttttattttcattgtcgcctaacgatttagtttatctgccaacggacgaagaaatacaatcaggtaaaatcaatcaaaagattgatattaatcgtatatacaaagtagtatcgttcactagtgatagaatctattttgttcaacaatttgtagcatacccgattgtatctaaacttgaatttgaaaaaaagaataaaattgaacgagccgtaacaggtgaaataatcaaacgatattgcattcctattaagacaaatcgtcttggggaaataattcaaattggcaacgtatgattaaacgaaccctatatttcggtaatccggcgtatttgagccttactaacaagcagcttgtgataaggcttccggaagtggaaaaagccgacaatgtgagcgaaataatcaaagaaaaggctgtgcgcaccatcccgatagaagatgtcggagtggtgatgctcgaccacaaacaaattaccataactcaggctctgcttgaggctctcatggacaataatgtggctgtggtgacctgcagcagttcgcacatgcctatgggcttgctgttgcctctcgcttccaactgcatacctaacgagcgcttccgcaatcagctttattgctctgccccgctgcgaaaacagctttggcaacaaaccatgcaaaccaaaatacgcaatcaggctgccattctcaagcgaaacacccatcaacccgtaagcaatatgctgcgatgggccaacgatgtgaaaagcggcgatagcgacaacctcgaagcgcgcgctgccgtgtattattggaaaaatgtgtttcccggcatccccgactttgtgcgtggtcgcgatgaattgccgcccaacaatctgctcaactatggttacgccatattgcgagccatcacagcccgcgccctcgtggcaagcggtatgctgcccatactcggcatacaccaccacggcagagaaaacgcttattgcctcgccgatgatgtgatggagccatatcgtcctattgtggaccaagtggttatcgacatcataaatagcggagtagactataacgaacttaccaccgacataaaagtaaaactcctgtccatacccaccatcgacgtgaaaatgggcagcaaaactcgcccattgatgatagctgtggctcaaaccacagcctcgctctataagtgcttcgaaggatctgctcgccgtatcgactatcctttgctgtaacccctacacaaccaaattagaggaagaaactccgccactgatttatctaccccccaaaaacacctttttgtgaagaatcgctttaacgaatatcgcattatgtgggtgcttgtattattcgaccttcccaccgaaaccaagaaggagaggaaagagtatgcccgattccgtaaggtagtgtttcactgagtgtgtctgaggcgagttcactcaagcctgtagacctcagatgacgatgcaaatttaacgattatctttcatattttttctgt

SEQ ID NO: 376 - DNA, 24341 bp, synthetic construct
  misc_feature 1..24341: note = Synthetic
  source 1..24341: mol_type = other DNA
acccgttggcttgtacggcgttcaacgccgacttcgacggtgaccagatggccgttcacttgccacttggtaacgaagcaatccttgaggcccagatgttgatgctcggtgcacacaacatccttaacccggctaacggcgcgcctatcaccgtgccttctcaggacatggtgctcggtctttactatatcaccaagctgcgtagcggcgacaagggtgaaggtcttgtattctacggaccggaagaggccgaaatcgcatacaacgaaggaaaatgtacgctccacgccattatttcagtaatcgttgacgatctcgacgaaaacggaaatctggtgaagaagatggtgaaagaaacatcagtcggacgtattcttttcaaccagtatgtgccgaaagaaatcggatatgtgaaccagttgatttccaagaagtcattgcgcgacatcatcggtgtcgtaatcaaggcttgcggtgtggttcgctcagcacagttccttgatgatatcaagaacctgggttacaagatggcattccgtggcggtctgtcgttcaacttgggtgacgtgctgattccggaagaaaaggaacagtatgtaaaagaaggttacgagcaggttgaagaagtgatgaacaactacaacatgggtttcatcaccaacaacgaacgctataaccagattattgatatttggacacacgtcaactcccgtttgtcaaatacgctgatgaagcagcttactgctgccaaccagggcttcaacccaatcttcatgatgcttgactctggtgcccgtggttctaaggaacagattcgtcagctctccggtatgcgtggtttgatggccaagccgcaaaagagtggtgctgaaggcggtcagattatcgagaacccgattttggcgaactttaaggaaggtctgtcagtgttggagtactttatctctactcacggtgcgcgtaaaggtcttgccgataccgcgttgaagacagccgacgccggttatttgactcgtcgtcttgttgacgttgctcacgatgttatcattacagaagaggactgcggcacattgcgtggtcttgtatgtacagagttgaagaacaacgaggacgttgtcgctacattgggcgaacgtattctcggtcgtgtttctgttcacgatatcgttgacccgcttacgggtgaagttatcgtagcagccggagaagaaatcaacgacgaagcagccgacagaattcagaagtcaccgattgaatcggttgaaatccgttcggtattgacttgtgaatccaagaagggtgtatgtgccaagtgttatggccgtaaccttgctaccaaccgcatggtacagaaaggtgaggcagtcggtgtcatcgctgcacagtcaatcggtgagccgggtacacagttgacacttcgtacattccacgtcggtggtgttgcttccaacattgcagccgtatcttctgtaacttcacgctacgacggtatcctcgaaatcgacgaattgcgtacagttaagactgaagcttgcgacgttgttgtaggtcgtcttgctgaaatgcgtatcgttgatccgcatacaaatatgattcttacaaatacgaacatcccttacggttctaaactgtacttccagaacggtgctacagtcaagaagggtgacgtaatttgtgaatgggacccgttcaacgccgtaatcgtcagcgaagtttccggtaaggtgaactttgaaaacgtcatcgaaggtgtgacattccgcaaggaaactgacgaaacttctggtttgcacgaaaagattatcactgagtcgaaagaccgtacaaaggttccggaagctcacatcgtaagcccgaacggcgatattctcaagacttattcattgccggtaggcgctcacctcatgattgaggacggcgacgaaatcaaggctggtgatgtgttcatcaagactccgcgcgcatctggtaacgccggtgatatcacgggtggtctcccacgtgtgaccgagttgtttgaagcgcgtaacccgtctaacccggctatcgtttctgaagtcgacggcgaggttatcttcggtaaggtgaaacgcggtaaccgtgaaatcactgtacagccgaagattggtgaagtcaagaaatatcttgttccactgtcaaaacagatccttgtacaggaaaacgactatgtacgtgccggtacaccgctgtccgatggtgctatcactccgtctgacatcttgaacatcaagggtccgacagccgttcaggaatatatcgtgaatgaagttcaggacgtttaccgtatgcagggtgtgaagatcaacgacaagcactttgaagtaatcgttcgccagatgatgcgtaaggtgactatcctcgatccgggtgacactcgcttcctcgaacagcaggttgttgacaagcgcgaattcatggatgaaaacgaccgcatctggggtaagaaggtggttgttgacgctggcgattctcagaacttgaaaccgggtcagatgattactgcccgcaagctccgcgatgaaaactctgccttgaagcgtaaggacttgaagactgtacaggtacgcgatgcagttcctgctacttccgaccagatgttgcaaggtatcactcgcgccgctcttcaaacttcaagcttcatgtcggctgcttccttccaggaaacaactaaggtgctcaacgaagccgctatcaacggtaaggttgactacttggaaggtatgaaggaaaacgtaatctgcggtcacttgattccggccggtacaggtttgcgtgaatacgcttccctgattgtcggcagcaaggaagaaatggcacgtctgaacaagagccttgatgctcgtcttgaagaagaagctgcagctgatgccgctgtcatcaagaacgctgaaggaaactaagctattatttgaacctgaaatattaagtcggtcattgccttgggggcagtgaccgatttttttgtctgtatctgtttgtttagtcggtaaagtttggtaaatttgtagaattcaagacatttcccgcaaggaagacgtatataaacctaacaacccttaaaacctttaaattctatgaaaacgaaactgattgcaatgttcctgacattggcttccgtattgccggcgtgggcagcacctgcgctgatcggacaccgtggaagtctctggggtgtggaaaattcgcgcgaggcgtttattgccggtgcggaaatgggatacctttatctggaaacggatgtgaaagtggcaggcgacggaacgtttatcctcattcatgacgatacgaccgaccgcctgggtggaaatcttgacattacgaaagcgacaatcgacgaactcaaggcggaaacttacacgcagacccgcagcggggaaacctatactggaaaaatctgtacgctggaggaatatctgcaaatctgcaaggactataacgtttatcctttcatcgaattaaaatgggctaccggaatcaacaccaacgactgcagcaatctgtcgcgaatggtggacaaggtgattgaatacgggtttggcgaaacggccataatcaatacgtccatgaaaaagtgtctggagtatatccgcgagcgttatccgaatttcaaactcatgtttctttgtaattccaattgggaatcgaatttcgactggtgtgtggagcagaacatcggagcctacattcagacgggctgtttcgacaagaacaccgtgacacgtttccatgaaaaagatttgaaagtcggtgtatggacgctgaatacggatgccctctataaggtttacggcaattacggttgtgatttcatagccgtcgactatctggatacggtcgatcttccggaactcgacccgttcagtggtcttgtaccgaatgttgtcgactatccggcctatcgtggaaccgtgcaggaatcctatacgtttgaagatgcttccgtggccgatgttgcgtttgccaatgtccgtagggtggtgaccggcggttcgctgctttatgtgctcgacgatgccggtgttcgcgctttcgacatgaagacgggtgaaaagcgtgccgacatgaatctgactggcattgctaatgtggctgatttgtcggtggcagccgacggtacgctgatggcgcttgccgaaggttcactctatgcttgggctaacctcactgccgcaccgcagttgcagatgactttgcccgaagccgacaatgtttctttctgtgtcagtggtagcggagacgatttgcgtgtctattatacgacggcgaccggaatttcgggcattgccttgaagaaaggttcgttgcccgtgcggaatttcgtggaactgcccgaaaacgcccttctgacggtgtcgcccttcagccgcgaccatgtggtggtcgacacgcgtgcggcacttcctgtggaatatgccttcaactgggagaccgacggcgaagcgatgaagcagtttatggccacgccggccggaaacctttgggaaggaatggcaggatttactccgttccgctatggtagcaacctgtatctgtttgctgccggcagcgagtcgggaccgtttggcttttacaatgtgacatccgggctgcaatccgtagaagccgttcccgatggcattgacggcttcgagaatgctttgacaggctatgcgggaggctttgcctgggtggaaaaaggctatatctatcttatggccgtagccgaagggcaaggaatgttgcgttgcgtgttcaagggagaagagccggaaggtaataccggcgaggtggatttccgctttgaaaaggtttggagctttaccgaccgcgaaggcaatgcgccggagcatatcgacggtacaaacgcacagcagggcggagcttataaaggatatttctatatcaacgactgtagtgacaagttgatttatgtctatggcaaggacggcctggtgggaacgcttccgggcggtgccggctggggaactgcctgcgacgatgccggaaacattattgtgagaaacgacaagcagacggcgttggaacattccgtgctgatttatccgagcggaacgatgccgggcagcggtgtagaaccgttggaagtcagttttgagacactggacatcggccagaccaactttatttcggccagcggtgatgtactgggcgagggcggctatgtgtatatgttccctaacggccagacggtggtgaatatcattgaattccggaatggcgagtttgtgcagacacaccgcagcggtggactctccatccagtcgtcgacagccggatatgttgtgcctatcaaaaacaataaggaacactggctgtatatggtgcgcaataacggcatttatgagtataacggcgcagacgaaggcgtagtgctttcgggctcgtccactcgtccgccggcacgcaacagcacttgcggcgccgagtattttacgctgagtagccataatattcttgtctataattcgggaacgaactacacgggcggctttaccgtaaaggacctgaccgacaacaaatacatcgaaaccgtcaatccgattggcgacaaaggctatacagccggtggcaactattccgtttccaactggatttttgccgaaaagattgatgccggaagctattatctgtaccagtattgcccggctaacggtattgccgtctatcgcctgtgggatgccaactatgtgccggaatcttcagtaggagaggtggctgttgctgccgggcagcgtgtctacccgaatcctgctgccgacaaggtgaatttggcagtgccttcgtcaaaggtgacggtctacacattggcaggagtgcctgtcctccaattgacgggtgaaagaatcagcagcgtgcaggtcggggaactgtcgccgggaatgtacctgatgacaaccgacagcggcacggttcgcttcctgaagaagtaggcggttgccgcaacgaaatgacctattatttaatccaacaatacaaaacgaaatgacaatgaaaaaaatcttttggtgtgtgtcggccttcggctgtctgccggggctggcattcgccgctgaaaaaccgaacgtgattgtaattcttgccgacgaccttggtttcggcgatgtgagtgcctatggctcaacaaccatcagcacgccgaacatcgaccgtctggcaaacggaggcgtatgcttcacaaacggctatgccacttccgccacatcgacccccagccgctatgggctgctgacgggacagtacccgtggaagaacaagaatgcgaaaatcctgccgggcgatgctccgctgctcattcaggaatcgcagttcacgctgccgcggatgatgcaggaatgtggctacgcgacgggagccatcggcaaatggcatttgggtatgggaaacggcaacgttgactggaacaagactgtcaaaccgggtgcgcgagagataggttttgactactcctgtctgattgccgctacgaacgaccgtgtgccgacagtctatgtcgaaaacggcgatgtggtgggccttgacccgaacgaccctatcgaagtgagctataaaaagaattttgagggcgaacctacggcgctgaccaatccggaaatgctgaaaatggagtggtcgcacggacataaccagtccatcgtcaacggcattccccgtatcggctttatgcgtggcggagaaaaggcccgttgggtggacgaggacatggccgactatttcgttgacaaggtgaaggattttgtgagcgaacacaagggcgagccgttcttcctctactacggactccatcagccgcacgtgccgcgtgttcctcacagccgctttgtgggtgccacgacaatgggtccgcgtggcgacgctattgtcgaggccgactggtgtgtgggcgaactgctcaagcatttggaaaaagagggtattctcgaaaatacgattatcgtattctcgagcgacaacggtccggtgctcgacgacggctataaggacgaagctgtggagaaagtaggtaagcactctccgacgggcggacttcgcggcggcaagtacagcctgttcgacggcggcgcgcatgtgcctttcttcgtctattggaaagatacggtgaagccggtggtttccgatgcgctggtttgccagattgacctgatggcttcgctggcttccatgctcggctatcgtgttcccgacggactcgacacgcagaatcagcttgacgcgctgctcggacgcaaccttcaggggcgtaaagacctcgttctggaagccgacggacgtttagcttaccgtacagccgattgggcgttgataatgccttacaagggaaaagaacgcaatctgacgggtaacgaactcggcaatatcggcgaatacggactgtttgacctcaagaacgaccgcacgcagcaggaaaatcttgccaagcagcgtccggaagtggtagacgaactgttggagcaattcctcccgattgtggaaggctactatcctcccgcagtgaagaaataagtaggcagatacaaaaaataaggctgtccggtcaagtcacgcgaaaggcggatttgaccggacagcggcgttttggggtttatgtcagtggtagattattccttaatgatgactacccggctgttgggcaggtcggggatgtagatgtttccgtgggcgacggatatgtcggcggggccgatgagcggcgttttcaggtcaagcgcaagttccgtcacctttcgggttttcaggttcattttgctgatgcctgccggctgccagttggtgaaatagacatattctccgtcggccgagaagctgatgccgtcgtattgtcccggaatattgatgtaggcttctggttgcggattcttcaggtcggcaatgcggtaaatcacgttgtcggctttcgtcgtgccctcggcaggataggaggcaacgtacatcgcgccgtccttgatgacgattccgttcggtcccggcacgctggcccattccttcagatggctttcggctgtattgaggtctatgctgtagatgcggtcggtgttcgtcacggaaatatagagcgtgccgtcggcggctgccatatcgttgacaaacaggttgccttccggcatttggagagtctgtggctgtgtcggcgcgttgaggtcgtaaaccaccactttgtttacgtcggcaatgaagaggaaatcgtcgccgtcgagatacattcccttcggagcattcagatggccgtcggcgggaatgatggttttcgttgtttttccgtcgaaatacaggatgtagcctttgccttccgtgttgagcggattgagctgttccgtgccgaagttggcaatcagtacgccgttgcgatagggcagcgtgctttcacaatagcggatattgctgtcaacgacggtggtcggcagttgtgcctgtgccagcagcggaagtgcggcaagagccagtagggttgttcgtttcatagtcaaaatagtttttattgttattgattcgttttagcggtgatgaagacggaggcgtgcggcaacggcatgcagcgccgggctgtgggcggcggaggtggcgaacgcaagggctgtcagcccaagtagaaccgcgagaaacacattccagtcaaagcgggaaagcaccagtcccgtcagcgtgcctacgattcccgaaccggcatagtagaacagccagtagaggctcgttgcgctgcttttggcttccgaagcgttgaccgacacgatgcggctggctacggtgtgggcggcgaaaaaggcgaaagtgaatacccccagtccgccgacaatactccacaggcgaagatggaaaagcatcagcagtcctgcgcccatcagcagcagaaagccttgcagcagtttttccggtgcatgtcggtccgacaggtttccggccacgaacgagcctgccacaccggtggtgtacatcagaaacaccatggcaatgagatgatggggcagatggaaggccggagagctgagaataaaggatatatagttgtacacgctcacaaaggtgcccatgatgagcgtagctatcagaaacatgctcagaaacgtgtgttgcgagagcaagcggtacatctgtcggcttttcgtgcggaagctgaccggcacagggcggaaattcgttgagcggggtatcagccggaagaacagcacgccgagtagcagactggcgatgccgatgcccacggcggccgcctgccagccgtgccatccggcaataagtgtacccgccacgcgtcccgacatgcctccgatggtgttgccgctcaggtagagactgatggcggcaccgatgactgtcttgtcgatttcttccgtcagataggcgagtgccactgcactaacgccggcaagcgtcgcccctttcaggaagctgagcgcgagcagcagcggaaaactcacggcgaaggccgttgccagtgtcaatagcgacgagacgatgagcgccatgcccatcagccgttcgcgggcaatcgagtcggcggtaaaggcaaagaacagcaggccggcagccatgccgatggtcgacagcgacactgcaagactgcttgccgccatttccacgccgaagaattggcacagttccggcagcagcggctggaacagatagagctgtgcaaataccgacagcccggaagcaaacatacagagccgtatccgtcggttgcgtttcgctgttggggtgctattcttttgtttcatatccatcactgtttatcgttttcggaagcaaaattacagcatcgccccgaaacgccccttatccgaaaaacgcttaatttcgataaaatccatcggtaaaaacgataagaaagaacaaatcgctaatgcaaaaatatttgtaacgaaaaggatgtgaggttttgaaaggtgtgggaaaaatactatcttcgtaaaaaagaaaaaatcccacggagtacgcaggattaagctaatcttcggcttatagccttattgtgaaaagtcttcacttgtatctttgtggcaaatatagaaaatattttttgaaataccaaacaaaaacattgcctatgaaagttgccggatttgatttaggaacaaattctatagggatagctgttcgcgatacggaaaaatcggacgaattgaccgagcagttggactatttttcagttgtcacctttccttgtggtgttggaaccggaaagacgggtgagttttcctatgctgccgagcggacgcaaaagcgttcgcaacgcaaactctataaagtgaggcgttaccggaaatggagcacgcttgccttgttgattcaatatgatttctgtccgctgtcgttggaggagctcgaccgttggcgtgtatatgataaagaaagagggttgaaacgtcagtatccggtagagtcggaaacgtttgcccgttggatacggcttgatttcgatggtgacggcatgcccgactgtacgccatatcagttgcgcaaatcgctggtggaaacaaaactcgacctctcgcttccttctgaccgctacaaagtaggtcgtgccctttatcacatagcacagcgccgcggttttaagagcagcaggggggaaactgctaaagaacaggaatcagcggaacaggccgacgattccaatgaagcggtatctttgcagaaatcggaagaaaagaaatcgaagctgctgaccgattttatgaaagcgcatgattgtccgaccgtgggatatgcgttggcattgctgattgaacagggtattcgtgtccgtggcagcgagtatcaggccgtgcgctcacaatacatggaagaagtggagactatttttcgttttcagggaatgtatgaacgtttccctgaattttgtcagggcatactgagtcggaagaagggtgagggtacgatattctataagcgtccgctacgctcgcagcgcgggctggtagggaaatgtacgttggaacccaacaagccccgatgtcctattgcacatcccgactttgaggaattccgtgcattggttttcctcaacaatatcaagtatcgtcagtcggctgaagatccttggcttacgctcgacagcgatatgaaagaggaactgatggcaagtaaattctatcgttgtcagaccactttcccattcaaggaaatccgtgaatggctggaaaagaaaaccggttggagtttgtcgaaaaaaggaaagaccgtcaactattccgaccgtgacagcgtttcggccagtcctgtgaccgcacgtttgcgccatctgctgggcgatgactggaaaaactggacttttgtttccgaatttgagaaatgcgggcatgataaagtggcgcgaaaagccgtttatactgcctatgacatttggcatgtttgctacgactgtgacgatgaggattttttgtgcgattttgcggcaaataaactttcgttcgacaatcagcagactaaaaaactggtacgcctttacgaagaaatgcgtcaagggtatgccatgttgagtcttaaggccattcgcaatattcttccgttcctccgtaagggatacatctacagcacggctgtcatgcttgccaagattcctgatattgtggggcgggaaaagtggaatgagtatgaaaaggactttgtggctcaggtgcatttgcttcagcagcgagttagcgacgagcggctggtgctgaatattgtcaatacgttgattgccaactataaatccaacgactacgaagagcgttgggcggaacacaactatgattatgtgctggatgattctgacagggccgacgtgctgaaagcggctgtcggttgcattggtcagaaaacgtgggaatccaaaccgaaggcggaacgcgacgaattactgaaaaaggtggaagaacgctatcaggcgttttttgccgaccacaagcggaaatattatgaaatgcccaaaatgaaggatgtgctgaaagccgaacttgtcggtgtgttttctgatatagaggccaaggctttcgaccgtctgtaccatccttccgaccttgagatttatccgcattccgctacggggctgctgggaagcccggtgaccggagctttgaaaaatccgatggccatgcgtgtgctctacagcttgcgccgtgaagtcaacgctttgttgaagaaaggcatcattgatgccgatacccgaattgtgatagaaacggcgcgcgaactgaacgatgccaatatgcgtgcggctgtggccgactatcagaagaagcgggaaaaggagaatcagaaaatccgtgaaattttggtggaactcttgggcaagcgcgattattcggatacggaggtggacaagacccgcttcctgcttgagcagcatgacattttggatgtggctgccatgcctcaagcggaaaagaaaaccaaaaagaatacggaaaagcagaaggcggagaaattcgacagggatactacaaaataccgtttgtggctggagcagggctgtcgttgcatctacaccggcaaggtgataaacattacatctttgtttgacgacaatctgtatgaaatcgagcataccattccgcgcagtctgtcgttcgacaattcgcaggccaacctgacggtgtgcgacgctcatttcaaccgccatgtgaagaaaaaccgcattccgacacagctcgacaactacgatgagatttatatgcgtatcactccctgggttgaaaaagtggaacagcttgccgaccgtgtcaaggcgtggaccgatgccgccaagcgggcgcaggacaaggaccgcaaggactattgcatccgccagcgtcatcagtggcaaatggaactggactattggcgcgataaagtcaaccggtttaccatgacggaggtgaccgacggtttccgcaacagtcagctggtagatacgcgaatcattacgaaatatgcctatcattttctaaaaacagtctttgagcgagtcgacgtgcagaaaggggcagtcacagccgatttccggaaaatgttgggagtgcagagtctggaagaaaagaaaaaccgcgaccgtcattcccaccatgccatcgatgcaacggtgctgactctcgtcccggcggccaacgtacgcgaccgcctgctgcaactgttctatgagaaagaggaagcggagcgtttcagcggagatgcagggttgaaagagcgggcattccttagcgaactgaaacggttgaatttcaaaggcgtttcccgattgccgggatttgtggatgaaaagattctgattaatcacactgtccgcgaccgtgcgcttgttcctgccagccgcaagctgcgccgcagggggaaagaagtgctgttcgacggaaagaaccgtaggatgacgggcgactgtatccgtggtcagcttcatggcgataccttctatggagccatcaggcaatactgtttcgacgatgaccatcgggtgattcgcgatgcagacggaaaactgtgtgaaaccgacgtgatgtatgtggtgcggaaagaattccgcgcgaaaggcaattccggcgatgccggcggtttcgcttcttgggcggatgtcgaaaagtcgattgtcgacaaggctctctaccgcatgatgcgcagccagtttgccgacgatgtgtcgtttaaggatgcgtatgcacagggcatttatatgctcgaccgtgccggacgcagggttaataaaatccgccatatccgttgttgggcttcgagggtgaacaacccgttagtggtcagaaaacacacccatttgtccgatagggaatacaagcagaattattatgccgtcaatggagagaacacctatcttgccatttattgggacggagtcagcaacaacaatgatttcgactgtaaaagtctaatggatttggcaaggatgaagccgacggacagaaatccgctccatttcttccctccacaaaagaaagtcggcaaagggaaaaaggcggtgtttatgccgctatatgccgtattgaagccgggcacaagggtattggtgttcaaccccgatgaattcggcaacaaacagcggcttaccatcgacggctataagcatatcatccagcacctcgaccgttcgcaattgatgcgaaggctttaccacatggtgggcttctatgcaacagatggtagaatccagtttaagtatcatttggaggcaagaaatgacaagcagctgatggaggcattcccggaaaataagtatggcaaagttggaaaaaatgggtattcttatgttgatgtagaattggagcaaccaaaactattgttaagtcgtgcaaattattatttccttattgaaggaaaagattttgagattgacggcgattctatcgtttttaaatagaatagaaaaaataatttgaaataaaaaatcctatcggaattacgcccgataggattttttatgtatagtagaaacaatgtaattcttttattgatagatttttatatggaatctgttgttcctactatccaaagatacaagatttgtaagcaattcacaacgttctctgaggtgatttatcaggtgcaaatgttgttcctactatccaaagatacaagatttgtaagcaattcacaacgttaagtgatactgctgaaactgctccagtgttgttcctactatccaaagatacaagatttgtaagcaattcacaacaagcctgcctggcagcctgaacctgtaccagttgttcctactatccaaagatacaagatttgtaagcaattcacaacacttgagcgtttcaattgatttttccgtgagttgttcctactatccaaagatacaagatttgtaagcaattcacaacgcacccaattggcgggcttcgtcggtcaaagttgttcctactatccaaagatacaagatttgtaagcaattcacaacaatccgtcttgaaaactactgaacccatgagttgttcctactatccaaagatacaagatttgtaagcaattcacaactgtctgttttatctcgtttctattctcttcgttgttcctactatccaaagatacaagatttgtaagcaattcacaacattgaggaattttcttctgctgattcattggttgttcctactatccaaagatacaagatttgtaagcaattcacaacgcggttcgtcgtgtgaattatggtactgaagttgttcctactatccaaagatacaagatttgtaagcaattcacaacttatgacaaagctatcggcatgggcctgaagttgttcctactatccaaagatacaagatttgtaagcaattcacaacccgtcgaaaagatatcagaaacatgcaaaggttgttcctactatccaaagatacaagatttgtaagcaattcacaacatggctattgaccttgactgctcgcagattgttgttcctactatccaaagatacaagatttgtaagcaattcacaacctgttaagattcttccgccgatggattctagttgtttctactatccaaagatacaagatttgtaagcaattcacaactctgtgattgatgaaacgttgaaatacgatgttgttcctactatccaaagatacaagatttgtaagcaattcacaacgtccgctgggcataatcaagagcattaatcgttgttcctactatccaaagatacaagatttgtaaacaattttttcaaaagctgccacctttttcggatttttggcaatccgtttgaagtcttttttgaattggcttgtagggtgtagcttctttttcactttctcaattcctccattaagctttctacgctgtcaaaagtctttttgtcagttgctgtgcgagcttctttaatggctgcaatggtttcgtcgttgggaactgaatacatggcatccataagtgtgctttccacaaagttgttcaggcttctgttggtctttctcgcttcttcctgtaagacttttagcaaatcttcgcgcaagcggaatgatgtctgttttcttgttattgcttccatattgtatttgtgtattacaatgtatcacaaaagtaatacattgtatgacaaaatccaaattatagggttataaaacaaaaacaccccctgtcccggtggggaagggggtgcggtgggattgtaatcgcgggtgggattacatattcttcaaagcggcgatgctttccttgagggtagcgattttcgcttcggcatcggcctgcttcttgcgttccatttcgataactttcgcaggagcgttgttgacgaatttttcgttgttcaacttcttcagtacgctctggaggaatccttcgttgtacttgaggtcggcttcgagtttcttcaactcttcttccacattgatgttgttgccgagaggtacggcgtattccgttgtgccaacgaggaatgaagcggctgtagcgtccttttcagtcacgttgttgacggctgaaaggttggcgagcttcatgacaatcggcaataccggaacttcggctgtggctacctgttgcagttcgagagcttccttgttcgggatgttcttctgcaagcggactgtacgtacaccggcgatgatttccttcgctgtgttgactgcggcgatagtggcttcgtcgatttctccggccttaggcagctgggcggtcatgatgctttcgccgtccttgcgttcggcgatgtgctgccagagttcttccgtgatgaacggcatgaacgggtggagcagacggagcagcgtgtcgaagaatccgagcgtagcttcgtaggtagcgcggtcgataggctgaccgtaggcgggtttcaccatttcgagataccaggatgagaattcgtcccagaacagcttgtagacagccatcaaggcttccgacaaacggaacttgccgaagaggtcgtcgacttcggccaatgtcttgttgagtatggcatcgaaccacttaacggcgatttttgcatattcaggctgttcgccgtcggccacttcccagcccttcacgaggcggaaggcgttccaaatcttgttgttgaagttacggccctgttcgcagagagaatcatcgtaaaggatgtcgttgccggcaggagcggcgagcatcaagcccatgcgcacgccgtcggcaccgtatttctcgatgagctgcaacgggtcgggcgagttgccgagcgatttcgacatcttgcggccgagcttgtcgcgtacgataccggtgaaatatacgttgcggaacggcatttcgtgcatatattcatagccggcgataatcatacgtgctacccagaagaagatgatgtccggaccggttacgaggtcggcagtcgggtagtagtatttgatttcttcgttgttcgggtcgagaataccgttgaacagcgagataggccacaaccaggaagagaaccatgtgtcgaggcagtcgtcgtcctgacggaggtcggcgagcgtaaggctgctgtcgccggtcttttcctgtgcgagcttcaatgcttcttcggcagtttcagctacaacgtatccgctctgcgggaggaagtaggcaggaatgcggtgtccccaccagagctggcgtgagatacaccagtccttgatgttggtcatccagtgacggtaagtgttcttgaacttagccgggtggaacttgatacggtcgtccataacggcatcgagcgccggaatggtgattttgtccatcttgaggaaccattgcatggagagcttcggctcgataacggcatcggtgcgttcggagtggcccaccttgttggtgtaggcttccgtcttttcgagcaatccggcagcttcgaggtccttttcgatttgcttgcgcacttcgaaacggtccatacccacatacatgccggcagcttcgctcagcgtaccgttgtcgttgaagatgtcgatgctcggaagattgtatttttcgccgagcatatagtcgttcacgtcgtgagccggagtgactttcagacagccagtaccgaattcgatgtcaacgtattcgtcctcgataaccggaatttcgcggccaacgagcggaacgataacctttttgcccttgaggtgagcgtttttcgggtcgttcgggttgatacacatggccgtgtcgcccatgatggtttccggacgtgtagtggcaacgatggcgtaagtgtcctcgcccaccactttatagcggagatagtagagcttgccgtgttcttccttgtagaccacttcctcgtcgctgagggcagtgagggcagccgggtcccagttcaccatgcgaacaccgcggtagatgaggcccttgttgaacaaatcgacaaacacacggataacgctcttagagcggatttcgtccattgtgaacgatgtgcggctccagtcgcaagaagcacccagctttttcagctgttcgaggatgatgccaccgtgttcttccttccattcccatgcgtgtttgaggaactcctcgcgggtaaggtcggttttcttgatacccttttgtgccagacgtgccaccactttcgcttcagtagcgatagaagcgtggtcggtacccggtacccacagcgcatttttgccttccatgcgggcacggcggataagaatgtcctgaatcgtattgttgagcatatgtcccatatgcagaacgccggtcacgtttggcggcggaatgacaatagtgtaaggttcacgtttgtcgggtactgacttgaatagttcgtgacgaagccagtattcgtaccattttccttcaacctcttccgggttgtacttggtagctaactcgttcataagtaatatgttttttacgctaattatttcaaaaatcaattttcgccacttcggcaaaaaatcattttgcaaagatagtgcaagccgagagaagaaaaaagagcttgctcgattttttctgccgaggcgccgcctatcttatggaaagatagtgcaagccgagagaagaaaaaaagcttgcttgatttttctgccgaggcgtagcctatcttatggaaagatagtgcaaacattttaaagatgtattgcctggtctataaaaagcagttgtaagcagagagaatggagcatttatttcctgttttgcctcacagtgtttcctgtatttttgcttttttcaatggaaaaagttatctttgtaaagatacggtgttccgttcttcaacttaaaaacagggtgtggggcaggatatccgaaaatagatgaattaaaaaggataagacaatgaaaacgttaaaacttattgtgtttggtattgttgcgatgatggcaggcacgggtagtgtgtatgccgattcactgaaagacttgtttggaaacaaaggtttgggcgacttggttaatgccgtgaccggaaacggagatattcagcttaattcgctggaaggaacgtggaaagccacaggaccggcagtagtgcttcgctcgggcgatgctttggagcaggcgggaggttcggcagtggcaagcctggccgaaaacaagctgatgccgtattatgaaaaattaggtctggaaggttcgacagttacattcgacgcgtcgggcaactatacgatgaccgtaaaaggcaaaaccattaaaggccgcctgataaagaatgacgacggtacgttcacgctgtcgctgacgcagaacgagaaactcaagctcggcaagttgaattcgtttaccacctatgtgcagaaaacgagcaacacattggcactgacagtcgacgtgaagaaactgctcgaagtgctgaaactcgttgcaaataccgccgacctcgaaaccatcaacaccgctattaagctgcttgaaagctacgacaacgtgtgcctcggcctccggttttcgaaataaccgataactgtggtgtagaaataatgaaagcctgattccaaatggagccaggctttcatcgttattaagcattctttatttcctatttatatgagcgacatgcctttttggatggcttgttcgttcattggaatcaggtggtggtggcgttcgggcagggattttttcaagcctgcgatgacgctgtccattgtgacaacggggcggattttcaacattgctccgagcacaaccatgttgtaggcctttgagttgttgagctcaatggaggcttccatggcgttgatgctgtagatttcaatgtcggttctttccggattgcggtgaatgccgtaattgtcgtagagcagtacgccgcccggtttcaccttgctttcgaacttgtcaaggctctgctggttgagagctactacgatgtcgtatttgttgaggatcggtgagctgatctgctcgtcgctgatgatgaccgtcacgttggctgtacctccgcgctgttccggaccgtaggccggcatccaggtcacttccttgtcctccatcaatccggcataggcaagaatcttacccattgacagtacaccctgtccgccgaaacctgctattactatttctgttttcataaattactcattctttaagtcgcccattgggtatttttcaaacatgtgttctgccatccatttgttggattcagcaggagtgagtttccagcctgagttgcaagtgctgacgatttccacaacggatgtgcctttcttgtcaagggtgttctggaaagccttcttgatggctgccttagtcttgcggacagcagcggctgtgtgtacgctttggcgtgtcacgtagcaagtgccgtcgagttcggcaagcaggttggaaattttcagcggatatccgttcaggtcggcacggcgtccgtaaggagtggtggcagttttcattccgagcagtgtggtcggagccatttgtccgccggtcataccgtagatagcgttgttgatgaaaatgatggtgatgttttcaccgcggttggctgcatggatggtttcgcaagtaccgatagctgccaagtcgccgtcgccctgataggtgaataccaggttgcctggattgagtcggctgagggcagttgcaatggcaggtgcacgtccgtgcgcagcttctacccagtcaacgtcgatatagttgtaggcaaacacggcacaacccacaggcgcaacgcctacagctctgtcctgcaagcccatttcttcaataagttctgccacgattttatgaaccactccgtggctacagcccggacagtagtgcatgtgagtgtcgttgagcaacgccggtttcttatacacccggttctcaggtttgataatatcgttgatatccatagtggagtttgttttttacttgatgaaacaataaggcttggaagcgctatttgttgatgaatttttgcttgaaggcttccagaatttcgtcgggcgacggaacgataccgccaagacgtccgaagtgttcaacagggatgtcgttaccgacagccagtttaacgtcttcaatcatctgtccggcgttcatttctaccaccagcacgccttttgatttctgtccgaggcgtttaacttcgtctttcgggaacggccagagagtgataggacgaaggatgccgattttgatgccttccttgcgggccatttccacagccttctggctgatacgtgctacggaaccgaatgctacaatcaggtagtcgcagtcgtcggtgtagatttcctcaaagcgcacttcgttttcttcaatcagacggtaggtgcgttggaagcgttcgttgttgacttccattttgtcggaatccagttcgagcgaagttactacgttgcgagtgttgcgtccgtgacgtcctgtcgttgcccaagggcagcgttcgcgcacttcctcgtcggtaaggcgtttgcgttgtggtggcaatacaactttttccatcatctgtccaacaacgccgtcggcaagaatgatggccggtgtgcggtatttgaaagccaaatcccaaccaagtcctacgaagtcgcacatttcctgaacggatgacggagccagcgtgataaggtgatagtcgccgtgaccgccgcctttagttgcctgaaaatagtcggcctgtgacggttggatggtacccaaacccggtccgccgcgcatgacattgataatcaatgcaggcagttcgcttgctgccaaataggaaacgccttcctgcataaggctgacacccggacttgacgatgacgtgaacactacttttccggcagccgcaccgccatacaccatattgatagccgccacttcactttctgcctgaaggacaaccattccggttgtttcccacggctgttctgccattagggtttcgagaacttccgattgtggagtgatcgggtagccgaaatatccgtcagcaccgtaacgaatggcagcgtgtgccaaagcttcgttacctttcatcagtcgtatttcttctttcatactgctcaatgtctttaaatgttaaacgttaatctacgcgcactttataaacttcaatgcacgcgtcgggacaaacgagggcgcaacttgcacagccaatgcaggcttccgcattcttcataaaagcgtagtggtaacctcgattgtttacttcgttgggttgtagagccagcgtgtcggtagggcaggcaaccacgcacaggttgcagcctttacatctttcctcgttcactacaacggcaccttgtatttttgccatagctgatatctgtttgttaattaatttgtcaatacaaaaataacgtaaaaaattgagcctgctaaacgtattttagctttttacaactatttaaattttggcacattagcacaaaatctgtgtaatgaaaactgctcagcaagctaaaatctgtgcattaattctgtcggattctgcgcagaatattctccactgtgcaactcctcgaaggcgtaattcagaaaatcgaggaacggctggatgacttgcatgtcggcaatcagcatgcccatccagtttttctgcctgaaaaagctgtcgggataggttttttgcaccatgaattccttttttcgcaggatatagccgtagggagagtccttgggaaatcctttgggcatagtcttcagttcgtcgccaatcaaagtcgggaaggcagccttgaattccggttggtttaaaatctcttcaaattcttcaatgttctcgagtatattgcgtcggagaaatttcaatataggtggctccgggaaccatactcctccataaagggcacattcgcccggagcaatgtggatgtagcgtgctgcctgtttgcatttttttccgtttttggcgatgacaacaccgaaatgggttttgtacggcgatttgtcggcggaaaaccggatgtcgcgatagattctgtatgtacaatcctttgcggtaactccgataaggcttttgtcggtagcggaaagccggttaagtaaggtttcaatttcagcgtaacattcgtttctggtcgtttcgtatgtcaatttgttttccgcaaaccagtctctgttgttgtttgctttcaaatcagagatgaaatttagcattttgcttaatccactcattgtattcttcatttattgcatagcgaatgtagcaaaatactataaaatgtgcaaatttcaggatgtgtttttgagcagatattttcggggcgtgatagttgggtttgcgtgggtaaatgagtacatttgcaaataaaatcggttgcgtatggaaacggaggagaaatggacacattataaaaatacggcatacactcaagacacgttggacggggagtatgccgactgtgtgtttgaaagttgcaatttctatcaattgcatttcggaaaggtggcattgagcaactgtgtattccgaaactgcaatttgtcgttggcggtatttgccggaaaagcatgccatgacgtgaagtttgagggctgtaaaatgaccggttgcgatttcaccaacaccaattcattttcccattaccgttttgaggaatgcctgttggactattccattttccgaaatgtaagaatgcagaaaactccgtttgtgaaatgcaatctgactgaagccgattttgcagaggcgcaactgaaaggcagcagtttcgcgtattgtgaccttgaaagagcctttttctcgaatacagatttgacagaggtggatttttcgacggcaatgaacgtgacaatcaatcctcagttcaacaaaatgaggaaagccaaattttcacgtactaaccttgaaggcttggtggcgcatttgggacttcagctgttgccataaaaccagaatcaaataaaaaaacatatatggatatgaatttggatacgacaactttggtgtttttttctcctactcatacaacggagaaagtggtgaaggcgatagggtcgggcattggttttccccgacgcgaatatgtagatcttactcttgaagtggaagggccggaacgcatattgaccga

SEQ ID NO: 377 - DNA, 23390 bp, synthetic construct
  source 1..23390: mol_type = other DNA
  misc_feature 1..23390: note = Synthetic
taggaatgtagccaccagggaaaatatacttggttaaccagggatcgacaccggcgccgttatgctggccagtgataccgtgaatcagtgctcgggcaccaggtttgagaagttcattgacctttttaaagtaaccgggaagattgtccttacccacgtgttcaaacatgccaacactggtgatgtagtcgaattggcctttggtttcccggtaatcttctaaacgaacatcgactaaatcttccagcccgcgtttttgaatttggtacttcgtgtagtcatactgttcttgactaagagtgaccccagttgcgtggaggccgtaatcttcggcagcaatgaacaaaagcgtaccccagccagagccaatatccaggagtgatttaccccgttctggttttaattttttcaaaatgtggtgaatcttattcaactgtgcctgttccaaagtatcatcatcgtgttcgaagtaggcacacgagtaggtgaggcttgggtccaaccataatttgtagaaatcattgccaatatcatagtggctttgaatatcttttgtgttttctttttctgagtggccctgtttcgggatgaatttcataaaactcttatcgtgcataaagctgctagtttggcggtatgcggaggcaacaacctgctggattgaacctttaatatcgatatcgccatccatataagcttcgcctaaggttaaggtggcgtgtttcgcaacttccttcattgacagttccttgttgatgtcaatttcagcttgaggcgtgcccgcaccataagtttcggtgctgtcgtcccaatacttaaccttaaccgggaaatcaaacgcatgactcaatagcgttttataaacctttttttctaacacaaacgttcactccatttcaaaaatattaacaagtctattttagacttttcatgtcattaatgttaatgctttttgaaaattttctgttgttggaccataattttagatattttttggtaaggctgataaaatcagtgttggtaaaagaagaacgtagtcgctaagccaacacgatctaggcacaccgtaatttgtaattgtcaattattgttactaacgtctatcaaatggaacaacgctaaattacgcctaaataattgagcgttcgttactgaaaagtgcgttattgtagttgattgtcatttagttaataatacagtcgtagaagcaaatatagtctaggaggtctgtaaaaatgagtcaaatttatctagccgccaaattaccggcgatcacaacggaaattctaaagaaacagcaattggattttagcgtttattccgggacaggtttaatttcaaagcaagaattgttggcaaacgtgaaggacgcagaatatctggtcacggcgctttcaacaaaagtcgatcaggaagtcattgatcacgcgccgaatttgaaactgatcaccaattttggtgccggctttaataacatcgacatcaactacgccaaggaaaagggcattgttgtgacgaacacgccacttgtttccacaaattcggtggccgaagttacgattggtctcattttggccttaagccatcggattgttgaaggtgatgtccagatgcgcaaggaaggctttcccggttgggcgccgctttatttcttaggccaggaaatcgctgggaaaacgttgggtatcgttggtctaggcaatattggccaagaagttgcccggaaggcggccgctttatcaatgaaggtccagtactggcagccccaccagaaatccgaccctgaggaacgaagcctgggggtaaactatgtttctttcgctgaattgacccgaaccagtgattttatcagtcttcacgccccgcaaactagcgctaattatcaccaatttgatcaggctgtttttaaccaaatgaagtccacagccgcaatcattaacgttgcccgagggccaattgtcgatgaagttgcgctgcgggatgcactgcaaaacaagcaaattgccggcgccgctttagatgtctacgagcatgaaccagcagttacggctggcctggcggacatgaaaaacgttatcttaacgccgcatatcggtaacgccacgattgaggctagggcggcaatgggcaaaattgttgccactaatatcgctttagtgcaggctgggcaaacggctaaatatgtggtgaatcaataagattgaaaatagcccaaaattgaaattaatgagccgccaatttgcaaaaaaatttaattgattgcgcggtttaaattctctaaaatttagcacattgatgtttccgatcaactgtgccatttttatgccataattggcctaagattagcaattacttaaacaaaaaaattaaaattttgaggtagaaatgtgatgcaaattaaaatcgtaaataaacttaatgcggcgcagttgcagcaggtcatgtctatttggttgttgggcaatacgcaagcacatgatttcatccaatcagactattggcgcaaaaattacgccgccgtggccgaacagattcagggcgccacactgattctcgctgagcaagatgatcaaatctgcggtttcttaggactagtggatgattatattgccggcctgtttgttcgaaaagacgttcaaaatcaaggcctaggaacaaaattagttgcccgggcaaaagcaataaaatcaccgttaacgttatcggtttatcaaaaaaatgaccacgccgttaaattttatcaggcgcacggctttgtcattgtgaagcagggcgtggattcggataccaacgaagttgaattcaccatgcaggctgcggaataacaatcctgctgaaggcttttagggcgcagctaatcaactagcaaaaggggaatattatggaaaaaatcaattggcgtcaatctgaaaaagaaatttatcctttaaaaaaggcaacgtcgatcacaactttaccgttacaaaatttcatcacgattagcggtcagggtaatcctaacggcccagagtttgccagaaagattagtgccctttatccaattacttacgcaattcgaatggcgcccaaaaaaggaatcgaatttcccggcgcgtttgaggataccgtttacccgttggcgtggaaaaatttaaatcaggacaattgactcaattttgtattttagacagctttaaaatgaaataccaacgtaactgtaggaggccgataatatatcaacattaacgccaaaaagtaaaatagtttccgtaagcttaacgaatgctatcgttgaacgagccaaaaagaatctggccaaacaaggcctaaccgtatctgagtacatccggctatcattagttaaggcggccgacaatgaagttcagttaattaattttcttgatacaccagaagcattaagcgcaaagaagaaaattgaaaataataacacggagtcttttgattctgtcgctgcctggtgggataaattgaacgagaataattaaagttcatttactgagtggcaaattgaggctaccgtgaatttcatcccggacgttttaataactatggcaaaaagtacgatagttgaatcgttatttatatgattaatcataacgaattagttttaactttagtaactacaggtgatcataaaatattaggtcggtaaatcgagtcactcggttggaatcataacaaactgagtgttaaggacagtaaaagaatcgtcatcaatttaaaattaattgatagcgctcctttttacgttacgtttgtttatgattacatttggtgaaaagtttctgcctaagattttagtctaaataaagtagaaattcggtcaggacgactttatacgcgtttggttgtatatgaatctgatcaccgacgtattcttgtttaaccttactagttcctaattgaatgacccacgtatattttgttaatattgttaatacgtgttattattacgctagacaaggagtgatcaatcatgattaaggaagaatatttaggtatttttaaaacccgtaaacagggcaactcaatcgcggtcaccatcccaaaagaggcgggaatcaaaccaggtgttgaacttgccgtaacgcgcattaacgaccaactagtttatgttccagttaagcccaagcaaccaattaatctatttgcttcggacgctgtcaaaaagcacgattttgcccaagaagtaaatgaccttggttataatcctgacaaaatagcaccaattggccacgaaagggttgatgactaatggtcactatccctaaacaaggtgactttgtttggctggatgctgagccccatgctggtcatgagattggtggtcataatcagagtaagcgtaatattgcacgcccgtttctagtcgtcagcacgacagagttcaatcaaaatacgcctttcgttcaagttatgcccgtgacacacacgctacgagatgatgacccattaatgatgcaagtggtcgacccaaaactgcggctaagcggcatggtgttgtttgcacaattaaagggctatgattatcgcgctaggcatggcacaatcattggtcagtgccgccctaacgttctaaaaactgcgctgaatgttatcagtaacatttacggactttagaccaatctagtgtggccacgagtttccgcattcaattcagattaatgatgttctacttttggtttcatgatcgtcgtttatctgccaggccagaagcttttttcattatttaaatagcagcttaattacggtttgctttcttggcctggtagtttgtattttatttacgcaaagatagcaaaaggatcgccatcaatttgaaattaattgataacgatcctttttacgttacgtttatttgtaattatattagggcggccttttgcccagaacttcagtctaaataaggcattaatttggtcaggacgactttatacgcgtttggttgggatctatcaccgacgtattcttgttgacgatgtcttacttgaaaaggctaacgtcatggaacaaagggactcccttgaagaaattatagtgagtgggtgaccagttattcggtttatttcactatcaaatttgattagtggccgattgttgtttaacaaacaccaactttgtttcatctgataattctggtgtgtagtgataattcagtcggtcaaagtgccgcaaatcggccagtttttttatattattttccgccataaaactaaccatctcgccccgggccattttggccaacgtggcccgcgttttgattttgccgtctacccaatggccaaaaacgatatcaatgagctgcacgttgggttggaggtggcgctgaattattttggcgtattcttgggacgctaggttaatgattggttcggcctgtgcgtgtagcgcctgatagggtttggcaccccaaaagtcgtacagatttgtactttgcccgctttttaaatgagcctgcatttcgagacggtaggggacaacaccgtcaaatggacgcaggatcccgtaaaagccggataagatccgtaagttggcctgcacgtaggttagtgcggccgcggtaaaaacatctggcgccatatattgatattggatgccagaaaaggccagtaacgccggcgttaattgctcttttagcgccatttgttgtaaccaatcgtaattagtttgggcaagcttatcactacactgccacaatgtttttaagtctgaataggataactgccgcattgtcagcaaaagctgttgggcctcgcttaaatactggggcagggcagcaatgggaaatgaatcggtatcaattttcatttttttagctggtgcaatgatgattttcatagcgcgacctcacttgttctatctgcttgtattttagcagaaattactggggtaaacgtggtcgcgtgaatattttgctgggaagtgtttgaaacagcgcaggagcctgcttttttagacacatttttgtcaacgcacaacattaatcaacctggcaccacacaaaacctccaagccggccttatttcggactatccaacggcataaatttcatttgttgcgtatcaaaaattaacgggatttccgctagttcgccggaacgatttttgcggaatagtaaattaatattgcgaattttgctgcgttcttgaacctggtcctctaaataaagaaaagagacaatgttggaatcttgttcaatactgccggattcgcgtaaatcagccagttgtggcttgcggtcaacccgtttttctagttcacgatttaactgggaaaataaaatgatcggaatgttcagttcatttgttagtaatttgagttcccgggtgatggcctcaatttctaaacgccgatcagtaacgcgggccttggttcgtgccaaactaacgatttgtaggtaatcaacgatggcaaaatagttaacccctttttcggaggcttttttggcgttttcccgaatcactttgataatctgcggtagaaccagaatcttgtcgtgtaaattgacgtgttgcgcggtaattttaggtagaatttgttggacctcttttttttggattggtgtcaacaacgccttaggattgcgcaattgattaacgggaatgcccgtatgaaaggcgattgttcgattgaaattatcttcgcccgtcatttctaatgaaaaatgatcgacgcagatttctggatcaattgctagggcactttgaataaaacttaagccaaaggccgatttaccaactcccggccgtgccccaatggtccaaagtacaccaccacataagccattaccaagcactttattcagttgttggaacgttttaataccggccgaacgggaatggtccaagtaataacgtaaatcatctgcgtattcactcaatttcttggttggtaattccggtagatttaggacccgaaccaattccgtcatttcacccagcgctatcatattttcgctggttggatatttcgcgtaacggccggccagtgcttctaattcgccctgataataccggctctctgtcaaatcctgttgatagccaattttacagcgttagaagttaggcaacttctaatgctgtttttttatttggtttggtgcgcatttgttgtagtttgatccgtgaaactaaatggtgatagttacgaaaaccaaaagccgttcgctggatctgtttgatcatacgattgatgccctcgatgggaccgttcgaatactttgattcactggcattgaggatgcaaattttatatgattgtctatagggttcacggttttctcatatcctttcaaatgatactgtagtgggtggattttttggatgagggctgtgagctctttttctgtccttaaattgtaaattcaaaggcacaaaaaatcctgttaatagtttaccatttgtaaactatcaacaggaaaaagtatagagccataataccaagcctttaatccttgcaggactgacttgaacgtcttggtggttacaccagtgtcgtgtaacttaagccactcatcctccgcaaaatccagtgggtaatccaagaagaaacggcgtttgacgtccacccaatccttgaaatcaccatcattttctaaaataactttgacaagatgttgaaatttaatgacgtgaaaccaacgcgcttcaatttcggtacttttgcaaatatctgggtgatcaactaggtaggcaactgcgttttgttcaaattccatcgatttccacctctaattcttccttagtgattagcatgccctcaattttggcgcgccgaaaagtttcgtctaagtcacgatcgcaatctaggtacagaccttgaagtctttcggctcgcggcattggttccacgtggtgcaccactgttacgggccgctccggtacaatatcgttgacgtaattgataaatttagggccaaacagcgtctgcggtcggacaaatttgcgcatttcaatttgattaccccattcggccgacttggccaaactgacttgcttgaattgttctggtaggtaacctcgttgcagccaggcaacaacgcactcctcgtggcgttcggcttcaggaaaatgcttgccactaatttgggccaattcagtaatgatttgttgggcctgcttttgttcagcagacgtggctgggtgcttgagattgagtgctttttgatttttggttgctgacgttacttgtgctggtttaaccgtttcagttttgattggttctgtttcatgaactggttgtatttcgggacaaaattggttccaattggcaatgtacaaggctcgcttttcattttcgtaaagcaggccgactttgatgagtaatccgcagagctggtcaacgctgcggttgttggtgatgccgctaatttgtttgatctctttaacggtgtacgccagacttgcagcggcggaaattcgcccgtgatcattattattggctgcttcggctagtaaaaaatgccaaagccgaaaacttgcgtgataagtattgacttgattttgtgcaagtaaacggaactcaggttgctgataaagattgattggtacagtaaaataactggacatgggttaacacttctttcttaattagggttacatagatataaaaccctcaggcctccaaaaagtgtcactaaaataacatttatttttctgatcggcctaaaagaccgttataacgggaatagttagcaaactttttttatttaaacttgccttattttggtaccggtaagcgtagtgctatcaataattagtaccgctattaataccgctagcgtttttcagtaccgctaccagtagcgatatgggtcgcggtaccaactttagaaagaaaatagtgcaatactgagtgccgcaactgacaaaacttgcgtgtcaattttgattattggtcggttattggcatgagtggtgctacaaaattacttggacagtgaaatttattgttccatggttaaggctctggcagcactgcgttttatatcctataatgaagctataacttctctaagaaagtaggtcctagcatgttaaaagaagcaacgattgcccagcaattagatcaccgaacgattcgggcgtttaaacagcaaccagtcacagccgagctgatcagcgaactagttgcggtagcacaacatacagcaacgtcaaattttcagcaggcatttagcgtaatcagtgtgactgatccggacaaaaagaagcaaattgcggcggtttctaaccagaaatatgtggctgataatggccatttgtttatttttgtcgctgatcaacaccgtaatcagcagattggcgcggaaatggggaagacagccaatcatttaggtgatacggatcactttttagcagcctggtcagatgccagtttggccgtgcaaaatacagttgttgcagctgagagtcttggcttaggtgcggttattttaggcagtattttaaatgatgcccaaaaaattattgatattttgcagttgcctcaactaacctttccagtgttaggtttagctattggctggcccgatcaaaagccacaattgaaaccacgcttgccggaacgctttgttcattttgaaaatacttatcagttgccgacaccggtaaaaccagacttagttgactatgatgccaaggtccatgagtactacgatttgcgtgatgccaatcggcgggtggacaccttcactaatcaggttcagaaacgactaatgttgcggccagctaagcgtgccgaactattaccagtgctacggcggcagggtttcttgttggaatagctaactggggttggggaagttggtgactgattggttaaagtgattggttgccaaatttacattatgtatgctaaattgcttagagtgtgcatttgtggtgtcatggcattttaataaaataattggaagataggcctaataggtagaacagaggcaccataaaatttggtaagacttcttctggaaacgctattattatgctaaactaaaagaaaaatgatgataggggttatcaatatgggttatcgaataggtttggatgtgggaattgcttcaacaggttattcagttttaaaaacggataaagaaggcaatccatataaaatattaacgttaaattcagtaatctatccgcgggctgaagaccctcaaacaggagcatcgttggcagagccacggcgattgaagcggggcttacgacggcggacacgccgaaccaaatttcgcaaacagcggacacagcaattatttatacatagcggattattatcgaaggcggagattgaacaaattttaacaaaaccacaaactgattattcagtttatgagctccgagtggcaggtttggatcgacgcctaaccaattctgaattatttagagtactttatttttttgttggccatcgtggttttaaatctaaccgtaaatctgaactcaacccagacaatgatgcagataaaaagcaaatgggtcaattacttaactcaattgaagaaatcaaaaaagatatctcagaaaagggctatcgtacggttggcgagttgtatatgaaggatcctaaatatacggcccacaaacgcaataaaggttacaatgatggctacctaagtacgccaaatcgacaaatgttggttgatgaaattaaacaaattttggataagcaacgtgaattaggcaatgaaaaattaactgatgaattttatgctagctatttacttggtaatgaggatcatgctggtatttttctggctcagcgtgattttgatgaaggaccaggtgctggtccttatgccggtgatcaaatcaagaaaatggttggtaaagatatttttgagcccaacgaagatcgtgcggccaaggcgacttatacatttcaatactttaacttgctacaaaaaatgactagtttgaattatcagaatacaactggtgatacttggcatagcctaaatggcctcgaacggcaggcaattattgatgcagtttttgcaaaggccgaaaagccaacgaaaacctatcggccaactgattttggtgagttacgtaagctattaaaattaacagatgacgcacgttttaatttagttaattatggtagctttcggacccaaaaagaaattgaaacggttgaaaagaaaacgcgctttgttgattttaaggcctaccatgatttagtgaacgtattgccagaagaaatgtggtctagtcgccaattgttagatcatattggaacagccttaactttatattccagtgataaacgacggcggcgctattttgccgaagaattgaatttgccaaaagatttgattgaaaaacttttaccgcttaattttgccaaatttggccatttgtcaattaaatcaatgcaaaatatcattccgtatcttgaaatgggtcaggtttatagtgaagcgacaactaatgctggttatgatttccgtaaaaagaagatttccaaagatacaattcaagaggaaatcacaaacccagttgttcgccgtgcggtaacgaaaacaatcaaagtggttgagcagattatgcggcgttatggcaatcacccagatggaattaatattgaattggctcgtgagttaggccgtaattttgatgatcggcgaaaaatacaaaaaaatcaagaccagaatcgccaaaataacgataaaattgtggctgaattaactgaattagggattccagttaatggtcagaatattattcgctataaattacacaaggaacaaaatgggattgatccgtatactggtgatcagattccctttggtagtgcgtttagtgttaattatgaggttgaccatattattccgtacagtattagttgggatgatagttacaccaataaagtgttaaccagtgcaaaatgtaatcgtgaaaaaggcaatcggattccgatgacttacttggctaatgatgaaaaacgcaccgatgccttaactaatatggctgataatgtgattcgcaattcacgcaaacggcaaaaacttttgaagcaaaagctaagtgatgaagagaaaaaggattggaagcaacgaaatattaacgacacacgttttattacacgggtactttataattatttcagacaggcaatcgactttaatccagaattggagaaaaaacaacatgtattgccgttaaatggtgaagttacttcgaaaattcgtagtcgctggggctttcttaaagtgcgcgaagatggtgatttacatcatgccgttgatgcaaccgttatagctgcgattacaccggcctttattcagcaagtcactaaatatagtcaacaccaagaagtaaagaataatcgcgctttatggcacgatgctgagattaaggacgcagaatatgcggctgaagcacaacggatggatgccgatttgtttaataagattttcaatggttttccactaccatggccagaatttcgtgatgaattactggaccgtatctccgataatcctgcagaaatgatgaagaacagaagctggaatacgtatacgccagttgaaattgctaaattaaaaccagtctttgttgttcgtttggccaaccataaaatttcgggaccagcgcatttggacacaattcgtagtgcaaaattatttgatgaaaaaggtattgtgctcagtcgaattagtattgccaaactgaaactaaacaaaaaaggccaagtcgctactggtgatggcgtttatgaccctgaaaacagcaacaatggtgataaagttgtttattcggccatcagaaaggcattggaggcccatggcggctctggagaagtagcctttccagagggttatttagaatatctggatcacgggaccaaaaaattagtgcgtaaagtacgtgttgctaaaaaggcctcactaccagtactgttgaagaacaaggcggctgccgataatgggtcgatggtgcggattgatgtatttaatacgggtaagaagtttgtgtttgtgccgatttatattaaggatacggttgaacgagttctgccgagtaaggcagtactgcaaggaaaatctgcaaaaaattggtatcaaattactgatgccgataaattctgcttttctttataccctggagatatggtacatataaaatctaggacagggattaaaccgaagtatgccaatacgacagttgagcacagtattaaacttgtaaaggatttttatggatattttaatggcgccaatattgctaatggtaatattagtatacgtgcacatgatagctcttataaatcagaaagtgtcggtatctctggactcttagaattcgaaaaatatcaggtcgactacttcggtcgttaccataaggtccacgaaaagaaacggcagttattcgttaagcgagatgagtaattatggcctttcgtaacctgtatattcaaaatccagcaaaattaagcatttccaaaagtcagttagtgattcagcagaaagaacgttatacagtcccagtagaagacatttcaagcatcatgattgaacacaaacaatgtacaattacagcaccggcgctatcctttcttgctgagcatcaagtggcggtgttcacttgtgatgagaaacatttgccatgtgcgatggttttgccactgggccagtattatcgtaaattagaagcgttagaagctcagttacatgtaagaactaaaactaaggcgcgtttatggcagaaattgatgaaacaaaaaattgaaaaccaggccaaagttttagaattaaatcagtgtaataatgtcgccgaactttactttttagcaacccaggttgttgaaggtgataaaacgtttaaagaatcgcgggcagcgcggctttactttgtaggtttgtttggtgatcactttaaccggcgcaatgaaaatacgctgaacggtgccttaaattatggctacgcgattatccgtggtattatcgcgcgggatatttgtgtgtacggttttgagccagcattgggagtattccataaaaatgaattaaatccttttaatttggccgatgatttaattgaaccatttcgagcgtacgtagatttatgggtttatgaacatcaaactgacttaaaggatggtttgacacctgccaataaacaggcattatttcaattattatttacagaagttcgaattgatgatgaatttcattcgttgagtaacgcggttcataaattagtttcatcgtacactacttgttgtcgtaataactctgccgcgggattaaagttgccggaacttatcccgttggtggcacacgagtatgagtagcaaatatatgcgcctattagttatgtttgatttaccagtagtaaaggcaaaagatcgtcgtgcagcggcaaaattccggcagtatttattgggcgaaggctacgttatgatgcaatactcggtttattatcgcattgtaaatggttatgatatgtcaaaaaaatacgagctgcggttagatgataatttgcccgaaaaagggtcagtaagattgttggttataaccgaaaaacaattcgatgaaatgcgtctgctagtaggtgatccactgcctaacgaagaaaaagttgaaagtgggcagatgaccactttttagacaagcaaaagagcctgatatccgcgtgatattaggctcttttggtacactggatctattttagctgaaaactgaaggaatcaatagctttcttactatttttatctctattccatcagatctattttagctgaaaactgaaggaatcaatagcgcagtgctgcggcgcctcaaaccatttgatgatctattttagctgaaaactgaaggaatcaatagcgaatgtctgggttcatcgttttttaaaaagatctattttagctgaaaactgaaggaatcaatagctattttacctcctgtgttgtgtctgtgtgtgatctattttagctgaaaactgaaggaatcaatagcattgaacaattagatgaaattttactggcggatctattttagctgaaaactgaaggaatcaatagctctggatcaacgttccgaaacaacaatccagatctattttagctgaaaactgaaggaatcaatagctgctgaattaaagattctttgatctggtcagatctattttagctgaaaactgaaggaatcaatagcaaagatttagcggccaaaacgtttaatattgatctattttagctgaaaactgaaggaatcaatagcataaccgttgcgttatacaccgtaccattggatctattttagctgaaaactgaaggaatcaatagcatgtttttgacagtgatcgcatgggtaacagatctattttagctgaaaactgaaggaatcaatagctgcattacctccattttttgttgttcctgtgatctattttagctgaaaactgaaggaatcaatagcagactgctccaatgacaatgaccattgtccgatctattttagctgaaaactgaaggaatcaatagcacagccatgcagagcctgatccttaaatatgatctattttagctgaaaactgaaggaatcaatagcttaattacgcggttaagcaaaagatcttaggatctattttagctgaaaactgaaggaatcaatagcccagacgaaacgtatttaaccccgttgccggatctattttagctgaaaactgaaggaatcaatagcacaacctagtcgtgacaaagtagtagaagcgatctattttagctgaaaactgaaggaatcaatagcctgaaaatacctcactagacctaatttttagatctattttagctgaaaactgaaggaatcaatagctttcagtatcgccttgtttgatttgctgaggatctattttagctgaaaactgaaggaatcaatagcttaacctgataataatagtcagcaaatcttgatctattttagctgaaaactgaaggaatcaatagcagcgacgctaaacaggctgtggctgataagatctattttagctgaaaactgaaggaatcaatagcataaggttagcgagaccttagcatggataagatctattttagctgaaaactgaaggaatcaatagctagtggataagaccaagaccgaagaattaggatctattttagctgaaaactgaaggaatcaatagccgcaattcaaaggctctttgtcggcgctgtgatctattttagctgaaaactgaaggaatcaatagcaagtctttcagttttgatgccggtgtctgggatctattttagctgaaaactgaaggaatcaatagcctaggataggtataaaagctgaactaaaaagatctattttagctgaaaactgaaggaatcaatagcaggaattagcattggaaatactgcgggcatgatctattttagctgaaaactgaaggaatcaatagccttacacgaccgcttgaacgcttgtgttaggatctattttagctgaaaactgaaggaatcaatagctcatctccttctacccgattgacccccattgatctattttagctgaaaactgaaggaatcaatagccaatagcagaaaagtatgagcgatgtgggagatctattttagctgaaaactgaaggaatcaatagcacgcctagaacagtacccattgcagtaccagatctattttagctgaaaactgaaggaatcaatagcgtctgacgtgccgcggtttggcttttctgggatctattttagctgaaaactgaaggaatcaatagccagagaaattgatatagctcttagcttcttgatctattttagctgaaaactgaaggaatcaatagcaccagacttcttcaccagcaatttttgcgagatctattttagctgaaaactgaaggaatcaatagctacgaagcaccgcataaagcggatgtgctcgatctattttagctgaaaactgaaggaatcaatagccaccggtttggcttcactctttaaagacaagatctattttagctgaaaactgaaggaatcaatagcgatcggacgcactttgtctattatggatttgatctattttagctgaaaactgaaggaatcaatagcagccaagaataataaaacggaggcgatattgatctattttagctgaaaactgaaggaatcaatagcctgatatttagattttagtaactacactttgatctattttagctgaaaactgaaggaatcaatagcgagagcggccaccgtttgcgtgacattatcgatctattttagctgaaaactgaaggaatcaatagctgtattttgcggtgtggtcatttttcatgagatctattttagctgaaaactgaaggaatcaatagcattatacgttgaaaaatacaataagcagatgatctattttagctgaaaactgaaggaatcaatagccaacttctcttgccgatcaatttgctttaagatctattttagctgaaaactgaaggaatcaatagctaaagttgtcggaagtgcgtcccacatctggatctattttagctgaaaactgaaggaatcaatagccaactagaattgcatccttatccactgatggatctattttagctgaaaactgaaggaatcaatagccctcaacggctgatggcatcaacgattcatggatctattttagctgaaaactgaaggaatcaatagccatttccgtctagcgagataattgagtgagatctattttagctgaaaactgaaggaatcaatagcggataatttttgcttatctcgttccttgttgatctattttagctgaaaactgaaggaatcaatagccaactagaattgcatccttatccactgatggatctattttagctgaaaactgaaggaatcaatagcacgagaagttttgcaccgccgtgttcgtgggatctattttagctgaaaactgaaggaatcaatagcgctgttctgtgtacttgcgcataatgaccggatctattttagctgaaaactgaaggaatcaatagcatggttctggattttagttgtctttattgtgatctattttagctgaaaactgaaggaatcaatagcccttggttagctcaattttcttagatacatgatctattttagctgaaaactgaaggaatcaatagctactgaactagttaatcaatataataaaaagatctattttagctgaaaactgaaggaatcaatagcctttcaatgtaagtcaataccgatttagtggatctattttagctgaaaactgaaggaatcaatagccacaatcattaccattacgatgctcgctgggatctattttagctgaaaactgaaggaatcaatagctctctatactgagaaataaatatgtcttgagatctattttagctgaaaactgaaggaatcaatagcactcctggttcaaacattgaatactatgtgatctattttagctgaaaactgaaggaatcaatagctccactcagccagctcataatgatatgagtgatctattttagctgaaaactgaaggaatcaatagcgccaacacgtaaggcaattagtggcgtttggatctattttagctgaaaactgaaggaatcaatagccaaaggtaatcacaggtatcgttcgcttatgatctattttagctgaaaactgaaggaatcaatagccaaaagcaatgatgaaccttatatttatagatctattttagctgaaaactgaaggaatcaatagctgaccgtgtgtgttatttcttcgtcaatttgatctattttagccgaaaactgaaggaatcaatagctcagcataacatagtaagatataaggctggaaattgtcttcatagttgcgaattatgtcgggttttcaacgactcgaatttatactaggtttctaatatttgcctttatgtgttgacttttctaagcttactgaccttcttggcggatgggaggaagcctatttttaaatagagagtgtcggcttttattgtgaaaccatcatatcagccataactacatatttttttgtgccagtaccggtgccacttgcttcgttttcagaagcaaatttaacattgcaaataccaatatttccttgctttactgccaatgaacaagcattttcaatagttttttgaaggcttttaccctcactgaataccacatttcctgtcgattgataaccttctaatgcctgacccattgtgattaaagttttgtttgaattgttattaaataatcccatgatattaactccttaatttacattcatttttgtgtttaagatatttgtcttggctataattattccatcagaagtttcaatgcaaacatttggcattactgtccatccgtaaatatctttggctttatgaactaaaataaaaacactgtcagcaatttgtgatttgtctgtattacttgccacgtaaatagtgtcactaacataaatagtaattccattgggttcgccagtgaggggatcctcatcgatcttatagtctaatatggtaccttgagagttatcaactgttgtttgcagttggtttttgaaactattaagattagttttatttgtaatgattgattcagagtttgcttccgcagaggcggcttttttagctgaggaactggatgttgcgtttatagatgttctttaacatcattcgaaactgtggttcttgaatgggatgtagatgtcttcatcgcagtctctcgtttactactggctatttttaatttatttttttttgcaatgaacctgtgtgaaggtttaacgataactgagtctgtggcggttgttccgtcctttgttacggtaatgttaactgttttcttcttaggactgactaagttgtaactaactttaaatcggccttgtaagtttgcttttgttgtgtgggtgattcctgttgtaaccgatgcatcagtatttgttttttcagaaataattgccacaccatctgaatcggttgtcacagtccttttatctaaagatatcttcgttttagcgacttttgaactacttactacagccgttgcaccattgttctttgtaggatcaataatatttcctattgatccggcaacaaataaaactacgattaagataaaccactagcgtttatagaatggtttttccccgtttttcataatagttcaccaattattttgctgaactacttgaatcaaggtttagtggggcttcttcttgtagtttagtaactttataagccttttgtcccaattttttaccatcaacaccttgggtagctttaagaacaaccggagtggaagtgttatcaagattatatgtggctacccctttaacagatccacccttattaattttttgagattgatttttaagctcagtgtcatacccgtttggggttgacccaacttctagttcaccctcggtattcttattcttttggtaggcattaaagactgcttgccacccgctgatggcatcaatatcctttttagttctgtttgtgatcgtatattcgaaaataatccggttatgatcgtcagtatcactaggttttaagaatttaactttgttaattttgatctttaaatcgtgaattaccacagcattctttttaaacttgtattttgtcgcggcctgaacttgagaactctgattaaaagttggtgtaaatactcccgcgcccattcctaataatgagacagaaattagaccacccaatcctaatttacgtaatttcattttaactcctccaaaataaatcagcttttaatgtcatcagtatttggacaaattagaccacatagcttcgtttttatttttgccaaatgattctaccttgataaaggacattatcaatttttccttcacgttcgtctttatagatggaaaatctttgtcatcaaagtcataaaaaaataggccggttcatgaacacaaacaaaatagtatctaaatctattttaactgaaagttgaagaaatcaatagtgaaaaaccgtggtgatacactggcggggcgctgtgattacaaagtataagtacttaaagattgcattaaagttcttgaaggaagtgaaaggttttaaaatcaaggtgggatagcttctagtggaaattgataaggatagtaccagaatagggtataccaatggccaagcacatcatgctgatgaagtcatgaggcaagtacttgcaggttttattaatttatttaatgaagattttgaaaattgctggtaaaagctttttctaacgataaaacaatattcaagaattaaaggcacctagtaattgtgttaagtgttatttttatgcctggtgtatgaacatccccgattagattcaggtgaacggtattcgttatgaagttgttcttaagcaattaagcgtgatgggagtggcgacttattgttgggtgaaacggatactatcgaaaatgcaattacgatcaatattaggttaccaaccgaccatcaacaacagtaaaccttatattgcacccggtggcatttgagagtggtacgttgaactacttaccgatgaatgcacaatagattcggatagcttaacaattgtaccaagtatttattgatagcgatgtctttccctaggtgcggaccattaaataaaatccgagaagggtcttccaggactttatacaagtaaagacgacaatctattttagttgaaggctgaaagatctgttcacgttaaaaacgtagtactaatacttctaattctgcggcaacaatagatattgatgctgctctggttgatcagtgatacgcaataagaatgttatctgtaatcttttagcagaaaaaggtttattacaccaactaactacaatagaagagtaagctactgcggcaacaatcaattaaaacagcaattttttgaaaattataatgtttttatcgaaaaagaatgcgctttcttagcaaaagcattataataaacttattccaagatgacttttgcaagctataggttccctgaggctagtataagtgactagaaaatttacttaagtcttggaatcatacttataaataatccggcctaaaccacattaaattgaatttaggagaagatgcctatgagtattgaattgaattttcacgttaaagtgaaactaagcaaagaaatacttattttactagtgacattactattactagttaactagtcgcctataagctaatctcaaacgggaacttatagtaattggatctactttaaagtagactccagataaagctctgtgcccccaactcaattcagttgggggccatctttttataccggcgtaaaattcgatgtgttattatatgcctatagttcattttgactggcaaatagagatttatatactcctggagtgaaaaccatgcattatcaaacgactttaagtacgcgtccgtttatgtacctagaaacaaaaaaagtggcgcagcggctacaagatggccaatcgcttgctgaggttcgttcggcagcgattgagcagaattttttgcagttaccatcgcggtcacgccagttggcggctattaatgttattttgaaacgtcttggaacactggacgtttatttagtgcaccaatttttaattgctgatcgggaaacgagtaacttgattctgttgtatgccataatggctagtgatcaattatttcaggagttcatgcgggaagtttatttacaaagaattaccggtatggagacaagtttgactaagcaagatgtgttaaaatttttagcggaaaagtcgacgcaaagtgaaaaagtggcacgctggactggtgctacgcaaaatcgtttagcagcagcctacttacaggtattgcgtgatagtggcttaatgcgcgctgggcagttggttaaaggaatactggcagcagatgtggcgcagtatttgcatcaatatggcaagcagtcactgtatgaagttttaataggaagtcgggtatagtcatgcgaactacggcacagcgtttaaatgcattacaggataaattgttggcagaacaatttgttcacaatactggcctaggtaacgaggttggtttttatatctttgattatgtcccgcaagatgagcttttagtacgcgcgcgaatagtagaaattcagcaatatactgaaaaaaggctgcaagtaaaaatacagaattttgatttgtttaaaattgtattgcagttctttgagtcgcggggctacatggataaaaattttcaaatggaagcaaaacgtggtagtgctattttatttgagcgaatgcaaaaggcgcttaaactggcaactaatcgcgatgagttggttggctatattactgctcattatgatccgaatgcaattatttttttgactggtgttggtacagcctacccaattgtacggtcg

SEQ ID NO: 378 - DNA, 23366 bp, synthetic construct
  misc_feature 1..23366: note = Synthetic
  source 1..23366: mol_type = other DNA
aagctaaattccaaagatgcctagtacatgttatgcgcaatattggttcgcatgtgcgtttaaaagatcgtgaggcgatcttaaatgactttaaagagttgcattcagcgaccgatgtaactgcagcacacaagatcttaaatgatttttatggtgcatgggggaaatcgtattccaatctgatccagcaacttaaatccattgaaaatgaactattagctttcctgagttccccccccggccattcgaccaacaatttattcaaccaatatcttagaatcactgaacaaaagaatcaaacgcaagaccaaaccaaaggaacaatttccaaacgaaaaatctttagacaatttcattggggttcaagtcataagctataacgaaaagtacttcaatcgtagccatcgcggatttggtcaagtcaaagacacgttagaatcacttttcgattaatacattattttgccaggagaagggattttcatttacacaaacttcttgacactcccgaatgcttgatatttggtgcccaaaagatttagatataggtgtgaatagtaaaaacaaatagattaatttgcgtatattaagagtagcacctaatttaataatggagggacatgaaatgactcagaaaaatttaaaaatcgcacagcgggcggcgacggtagccttatctagcattcttttaagctcgacgattttggcagcggttccgccactagttcatgcgacagcaacgactagtaccgaacagacgaccactaaaaatgccgcacaattagctgcgcagcaagatattttagccgataaggccagtggcaccagcagtgatccagccggtgatgcgacatatcaagctgactatcaagcagagtttactcgtggcagtcaagaagtcgcacaaggaaaagcagcggccgattctgatgtaacaagtcagaagacgcaaaatacgagcaaaccagcaggtagtagtgtttattacgcacatggttatgatacagaatttgtagcggctactgcgacctttaaaactggtgttaccgctggtcaagcggctggctatgcacaaaagcctagtcagccagacgcacaattaggcaatatttatgcggctggttatgcggtcggttacgcacaaggaaaagcacaacagtcggctgaagccagtacggctgccagtcaagcggctgcggcgagtcaagcagcagctaaaccggcaacgagtaccgcagccagtggtgcaaatagcacaaatagccaagccacaactaaacctgcagcgagtcagtctaagccagctacaagtagtcaggcacagcaaccaactgctagccaggcgacgagtgcagcgactaccaatgcggctaagccagccgctgcatccaaagtcaatgccgcaactgaatctagtacagctactgcggccagtgcagtgacaccagttttacagccagctccagcacccggtgacaataacggatttagcaataatgtgacgaacagtgatgatggttggctttataccaccggaacgccagtggcttcgcacgaagaattcatcaagctttttgctaaggacgcccagaaaattgcacaaactaagggcttatacgcatcagttatgattgcgcaggctgcattagaaagtagctgggggactagtacattatcgctggcgcctaattataatttatttggggtcaagggcagctttgacgggcagagtgccttaatggcgacgcaagaagataatggttttggtcaactatatacgatcaaatcaagcttcaagcgctaccataattataaagattcattgactgattatgctgatttgctccgcgacggtcctggtttagcatctaattattatgcaggtgcgtggaaacaaaacgctaaggattaccaagcagcaaccaaggctttaactagtcgctacgctacagatactaaatataatttgaagttgaatcaaattattgccacttatcatttaaccaaatatgatcaagcaccaacgacgcaatcaacgaccaccagtgctaaacaagttgatttcacagcaacattgaagcaaaagccacaattaaaacaagttttacatgggtattttcttacgaataaccaccccgcttatttgatcacgaagaccaatttgttgcggacgccaattatttggcatttataagccggtaataaaaaagcgcaccgacaaagtcagtccgcttgatgaaccggtgaacaaacagcttacgggggacgtaatctgagctttaccggtatcattaataatggtaccattaatgccgcccaaatcaagctgaaaatgcatatttatacccagttaaggattcctaatttatggggatcctttttggttcgattgcatcctctgataatttttaaaataacaattttacttggaaaatagctggtatacttgaagttaacggttattagcacaagagatgcttacagcggatgacagttatagttggtgatgtttttaggcatattaagtagaattaattacgattttctaactaacattgataatttctgtacgcacttatttttctacgcgacgaaaaagctaatcactaggtatcagtataattcggtgcagtaaattaaggcaaaaattgcagatgagtatgggctagttgtttacttctaggtggttttaccgctatctgtgtattgttccatatgaaacaatacgtatattttccgtcaagttatacaaaatataatgattaactatggtatatttaaagaaactaggcaggaatttatacaataattgtgaagtaagatcatattccttgcggcatgaattatgttacaagaatggatacggtcgcttgttcttaataacacttttaagcaagtattgaatttggggcttactcgttagacagagtagactaatgctgtagtacgacaagcccaagtggcatcgtccgtaacatctgagttaattagtaggaggctttgaaatgactgaattttacattgtgcgtcatggacagacgcaggcaaatacacaagatattaaacaaggtacgatcaatacgccagcaacttatttgaacgataccggtaaggcacaagcacaaacgctgcatgataattttgatttaagttttgctgaccggatgatcgccagtccattagagcgcaccaaacagacggccgcaattctgaatagcgggtacgatctaccattaagttacgatcagcggttgattgaaatttcttatggccgctgggatggtcagacgaatgcccagttgcgcaaaacttatccggaattatttaatccaatcactggtgaagtttatccagattatgccattccagctaaaggtgaagaatttaatgcggttgaaacacgggtgcgtgcatttactgaagaaatgacccagcgttatccgaaagaaaaaatcgtgatcgtttcgcatggttttacggtacgcagttttgcggttaatgcagtacagccgcaagatccgatgagtatgccagagccagagaataccagcgtaaccaaaataatctgtgcgccagggaccttacaacaatatttgatttactataatcgacgttattagcttcaatttgtgctatagtcaaattgatggggatgatcatatggctgaagttgaagtagctgatttggaaaaaattaagcaacggctgagaaagttagcagcgcagatgcgtaaattaggtggtaaaactagtggtttaagccagcgttggacacaagatcgagcaattcgtgaagtgaacgcgatcgtaagtgaaactaaaaaggcgaccgctactggccaacccttaactacggctgagcgcaagtcactcgagtatattgaaactgaatttgttgatcttgacgatgcactcgttaatttacccgattctgcggataaattaaaaacaaccatgctgaagcaggaagctttgaaagctgttcgtcagcgattaacactaaaataagcgttaggcatttttgcctaacgcttattttagtaaagtcccactgtccggcgttaatgcgcgccgctttaactttccattaccggtacgcggaaaatcagtaaccaaataaaaagcatgggggactttgtaatgcgctaaatgattgcggccataatcgcgtagctccgctgcactaatcggtgtttttaactgaagataggctaatggaacgctgccccagatggcatcagcatgaccggcaacaacgatctgcttgaccgctgggtgctgctgataaacagcttcgatctcgccaggaaaaatattttcgccgccagaattgatcatatcgccgctacgaccttggacaaacaggaagccttcgtcatccagatagccaatatcgtcggtatcaaaccaaccgtcatgtagttgacggttaaatgctgctggctgatttaagtagccggcggccagcgttggtgttttaaccaaaatatgttgatcagtggcgatcttaatttgaacagggaacagtggttgcccagctgagcctaatttacgagaggcgttagcgaaatctagcgccacgatctgcgaggcagtttcggtcatgccatatgactgaatcacaggaatctgtcgttgttgacactcattcagtgtcgcccgatcaatcgggccgccgccgaggagcatacagcggaacgcagcctgataatattggtctgttggcagcgtctgcagtaatttttgtagcatgtacgggacgactgaaatcgttgtgatcggctgtgtgcagagtaggtggttgatcagcggggcatcaaaatgatcgaccaatacaacggtcatgccgtagatcaagccgcgtaacatgatcgataagccactgatatgaaatagcggcacacaacataaccaactatcggcggcagtcaagccgagatttagaaccgaaccgattgccgaataaaaatgattgctgtaagtttgcagcacgccttttgcgtggcctgaagtaccagaagtaaacataatgctcgccactgccgctggttcgaattcaactggcgggattatgggcaagggagcctgctgggctaactgactaaagctgaccactttaactggcagtggccgcaccaattgatcggcggccaaacaaagagtgactgcagcgtcagttaattgctgacttaactcgtcaacgctcagtcgctgattgagcaaaacaggggtaaaacccaattgctgcaacgctaaaatggtcaaataaccaggtagcgtgttatcagttaaaatggcgatccgccccgttggttgcaattgtttgatccggccagcttgttgcaaaacttgttgctgcaattcagcgaaggtcaacttttcgtgtttggtccgcacggcacagcgttgtggtgatagccgtgcgcgcttatttaaccaattctccattgttaagggaacttcgggaactgatcgaaatcaggtttgcgcttctcattgaaggcatcccgaccttccttaccttcgtcggtggtgtaaaatagcattgtggcatcgccagcgaattgttgtaatccagctaaaccatctgtgtctgcgttcattgcggctttgatgaaacgcaaggcggtcggtgatttagtcaaaatctcattacaccaatctaaagtaactgattcaacttcagctaatggggcaactttgttgatccaattcatttggtaggcttcttcagcgctgtaaaaatgattcaagaaccaaacttctttagcgcgcttatgaccgatcacgcgggctaaataaccagaaccgtagccggcgtcaaaactgccgactttgggcccagtttgaccgaattgcgcgttatcagcggcgatcgtcaagtcacaaatcagctgcaaaatattaccgccaccgactgaccaacctttgaccattgcgataaccggtttagggatgatccgaatcaaatgttgcagatccaatacgttgaggcgggcgattttatcgggacccacatagccgccattaccgcgaataccttgatcaccgccggaagaaaaggctttgtcaccggcacccgttaaaataattacgccaatacttgcatcatcacgacagatcgtgaaggcttcgatcatttcctggatcgttactggggtaaaggcgttcagcttttccggacgattcatcgtaatttttgcgattttatcggcccgttcaaaaatgatttctgagtagtctttgacgttttgccaagttacactagtcataaatacaacttctttctatatggaggtcaaaatgaatttacttgaattgttgggcgttaaaacagtgcgcgctactactactgaggcgatcgtcgaagtcgcagtgactgaccaattaaaacagccatttggcattgtccatggcggcatcaataccattctagcggaaaccgcggctagcttaggggctaacgctggcctggacacaacgcaacaagtggcagtaggcgtcaatgtggaaacgcaccacctttatactgtagcacaaggacgtctgcgcgccaacgccaaaccactccacgcaggcaagcgattacaaacctggcaggttgaagtttacgaacaagccagcgtacggctgaccagtgtcagtacggttacgttgatgatcacagcacgtcagtagtagcggcgtagttctgaataatatcgtatgtcgtcacgatgctaacgacgtcgaaaatatcaaagggaccttgcggcgcgccggtgccactatgacccatgatcccggctgttttatttttccaaattttgttagcaaaatgttgggctaagaagcgttctagtcgaccaataactaggcactaaagtcgatgaattagccgaaaaaattattttttaggcactaacggcgtgagcaacgttttttaggtcaacgatataattgatccgtgctaaagtcgaatcaacggtctgctcagaacgtttgatcgtatcagtgacactctgatttaaagcagtaaattggtattataattcagatcggcggttgactgcgcaaattgtgttttagccttttaaattgcgtcttgataggtggtttctagcccagatattttcactttaacctgtctcagcatagtagtgtttaatttagtaatcgattacatttagatacttagaagcaatttatactctgagtacgtcattaccagcaatggggcacatttttgatcgtcatagaatatattcctttcttattggtatatcaaatgttgatagtgtttgcttagagtgcctatgtatcaatgaatgaattaattatatagaccaatatgataattagtgcaagctatatacctttatattggataaaactgatttgaagtactttatgcttatttacgtttacacttgattaaacataaataaatttcagaactatattttatagttgagcaattatcaaaggaattggaaatgcgaagtgtaggattagttatataatctcattatttatgtgaatagcaattaaaatagatgtccttaaatgtaccagaaatattttatctgaatatgcaatttagtaccactaactgtgatttctgggtattttagtccgaactaagttgatgagtaagattaaacggttggttactttttggacatagaaaatagcccagtatccgtgtgatatcggactatcgcggtgtactagatctattttagctgaaaactgaaggaatcaatagctctgctacggcttgcttagtatcactaacggatctattttagctgaaaactgaaggaatcaatagcacaataacttttggcgataaggtaggtgaggatctattttagctgaaaactgaaggaatcaatagcgtcgagtttgttgctccacttatttttaatgatctattttagctgaaaactgaaggaatcaatagccgagtaaataatgatattctaaattattttgatctattttagctgaaaactgaaggaatcaatagcatcgcatggttagtcgcatgcagacctacggatctattttagctgaaaactgaaggaatcaatagcttagttgcattattgactgctgaattaatcgatctattttagctgaaaactgaaggaatcaatagcttgaagattttgcggatgttaataacccagatctattttagctgaaaactgaaggaatcaatagcgctgattgataacgactttcttgcaccagtgatctattttagctgaaaactgaaggaatcaatagctgttttgctggatcatcgctataacgtttcgatctattttagctgaaaactgaaggaatcaatagccggttgcagttgcagttgcagttacatagcgatctattttagctgaaaactgaaggaatcaatagcgttcacgttggcaaactctttggggcgacagatctattttagctgaaaactgaaggaatcaatagctaacctgataaatgatgcatcattcgcaatgatctattttagctgaaaactgaaggaatcaatagcgttacttatttgctcaaggtgcggttggctgatctattttagctgaaaactgaaggaatcaatagcgcatgtatcactttgaagactacggaataggatctattttagctgaaaactgaaggaatcaatagctatagattcttgtacagtgtacttgtactagatctattttagctgaaaactgaaggaatcaatagcccttacggattaggcgagtcagctgtacaggatctattttagctgaaaactgaaggaatcaatagcaatgttgatacgctagtcccaagtcgttgtgatctattttagctgaaaactgaaggaatcaatagcacatttcaagcaaaccgtcggtgattccatgatctattttagctgaaaactgaaggaatcaatagctcatagggatgcgcagggaacgtggtttgagatctattttagctgaaaactgaaggaatcaatagcgcgctggtcttttcgggcatcatccttgttgatctattttagctgaaaactgaaggaatcaatagccccaggctttcggctacactgactttggaggatctattttagctgaaaactgaaggaatcaatagcgctgcaaaccagtcattgggactttgcgttgatctattttagctgaaaactgaaggaatcaatagccaaaagcagcgctttcaattaatgtttacgatctattttagctgaaaactgaaggaatcaatagcctgagaaacggaaagtaccaagctaaggttgatctattttagctgaaaactgaaggaatcaatagccgacttgggcggtgtgattggcggtgttgggatctattttagctgaaaactgaaggaatcaatagcaatcgcatatataaatctatccaccctaaagatctattttagctgaaaactgaaggaatcaatagcccggtacaagcagctaaaggcgattacggtgatctattttagctgaaaactgaaggaatcaatagctatttcttgaccaaccaagagctttgccctgatctattttagctgaaaactgaaggaatcaatagcatacttctgctgttacttttggcgattggggatctattttagctgaaaactgaaggaatcaatagccgctaaaagcaccagaaacttttttagcgggatctattttagctgaaaactgaaggaatcaatagctttcgcgtaacgctgcaataagttcctcgtgatctattttagctgaaaactgaaggaatcaatagccaaaggcaagcgcaccggaaccaattaagggatctattttagctgaaaactgaaggaattaatagcagcaggcaattgtgacaacaaaaagcggtggatctattttagctggaaacttactatagaataaaatttatccaataatcaacttttgcaaccggcatcattatgctaaactgaagtaaattaaagagatggagttgatactatgggctatcgaataggcttagatgtggggattacgtcaactggttatgctgttttaaaaacagataaattgggaactccatataaaattttgacactagactcagtgatttatccacgagctgaggatcccaaaactggggcatcactggcggagccacgacgggtgaaacggggattgcgtcggcggacacgccggactaagttccgtaagcagcgaacacagcaattatttatacatagtggtttattatctaagtcggaaattgagcaaatattggcaacgtcgcaaacggatcagtcagtctatgaacttcgggtagcgggtctcgatcgtcgattaactaatagtgaattattccgcgttttgtacttttttatcggacaccgtggatttaaatccaatcgtaaagccgagttaaatccagaaaatgaagcagataagaaacaaatgggccaacttcttaattcgattgaagaaattagaaaagatattgctgaaaaaggctatcgaacagttggtgagttatatctaaaagatcctaagtataacgatcataaacgtaataaaggctatactgatggctatttaagtacgccaaatcggcaaatgttagttgatgaaatcaagcagatcttagataagcagcgcgaattaggcaatgaaaaactaactgataagttttacgcggcttatttactgggcgatgaaaatcgagctggtatttttcaagcacagcgagactttgatgaagggcctggtgctggaccttatgctggcgatcaaattaaaaaaatggtgggtaaggatatttttgaacctaccgaggatcgtgcagctaaggcaacctatacttttcaatattttaatttattgcagaaaatgactagtttgaactatcaaaatacaactggtgatgcttggcatacattaaatggacttgatcgacaggcgattattggtgctgtttttgcaaaagcagagaaaccgactaagacgtataaaccaaccgattttggcgagttacgtaaattattaaaattacctgatgatgcacgttttaatctagttaattacggtagtttgcaaacacagaaggaaattgaaacagtagagaagaaaaccagatttgttgattttaaagcctatcacgatttggtgaaagtattaccagaagaaatgtggcaaagtcgacagctattggatcatattggaacagcattaacgttatattcgagtgataaacggcgccgacgctattttgctgaagagttaaatttaccagctgaattaattgaaaaactcttaccacttaatttttctaaatttggccatttatcgattaaatcgatgcaaaatattattccctatcttgaaatgggtcaagtttatagtgaggctactactaatgcgggatatgatttccgtaaaaaacagatttcgaaagatacgattcgcgaagagattaccaatccggttgttcgtcgtgcggtaacgaaaacaattaaaattgttgagcagatcatccgtcgttatggtaaacctgatggcattaatattgaattagcgcgtgagttaggacggaactttaaggaacgaggcgatattcaaaaacggcaagataaaaatcgccaaactaacgacaaaattgctgctgagttaacggaattagatatcccagtcaatggacaaaatatcatccgttataaattgtacaaagaacagaatggcattgatccttacaccggtgatcaaattccatttgagcgtgcatttagtgaaggttatgaagttgatcatattattccgtacagtattagctgggatgatagctataccaataaagtgttgactagtgcaaaatgcaatcgtgaaaagggtaaccgaattccgatggcctatttagcaaataatgagcagcgtttaaatgcattaaccaatattgctgataatattattcgtaattttcgtaaacggcaaaaacttttgaaacaaaaattaagcgatgaggaattaaaggactggaagcagcggaatattaacgatacacgttttattactcgtgtactatataattatttccgtcaagcaattgagtttaatccagagttggagaaaaagcaacgtgttttaccattaaatggtgaagttacttcaaaaatacgcggtcgttggggctttcttaaggtgcgcgaagacggtgatttgcatcatgcaattgatgccactgttattgcagcgattacgccaaaatttattcagcaagtaactaaatatagtcaacatcaagaagttaaaaataatcaggctttgtggcatgatgctgaaatcaaagacgctgaatatgcagctgaagcgcaacggatggacgctgatttatttaataagattttcaatggttttccgttaccttggccagaatttcgggatgaattattagcccgcatttctgataatcctgcagaaatgatgaaaaatagaagctggaatacgtatacaccagttgaaattgctaagttaaagcctgtatttgttgttcgcttggctaaccataaaatctctggtccagcacatttggatacgattcgtagtgctaaattgtttgatgaaaaaggtattgtgttgagtcgagtcagcatcactaaactaaagataaataaaaaagggcaagttgctaccggggatggtatttatgattctgaaaatagtaataatggggataaagttgtttattcagtaattaggcaagcattggaagcacacaatgggtctggagaattagcttttccagatgattatttagaatatatggatcacggcactaagaaactagtgcgtaaagttcgagtggctaagaaagtttcgctaccagtacgattgaagaacaaagctgcagcggataatggctcgatggtaaggatcgatgtctttaatactggaaagaagtttttatttgtaccgatttatattaaggatacagttgaacgagtattaccggataaggcagcattacaacataagtcggtaaaagattggtatcaaattactgaaagtgatcaattctgtttctctctatatccaggtgatatggtgcatatagagtctaaaacgggaatcaaaccaaaatatgtaaataaagaagcgggtacagatattaggccagttaaagatttctatggctactttgatggagctaatatagctactgcaagtattcaggttcgtgcacacgatagctcgtatacagcgggaagtataggtgtcgcgggactattaaaatttgaaaaatatcaggtcgactattttgggcgctatcataaagttcatgaaaagaagcgccagttgtttgttaagcgagatgagtaattatggcatttcgtaatctatatattcagaatccagcgcgtttgagtatttcaagaagtcagttggtgattcaacaagaagagcgttataccgttcctgttgaggatatttctagtattatgatcgagcataaacaatgtacaattacagcgccaacgctatcttttttagcggaacatcaagtagcggtatttacgtgtgatcagaaacacttaccttgtgcggtagttttaccgctaggtcagtactatcgtaagctggaggcgttggaagcacaattacatgtacggactaaaacgaaagcacgtttgtggcaaaaattaatgaaacaaaaaattgagaatcaagctaaggttttagagttgaatcactgtaaaaacgctgctgaactgaattttttagcaactcaagttactgaaggtgataaaacatttaaagaatcgcgcgctgcacgactatattttatgggactgtttggtgatcaatttaaccgacgcaacgaagatcctatgaatggtgctttgaattatggttacgcaattattcgcggtattattgcccgtgatatttgtgcatatggttttgaaccagtgttaggtgtttttcataaaaatgagttaaatccatttaatttggcggatgatttaattgaaccctttcgtgcttatgtagatttatgggtttatgaacatcaaactgatttgaaggtaggtttaacaccaaccaacaaacaagcgttatttcagttattatttacagaagttcgaattgatggagaatttcattctttgagcaatgcagttcataaattagtatcatcgtacacaacttgttgtcgtaataactctgccgcgggtttaaagttaccggaactgattccgctggtggcgcacgaatatgagtagtaagtatatgcgtttattagtaatgttcgacttaccagtagtaaaggcaaaagagcgtcgtgcagcagcaaaattccggcaatacttattaggtgatggttacgtgatgatgcaatattccgtttattatcgcattgttaatggctacgatatggctaaaaagtatgagctgcggctcgatgataatttgcccgaaaaagggtcagtaagattattagttgtaacagagaaacaattcgatgaaatgcgtctgttagtaggtgatccactaccaaatgaagagaaactagatagtggacagatgaccactttttagacaagtaaaagagcctgatatccgcgtgatatcaggttcttttagcatactggatctattttagctgaaaactgaaggaatcaatagctaacgaattgcgttagtaacgggttgtgacgatctattttagctgaaaactgaaggaatcaatagcgacaaacgtgctttgacttatccattgagtgatctattttagctgaaaactgaaggaatcaatagcgaaactggtgcgcattccgatcatagcgaagatctattttagctgaaaactgaaggaatcaatagctggattcaatggtcacaattaaagtttgacgatctattttagctgaaaactgaaggaatcaatagctctgattgtgcaccggcattaaacttatctgatctattttagctgaaaactgaaggaatcaatagctgtaacgtctgcttcatcttatccccagtcgatctattttagctgaaaactgaaggaatcaatagcagcccctacccgccggtaacgagtaagggagatctattttagctgaaaactgaaggaatcaatagctcggtgttgagggacagacaactcctgggtgatctattttagctgaaaactgaaggaatcaatagctacttaaatcattatgtgtaccatatagaagatctattttagctgaaaactgaaggaatcaatagcaagcccacaggagaggattaatatgcgcaagatctattttagctgaaaactgaaggaatcaatagcgcggagtcggaccttaaaggaggtgatacggatctattttagctgaaaactgaaggaatcaatagcttggcagagcgatttatggcaaaatatgggatctattttagctgaaaactgaaggaatcaatagcacttagataagtcatgtttaaagtttcagtgatctattttagctgaaaactgaaggaatcaatagccactgtatggcgtgataaagacctgataacgatctattttagctgaaaactgaaggaatcaatagcaacaatgcatttgaccttgtccggaaacagatctattttagctgaaaactgaaggaatcaatagctgaatagctccttttattaatttattttatgatctattttagctgaaaactgaaggaatcaatagcttttttgtgtagaaactcatcaacatttcggatctattttagctgaaaactgaaggaatcaatagcagaaggagaacgggtttatgctttaatcgcgatctattttagctgaaaactgaaggaatcaatagctctctgatgtggcagcatcaacctactagtgatctattttagctgaaaactgaaggaatcaatagctagttgattctacttctttttgccaccttggatctattttagctgaaaactgaaggaatcaatagcaaacaagctatcggcgccatgaaaacagagatctattttagctgaaaactgaaggaatcaatagcatggattataaagcatgtaatgccgaagttgatctattttagctgaaaactgaaggaatcaatagcccaagcgattttaaatcatcgcgaaatccagatctattttagctgaaaactgaaggaatcaatagcttataaacctgtgcatcttgtgcacgccaggatctattttagctgaaaactgaaggaatcaatagcattagctaatttaacaaacaataaagtgacgatctattttagctgaaaactgaaggaatcaatagcaccggaaacacgcagcattctcggaaaaacgatctattttagctgaaaactgaaggaatcaatagctttttcacacctctaaattaattttttagcgatctattttagctgaaaactgaaggaatcaatagcaattcattgtctgggattgtggcattgccagatctattttagctgaaaactgaaggaatcaatagcctgctctttacttaatttttccacctatttgatctattttagctgaaaactgaaggaatcaatagcgtgactcaatcacaaaaggtgcacatttgagatctattttagctgaaaactgaaggaatcaatagcggattctttcgagcccgcactattagtcagatctattttagctgaaaactgaaggaatcaatagccacattaaaatcgttccacatttattatgcgatctattttagctgaaaactgaaggaatcaatagctgtccggattgctgttgcaataaataattggatctattttagctgaaaactgaaggaatcaatagcaactggggcttgctaggtgttgttgctttagatctattttagctgaaaactgaaggaatcaatagcgaagtacggcaaggattcatcactttgggcgatctattttagctgaaaactgaaggaatcaatagcacaaaccttttgaaggtgtacctttagccggatctattttagctgaaaactgaaggaatcaatagctgtatcgtttaaggatctataggaggtgatgatctattttagctgaaaactgaaggaatcaatagctctggattcgcttattcatttttttaaaccgatctattttagctgaaaactgaaggaatcaatagcgtagaatctgatgtagaagtattggttgaagatctattttagctgaaaactgaaggaatcaatagcgctaatctgagatttaacctatttgcacgtgatctattttagctgaaaactgaaggaatcaatagcgctaagctcagatttaaattatttacaatggatctattttagctgaaaactgaaggaatcaatagcataagttggctagcttgctcgttatactcggatctattttagctgaaaactgaaggaatcaatagcctgataataacggacaccaactagtggcttgatctattttagctgaaaactgaaggaatcaatagcgaatttgatgtcaataatattggtgaactagatctattttagctgaaaactgaaggaatcaatagccgtttgtctggggtcgccgccgtaaagctggatctattttagctgaaaactgaaggaatcaatagcattgctgattccgctgagccgcgaacaattgatctattttagctgaaaactgaaggaatcaatagcagccaataaacggtggacacgggctatccgatctattttagctgaaaactgaaggaatcaatagcgcatttttttgatgactttattgaactaagatctattttagctgaaaactgaaggaatcaatagctcatcggtatcaaacttactagagaattggatctattttagctgaaaactgaaggaatcaatagcaaactgttcatcgtttaagttaggaacgtagatctattttagctgaaaactgaaggaatcaatagcccaaatgttccaaatccaccgacgatattgatctattttagctgaaaactgaaggaatcaatagcttcgatgtaccgttgtactgctggtgtgagatctattttagctgaaaactgaaggaatcaatagcgcaccggaagcacaaacaacgaaagtaggtgatctattttagctgaaaactgaaggaatcaatagcccaatgcaactgcggctgggttcggtgatagatctattttagctgaaaactgaaggaatcaatagcttcgctccaccgatggatctacaataatttgatctattttagctgaaaactgaaggaatcaatagcataagccaaccgtcgcaccaatgccctgttgatctattttagctgaaaactgaaggaatcaatagctacactttcagctgtaatatgtacggcactgatctattttagctgaaaactgaaggaatcaatagcctcgtaagctagattgatagctaattaagtgatctattttagctgaaaactgaaggaatcaatagcactgtaattgcggagcggtgacattattcagatctattttagctgaaaactgaaggaatcaatagcatgaccgactactacaaagaaccgactgtagatctattttagctgaaaactgaaggaatcaatagcttcgttcaagtgcgcttagcggcacatcggatctattttagctgaaaactgaaggaatcaatagcgagaatgtccgaattgataacaccacgcacgatctattttagctgaaaactgaaggaatcaatagcgattatagtgttgaagacgaaaatccagtagatctattttagctgaaaactgaaggaatcaatagcgattcaacattggtctacctcttaattgagatctattttagctgaaaactgaaggaatcaatagccgaggttttcgaactctgtcttgcttccttgatctattttagctgaaaactgaaggaatcaatagcgatttacatttaaccggtactctatctgctgatctattttagctgaaaactgaaggaatcaatagctggttattgttgtaatcaatgtttgtaaaagatctattttagctgaaaactgaaggaatcaatagcaaagatttattggaccgcgctggttttgcggatctattttagctgaaaactgaaggaatcaatagcgtggtgacgcctaacacgttcacattattcgatctattttagctgaaaactgaaggaatcaatagcgtggtgacgcctaacacgttcacattattcgatctattttagctgaaaactgaaggaatcaatagcgtcactgtcaaattgaaacatcaaagtctagatctattttagctgaaaactgaaggaatcaatagccgtcctatattgtcgcaatagcgtccatggatctattttagctgaaaactgaaggaatcaatagcaccagtacggcaaatagcacaagtactctgatctattttagctgaaaactgaaggaatcaatagcgatgatattgctcgacaagaatattacaaggatctattttagctgaaaactgaaggaatcaatagccaactatcgtttcaacgcttattgcctatcgatctattttagctgaaaactgaaggaatcaatagcacgccagcgctgtttaggatcactactttggatctattttagctgaaaactgaaggaatcaatagcaattcaatcaaaggtatatcatctgtcccagatctattttagctgaaaactgaaggaatcaatagcctgaccctaacgtggcatttggctctggcagatctattttagctgaaaactgaaggaatcaatagcgttgaaactgtcgatggtagcaaaccaattgatctattttagctgaaaactgaaggaatcaatagcgcctgaacccaattggaattggaatcctcagatctattttagctgaaaactgaaggaatcaatagctttattgtgtgtggtgttagtgtgtcgaaatcctttgctgtcaaatcaaaaatcgcttttttgaataacttatcaattattgcaattgtaactcattcgtattctgttgccgtacgttcagatttttgattatcaatccatgattcaaaaatagtactagtagatcgcgtcaattcaagcataatacgttttcctcctaagcactcgcctatattatcacgactatatagccatgataacttgaaataatatcgcaaattgcaatagtaaattagccagtaccgataaagcacacagacgaagggctcatgggagttccaggtggatcaggattaggcggcgcggcctttgcgcgcacgtgctaattcctttcgaaatacttcagctggtgtacagaacttaagtaagcggcgcgggagatggttgagccgagattcagcttgacggaccagactgggtgtagctagatcgagtgattgccccttaggaaagtaacgtctgagtatacgattgtggacctcattagtggcgcgttcggccgagctataagggtgggcataataagtctcggcaataccctcaagtgcagccgttagcgtggtgaactctgttccgttatccgccgtaactgtccgcataacgtcaccgaattcagccgtaatattttgcatggcataagccacagattcggcgtctttaccctcgaccaagcggacaatctcatagcgcgttttacgttcggtaaacgttaataggacactctcgctaccagcacgtttgccaatgacagtatcgatctcaaaatgaccaaactcgtggcgcgtttctactcgctttggccgttcttcaatactacgaccgagtaggcgctgatgttggtgcgagtggtgttgggtcgtccggcgttttgttttttccagcagatcaaggttacggatctccaacagttgcgcatcgatatagttgtacaaagtcttcgtacagaccattttggccggcttaaataaccggtgcttacgggcataactaacagcagcgtccggcgaccagccctcatggcagaacttatcatcaaagtaggctaagaaggccgtcacttggctaaattttaatggacgtccacagttttgccgctttatttcatagcgattctgagcggcttcagggctgtaaatttcaaagtagtgtttctgattattaacgcgtttaacttgcgtgactcgaccacgcttgagctcattattgacggtctggtggcagacgcctaatcgaatcgctatttgccgtgctgagcatccttcaatgtgccaagcggcgatttgaccgcgttcgatttccgataaatggtgaccttttgggcgtggtgtgatagactgttcttgcatcaagacgaaaacttctttcattgtttgttgtaggaacttcaatgatacctgaatttttcgtcttggtgtcttttttttaccattttggctgggtggctaacttaattataaaacgcgcgcttgaaataatattcataaaattgtcatattcaaacgcgagttcccgtgatttttatcccacaagtgggatttttagaataaaaatacataaataattctaagatacgattggtcccctgtcaataaaatagacaatttaaatagagacttttttgtcctatgccacgactaaattttgaatttgagtttgatactcatcttcaagttgctttggtgatttgaatccacagtgactgtgaattctaactgtgttgtaaaacgtttcaatgtactgaaaaactagtcgtttagcttcggagtatgaatggattttaaaccgatttatccattcacgcttaatcaaggcatgaaacgactcaatgcaggcattatcccaaggataagctttctttgaatagcttaatgtcatgttagctgtaacttgattgtaagcttcagacgtaaactgactaccacgatcactgtgcatgattaatggcttgctaatatggcgactgtgcttagtcttttcaataagtgggatgacattcgatacctccaaggtttcagataagtcccaaccaatgatccgtcgggagtacaagtccataatactggttaaataaacgaatccgtcatgaactggaatataagtggtgtcaatgcaccaaacggcgtttggtcgcaatggattgaactgctcgtctaaaatatttattagctgtttatcaaacttagaattgcgagtggtagtcgtccaaggggttaggtaaacggcgtgaatgccaagttcacgcatatacttaccaacagttcgttcagcgatcttatatccttttgagcgaagttcttgggtgattttgccggcaccgtaaatacaaaggcttttgagccaaattgctttaatttcaccttgaataaacttcttccgaagctttcgcggtgattggtgattatgacgcttttctcgttgatagtaaccacttcttgagattccaacataatcacacataccattgatggaagggtgggattccaaagcgtgctgaacgtccatttcttggtataccttttcggtagttacttgctcagaatcccgattgatttttttaacacttcgatcgctccttcagcgtcacgaagttgacgctttagtcgtgcaatctccttgtccttatcgctggcaaaattaccagagccacggccaaactccccagtctcagtaaacagcttaatccatttatgtaatgtactagccccaatacctagattcttacttatttcattcatggtcatgtgatccttgttatctaagtaatactgaacggcctgttccttaaattccttgtcataactgtgcttcgtcattatttgatcctccaatttacttacttaattatactaaatcagagtctctatttaacttgtacactttttattctaggcccaaatacttatttatagaaaagggtgagactattggacaatactgctttagcaaagttcattgtatcattgggtgattcaaataattacggtagtacggttctacagataaaataggcgttggatcaaactggtcgggtcattcacgcaatgcttattgtaataaaaatgatcgtatcggtataataattcaatgaaaactgaatctgatgcatagcgagtgttttctgaattatctaaattatagccattttaagatggtaataagcgtactgcgttaatagcggctaatgcagcctataaaactttcgaaaaggaaaattatttggtgctgccatttaataatttggatcgggctgattttatggttgcgctaatgcgttactatattgcaactgatgtagcagcgaagcaaagtgctttttaaaggatgttgactgtactaccaaccaatcgtgaagttttattacatcaaccgattacgacagatgagc

SEQ ID NO: 379 - DNA, 23366 bp, synthetic construct
  misc_feature 1..23366: note = Synthetic
  source 1..23366: mol_type = other DNA
gcgtgtcgaaaaagacggatatcgtcgtcgccggtgcagatcctggtagcaagtacaccaaggcgcagaacttaggcgtcacaatttgggacgaagcgactttggagcaaaacttgcaagacttgactgactagcggtatcatggttcctaagatgcaaggaggaaatgttgtgaaacgatttagcacaatattagctttaatagttagcgcagctctgttgacagcgtgtggtcggttaggctcatccggtgtcggcacaacgagcagcaccaaaaccacgagtacaattcagacgactggccaaacttctgatgatgaataccaaggcgtgatccaaaatggtaaatacaaaactagtaaggcgcgcggcctgactaaggatcaaaacactaacggctcaaacttaaagagttttgaaaatggattacaaacaatttcacaaaaacaatttgctacggatgattatattttccaagaaggtcaatatttgaagaaagctacagcgcagaattggttggatcgtaaatccaagagtaacgctagcggcttgaatccggtggataacggggaaactgatgcaactaagcggaaccctgattatatacaagcgattgaagagcaagattatatgacccaagacggtaataatctgaagcttggtgggatgacaattggtttggcgatgaaccaggtcgactattatcaaaaagaagactatggcgccacctatgaaaccaaaatttcgcacgataaaatggttagtgaaggtaagtcgatggccaatacagtggtttcacggatgcgtaaaactgaaggcgtcggtaatgtgccaattgtcatcgcattatatgaacaagccactaatgacagcctagtcggcggaactttctttgcctatggtatcagtaaagacggcggtaaaaccattagcgagtggcacaatgtgaatgaagccaattacgtattaccagtagttggtagtgctaaatcaggtagtaccagcgatgccgattcctttagcaacttcaaaacgaacgtgcaatcgttcttccctaacttatctggcgtgacggcgcaaacacactataaggatggcaatttatcggggatgaacatcaccatcaatacgcaattctatagtgaaactgaaatcaagagcttcacccaatatttagttacagcagcaaataaatatttaccaagtgaggcggctattgagatcacggttcaatcaaccgatggcacgcaggcgttcattgcgcgtgaagcgggcgaaaagagcttctatagtcacgtgtttggtagttactaaaataaatagggttaaacgctaatatggagtaattaagacctataaagttgcttacattgttctagtcccgccatgagtgacagatgagatcaccgaattcatctgttcagcatggcgggatttttatttgccaatattagaatatcgcgcgttattcacatcgtttactcatgaaaattagaatgaaagctcgttattagtaggtgattgtgctaaactaaaaaatagctgttttttaatgctcattaatatgagatttaattaagaattttctggagggacgtaacgtgcatcaaaaacgttttttacgccttagtcttggctggcgtatcgtgatcggcttagtattaggcttaattgttggcgcattgacttatcaaaataaagtcgctattgctattcttaacccgatcggtaccatcttcattaatctgatcaagatgatcgtcttacctatcgtagtgtcttgcttagtcgttggtattgctaaaatgggtgatatcaaaaaattaggtcgtgtcggtggtaaaacgctgatttactttgaactaatgacgaccgtcgcgattgcgttaggtttagtcgttggtaatctaaccaagccaggtgatgcgatcaatattcaaaccttgagcaaggtgtcgatcagccaatatgcggccactgccaaaacggctagtaaccatggactcagtgacattatcatgaatattgtgccgacgaacttttttgaagcgttgggtaagggcgatatgattccagtgatcttctttaccgttatgtttggtcttggtatcgccgcaatcggtaaacgtggccaaattctgactgacttttttgaagccgcttcggaagtgatgtttaaagtcactaactggatcatgcaattagccccaatcggtgtatttgctctaattggcgttaccatcgctcagtttggactgggcgcgctgaaacctttggcgctgttcctgctgattacttacgcaaccatgatcatcttcgtagtcgtcgtcatggggttggtggcgcggttgttccatctaaatattttcgatttgttattggtgatcaaggatgaactcattttggcgttttccacagctagttctgaagctgccttaccgaaaatcatggaaaagatgccgcgttatggcgtcagccaagggatcgcgtcatttgttattcccaccggctataccttcaacttagatggttcggcgatttatcaatcgttggcggcactgtttttggcacaggcttatcatatccatttaagcctcgggcagcagatcacgttgttagtcgttttgatgatcacgtctaaagggatggctggtgtgcctggcgcgtctttcgttgtcttgttggcaacaatcaccacgattggtgtcccagcttcagggctggcctttatcgccggtgttgatcgcttagttgacatgggtcgcactgcggttaacgtggtgggtaactcactggcggcgttgatcatcgctaagtcggaacacgaatttgacgaggataagcagcaaaattatttagcggaaataaaagccgcatcagcacaaaaagcaaattaaactaagtgaaaaaacacttttcagaaactagcagcgatttcgctgctttttttgcagcctgaatcgaaatctattacgctacgtgctataataattacattgtggccgcatacgcggttaaacttggcgtgctttttcaaccgcacgctaaggaagcttcacgataaaattaaaatgtaataaaaatgaaagagaggccagagaattggcaattagtaaagagcaagtcactcacgttgcgaacctcgcccgtttatcttttgatgatgcagaattaagtcagtttactgatcaaatgagtgaaattacagatatgttcaatgaactgcaagcagtcgatacaaccgatgttgaaccgatgacgcatgtcgtcgatttagtgaatgttgtccgcgaagatgtcccagcaccggctgatccagaagaacgtaaggcgttattggccaatgcaccagatactgaagatggctatatcaaggtgccagcaatttttaacaatggggaggattcggctgaatgaacttctttgacaatgatttgaccacgatccataaccagttggtcaaccaagaattgactagttatgatttaacgaaacaaacaattgatgccttaaaagaaaccgataaaacaatcgatgcttttttgacattggatgaagctaatgccttggcaacggctaaagcaattgatgaaaaaggaatcgatccggacaacttatttgccggtattcccattgctatcaaagataacattatgactaaagggttacggaccactgcagctagtaagattctcgagaattttacgccggtttatgatgctacggttatggaaaaaatccacgctaacgacatggttgtcatcggtaaaacgaacatggacgaatttgccatgggtggttcaactgaaaattcagcttttaagaccactaagaacccgtggaacacaaccaaagtgcctggtggctcatctggtggctctgctgcagccgtttcagctgggatggtaccatttaccttaggctcagatacaggtggctcaattcgccagccagcctcatttactggtgttgtcggtatgaagccaacctatggccgtatttcccgttggggtttgatcgcctttggttcaagtttggatcaaattggcccattctcccgtagcgtcaaagataacgcggcgttgttgaatattttagttggcgtcgacaagcgtgatggcacctcagttggtgatcatgatgctgattttacggctaaattagatgccggcgttaaaggcttacgaatcggcttgcctaaggaatatttaggtgccggtgtacaacaagaagttaaggacgctattttggcggctgctgacaaataccgtgagttaggtgcaatcgtggacgaagtttctttgccacattctaaatacggtgtcgctgcttactacattatctctagttctgaagcttcatctaacttgcaacgctttgacggtatccgttatggcgtacgggctaaggatgctaagaatttgaatgatgtttacgtggattcacggacgcaaggttttggtcctgaagttaagcggcggatcatgttggggatgtattccttatctgctggctactacgatgcttatttcaagaaagcggcgcaagttcgtacgttaatgcgccaagacttcgctaatattttcaaagatcatgacttagttcttggtcctgttgccccaaccacggcttatggtatcggcgaagacgtcagtgatcctttgaccatgtatgctggtgacgtattaagtgtaccggttaacttagctggcctacctggcttatccttacccgccggtttcgctgatggcttaccaattggcatgcaaataattggccaatcatttgatgaggccaccatttatcaagctggctatgcttttgaacaggccactgatttccacaaacaagtcccaacgttagggggtaacaactagtgaattttgaaacgactatcggacttgaagtccatgttgaattaaaaacaaaatcaaaaatgtttagtccatcggccaatgaatttggcgatacccctaacatgaacacgaacgtgattgactggggttatcctggtgttttgcctagtgttaacaagggtgcattggaatacggtatgcgtgctgccttagcgttgaacgcaacgattgccaaggaaaaccactttgaccgtaaaaactatttctatcctgataatccaaaagcttatcagatcacgcaatttgagcagcccatcggccatgatggttgggtggaagttgaattagaagccggtgacactaaaaaaatcggtattgaagaattacatttggaagaagatgccggtaaaaatacccatcgcggccaaaattcttacgttgatttaaaccgtcaaggcacaccattaattgaaatcgtctcgaaaccagatatggcttcgcctgaagaagcttacaaatatttggaaactttgcggcaagtcattcaatttagcggcgtttctgacgttaaaatggaagaaggctcattgcgggtcgacgccaatatttcaattcggccagtgggtcaaactgaatacgggaccaagacggaattaaagaacatcaactcatttaactatttacgtaaaggtttggaatacgaagaaaagcgtcaagctcagatcctgttgtctggcggcacaattcgccaagaaacacgtggctataatgaaaatactggcgaaaccgtattacaacggattaaggaaggctctgacgattaccgttacttcccagaaccagatatcccaccaattcacattagcgatgactggatcgaagcggtacgacaatcaattcctgaaatgccagcagcacggcgacaacgttatgtcaacgaccttggtttaagtgccgcagatgcgactgttttgacgcaaagcttggaaatgtctgatttctttgaagcaacggttaaagctggcgctgatgcaaaattagcggctaactggttgcaaggcgaagttagtgcgtacttaaatgcagaaaagctagaattagcaggaactaaattaactgcagaaaatctggcaacaatgatcaatttaattactgacgggacaatttcctcgaaaattgccaagaaagtcttcaaagaaatcattactaatggaacggaacccaagcaatgggtcgaagcaaaaggcttagttcagttatctgatccagctaagttattgccgatcatcaccgaaattttggataataaccaacaatcgatcgatgacttcaaaaagggtaaagaccgtgccatcggcttcttggttggtcaaatcatgaaacaaacccgtggccaggctaatcctaaagtggttaatcaattattgatgaaggaattgaagcagcgttagataggttgaaactaagagcttaaacgtggttaaaaagaaaaagcttacacataacggaaggttccttacgttaagctaggctatgttccagtttttgaatgcttttttaccacgctctaaaaaggaggattctcatgcagcagcgggcgcgtattatttataatcctaaggctggtcatgaaggcttgaaacaaagtctagtcgatatttttgcgatttttgagcaagctggttatgaaacaagtgcttacgcaacgacgccagagccactttctgcgcaaaacgaagcaacccgcgcggcacaagccggcttcaatttagtagttgctgctggcggcgatgggacgatcaatcaggtcgtcaacggcttagctagtttgaaaaagcggcctaaaatggcgattattccggcagggacaactaacgactatgcgcgagcactaaaaattccgcgcgatgatcctgttgaagcggccaaaatcgttttgaagaaaaaaacaatcaaaatggatattggccgtgccgataaagaatatttcatgaatattgccggcgggggctttttaacggagcttacttatggtgtaccgtcagaaactaaatcaatctttggctatttagcgtacttactggaaggtgcgcggatgttaccgcagatcaagccggtaccaatgcatttagtttatgatgacggtgaattcaaaggcaatgcgtccatgtttttgctcggcttgactaattcaatcggtggttttgaaaaggtagcgccagacattacgttaggtgacggccgtttctcactgatcatcgtcaaaactgctaatttggctgaactagtacgcttgcttgcactagctatcaacggcaaacatttaaatgatccgcgtgtgatttatgttaaaacgcataagctagttgcgaaaacgactaacggcgcagaaatgaaaatcaatttagacggcgaatttggcggtaccgcaccaatgactttcgtcaatctaaagcagcatttagaaatttttgctgacgttgacgcaatgccggaaacagctttagcagcagagaatgatgctggtttacctgacgtaccagtgaaaccaaaaactgaagtaacacattaagcgtgtgtaaacttgctaaaaatgctgttctccgttagaatagagagcagtatttttttatgctcgtgttggcagttgaaacgtagttaaaaagcgctgtcgttagacttggcaaggttcaagtcgtcgtttttttgcgcctggctaggctagtgctcaaaatcggagcgctttttaaaagcactcttacaaggagaccaaaatgaaatttatcgcaccagtaacaaaaaatgaagaaatcaccgcaacaattattgacctgacttacgaggggatgggggttgctaaagtatccgactacccattgtttattgaagatgctttacctggtgaagaagtaaaattagttatcaccaaagtaggtaaaaattacggctatgcccgtgtaatggaacggcttaacgatagccctgatcgtgtggaattacctaataaaacgtacatgcaatctggtattgcgccattaggccatttaagttatgcagcacaattgaagtttaagcaacaacaattacgcaatgtgtaccaaaaaaatcatctcgatatcgacgttttaccaacaattgggatggctgatcctaaaggctaccgtaataaggcacagattcctgtccgccaagttaacggtcaactagaaactggcttttatcgcaaacgtagtcatcaattgattccactagaagatttctatattcaagaccctgaaatcgaccgtgcaatcattatcgtacgtgatcttttacgccagtaccacgtgcccgcttatgatgaagcccgtaatcgcggtatcatgcgccatatcatggttcggcgcggtcgtttcactcacgaaatgatgattgttttgatcacacggaccagagatattccacaattgcagaatattatcagtggtattgtaactaaattacctgaagttgttagtattatgcaaagcgttgtacctaagccaaccaatgtgatccttgggcgcacagttaagaaattatacggtaaaacgtatattcatgaccaaattttaggccatacgtttgacgtctccgctttgtcgttctttcaggttaacccattacagacagaaaagctttaccaaaccgccatcgacgcagcacatttaactggtaaagaaaccgtgatcgacgcttattctggtatcggcaccatttccttgtcattggctaaacacgcaaagtatgtctacggcgttgaagtaaccgaagctgcggttgctgatgctaaacgtaatgccaaacataacggcattcacaacgtgaaattccagcttggcttagccgaaaaagtcatgcaagaatggcgtgaagctggctttgaagctgacgtcttagttgtcgatccaccacgcaaaggcttggccagcacatttgtcgaagctgttggtgttatgaagcccaaacgaatcgtctacgttagctgcaacccagcaactctaggccgtgatattgccttactacaagaatttggttaccgcgctgaaaaaacgcaaccagtcgatatgttccccttaacgcaacacatcgaatctgtaacggcgttaacgctggcttaatttattctattcacaaagtaaatgatacttgaacaagctagtaaaaaagcgtctttcagttataaatcaggttttaaacttgatttgtagtcgaaggacgttttttagtccaacctggtaaaaataggttgccgcatccaattattcggataattacgctttaatttgaacggctgactgatggacaacagtttggaaaaacgtataattaagtcggataaagcgtaacaaacaaaattgctggtttcatccacgtagtgaaaaaatattagttttgttatcaggagatggatgattcaatggatgttaaagacgaatttaaccaaatcatgcaagaagcagcgcaggtatcaattgcaacgctgactgtcgacggccaagcaccagatgtcagaattgttttatttgtttatttaccagaaacacatcaactattattcatgtcaggtgctgattcaccaaaaatagcacaaatcgctgcccattcagctgcggcctttactacgcagtcagttagtgatcaaaagtatgcccgcgccaaacaagccaaggttcaaaaagtcacgccaactgaagcaatgaagacagcttattttgctaaattcccaactagcgctgcttacgctgcccacagtgaattcttcacagttgacttcaattcagcagacgttacagctgataatcagacggagacgataacgttttaatgccgctagctgaagtaaatatatatcgataaagaggagccccttgagattagacatcagtctaatttcaaagggcttttgctgtgattaaatttgggttaaattagaaatgaaggctgagattatgtctgatcgcttacagtgtaaatttacgatgaaaataagaattatgtatcgttagttttttagtctatttgtttaacaattccattaggaataaaaaattacgctaaatcatcttctggaaacgttgttattatgctaaactaaaggaaattacaaagatggagttgatagtatggggtatagaataggattagatgtgggtattacttcaaccgggtatgctgtcttaaaaacggataaagcaggaaatccatataaaattttaacactagattcagtgatttatccacgggctgaaaatcctaaaacaggtgcttcattagctgaaccgcggcggataaaacgaggattacggcgacgtactcgccgaaccaaatttcgaaagcaacgaacacaacaattatttgtacatagcggtttattatctaaggctgaaattgagcagatcttagagaacccgcaaacccatcattcagtttatgaactccgcgtggctggacttgatcgacgtttgactaacaatgaattattccgtgtgctttatttctttattggccaccgaggatttaaatcgaatcgtaagtctgagctcaacccagaaaatgaagccgataaaaagcaaatgggtcagttgcttaattcaattgaagctatcaaaaaagatatggctgaaaagggataccgtacggttggtgagttgtatgtaaaagattctaaatatacggatcacaaacgtaataaaggctataatgatggctatttaagtacgccaaatcggcaaatgttagttgatgaaattaagcagattttggataagcaacgtgaattgggtaatgaaaagttgactgatgagttttatgcaacttatttactgggtaatgaagaccatgctggtatttttcaagcacagcgggattttgatgaaggccctgggtctggtccttatgccggtgatcaaatcaaaaagatggttggaaaagatatttttgagccaactgaggatcgtgcggctaaagcaacctacactttccaatactttaacttgttacagaagatgactagtttaaattatcagaatacaactggcgataattggcatccattaaatggtcttgagcgacaagcaattattgatactgtttttgcaaaagcggagaaaccaactaaaacttataaaccgacagattttggcgaactacgtaagttattaaaattaccagatgacgctcgatttaatctggtcaattatggtagtttgcaaacgcaaaaggaaattgaaactgttgaaaagaaaacacggtttgttgatttcaaagcctatcatgatttggtgggggcattaccagaagaaatgtggcagaatcgccaactgttagaccacatcggaactgcgttgactttatattcaagtgataaacgacgtcagcgctattttgctgaggagttaaacttgcctaaagaactgattgacgttcttttgccgttaaattttgctaaatttggtcatttatcgattaaatcaatgcagaatattattccgtatctggaaatgggtcaggtttacagtgaagcaacaactaatgctggttatgatttccgcaaaaaggaaatttcaaaagacacgattcgtgaagaaattgctaatccagttgttcgcagagcggtaacaaaaactattaaagtagttgagcaaattattcgtcgttacggtaaaccagatggcattaatattgagttagcgcgtgaattaggtcgtaattttaaagaaagaggcgatatacaaaagcgccaagataagaatcgccaaactaatgataaaattgccgctgaattaactgaattgggtatgccagttaatggtcagaatattattcgctataaattacacaaggaacagaatggtattgatccttatactggcgatcagattccatttgcgagtgcgtttagcgccagttatgaggttgaccatattattccctacagtatcagttgggatgatagctataccaataaagtgcttactagtgaaaaatgtaatcgcgagaaaggtaatcggattccgatggcttatttagccaacaatgaaaagcggaccaatgcattgattaacgtggcggacaacgtgatccgtaattcgcgtaaacgacaaaagcttttgaagcaggagttaagtgccgaagagcaaaaagactggaagcaacggaatataaacgacacgcgttttattaccaaagtcctttataattatttccgacaggcagttgaatttaatcctgaattggataaaaaacaacgcgtcttgcctttaaatggtgaagttacatcgaagatccgtagtcgttggggcttccttaaagtacgtgaagatggcgatttacatcatgcagttgatgctgccgtaatcgcagcaattacgcctacttttatccagcaagtaactaaatatagccaacggcaagaagtcaaaaataatcgcgccttatggcatgagactgaaatcgataaatctgaatatagagcagaagagaatcgaatgaatgctaagttatttgataaaattttcaacggattcccattaccatggccagaattccgtgatgaattactagctcgtatctctgataatcccgcagaaatgatgaagagtaggagttggaatacgtatacaccagtcgaaattgctaaattaaagccagtatttgttgtccgcctagctaatcataaaatatcagggccagcacatttagatacgattcgcagtgccaaattatttgccgaaaaaggaatcatactgagccgcgttagcatcgccaaactgaaattaaataacaaaggtcagattgccactggggatggtgtttatgatcccgagaatagtaataatggcgataaggtggtttattcagcaatcaaaacggcattagaggctcataacggttctggtgaatcggcgttcccagagggctatttagagtatatggaccatggcactaagaaattagtgcgtaaagtccgagtggctaagaaatcttcattaccagtactgctaaagaataaagcagctgctgacaatggttcgatggtacgaattgatgtctttaatactggcaagaagtttgtgtttgtaccaatttacgttaaggacacggttgaccgggtattgccaagtagggcagttgttgcaaataaaccacattcatattggtatcaagttactgaagatgatcagttttgtttttctctgtatccaggagatatggtgcatattgaatctaagaaaggatttaaacctaaactttcaaacaaagaaagtgattctgatattatgccaattaagaatttttatggttattttgatagtgcggatatcgctactgcgagcatcaaggttcgttcacacgatagttcgtacacggcaaaaagtatcggcattgctgggctgttagcattcgaaaaataccaagtcgactactttggccgttatcataaagttcatgagaagaagcgtcagttattcgttaagcgagatgagtaattatggcctttcggaatttatacattcaaaatccagcacgcctgagtattgctaaaagtcagttagtaattcaacaggaagagcgctacaccgttccagtggaggatatttctagtattatgattgagcacaaacaatgtacgatcacagcgccagcactatcctttttggctgagcatcaagtagcggtgtttacgtgtgatcagaagcatctgccgtgtgcagttgttttaccactgggtcagtattatcgtaaattagaggcattagagtcccagttacatgtacggactaaaactaaagcgcgtttgtggcagaaactgatgaagcaaaagattgagaatcaggctaaagttttagagttaaatcactgtaaaaacattgccgagcttaactttttagcaacccaagttactgagggtgataaaacatttaaggaatcacgggcggcacggctttactttatgggactttttggtgataaatttaatcggcgaaatgaagatgttatgaatggtgctttaaactatggttacgcaattattcgcggtatcattgcacgtgatatttgtgcgtatggttttgagccagcatttggcgtatttcataaaaacgagctaaatccattcaatttagctgatgatttaattgagccgtttcgcgcgtacgttgatttatgggtttatgaacatcaagctgatttaaaggatggtttaacccctaagaataagcaggcgttgttccagctattatttacagaggttcgaattgataatgaattccattcgttgagtaatgcggttcataaatcagtctcatcgtacaccacttgttgtcgtaataactctgctgcgggattaaagttgccggaacttatcccgttagtggcgcacgagtatgagtagcaaatatatgcgtttattagttatgtttgatttaccagtagtaaaggcaaaagatcgccgtgcagccgcaaaattccggcagtatttattaggcgaaggctacgtaatgatgcaatattcagtttattatcgcatcgttaacggctatgatatgtcaaaaaaatacgagctgcggctagatgataatttgcccgaaaaagggtcagtgagattattggttataaccgagaaacaattcgatgaaatgcgtctgttagtgggcgatccgctgcctaacgaagaaaaagttgatagtggccagatgaccactttttagacaagcgaaagagcctgatatccgcgtgatatcaggctctttttgtgtactggatctattttagctgaaaactgaaggaatcaatagctaagactgtctcatagtcttagtaccgtagatctattttagctgaaaactgaaggaatcaatagcgtcttacaagcagacttatacgacaactgtgatctattttagctgaaaactgaaggaatcaatagcaatctgtacttgcgatgttagccactcatgatctattttagctgaaaactgaaggaatcaatagcgcgtctgagtgcgttaaaataggatatacagatctattttagctgaaaactgaaggaatcaatagcgactgataacggttataacggtaccacaacgatctattttagctgaaaactgaaggaatcaatagcgcattgtgacgtaagtatcacctgtcatggatctattttagctgaaaactgaaggaatcaatagcgaaaaaggccagtgattcatcgttgctggtgatctattttagctgaaaactgaaggaatcaatagctaaagtcgttacatcgacagaatgaagcagatctattttagctgaaaactgaaggaatcaatagcatcaactgcactgtcagctgtcgatcgtgcgatctattttagctgaaaactgaaggaatcaatagccacggtgaataaatattgtccttattttacgatctattttagctgaaaactgaaggaatcaatagcccattagctgcttgatcgcatctcccattggatctattttagctgaaaactgaaggaatcaatagcgtaaagcgtcctattaatctgtcgatattagatctattttagctgaaaactgaaggaatcaatagcggctgttaccaacatcaatcacaacttggggatctattttagctgaaaactgaaggaatcaatagcatgcttaatattggcttagggctaccgactgatctattttagctgaaaactgaaggaatcaatagcaataatctgcttaaccgcaggtacaccaatgatctattttagctgaaaactgaaggaatcaatagcgtgaaagcatgaactatagcgaaaaagtttgatctattttagctgaaaactgaaggaatcaatagcaggcttagtcaagcagttaaccggcggtgagatctattttagctgaaaactgaaggaatcaatagctataataagcgtgcaccgtttaccattagggatctattttagctgaaaactgaaggaatcaatagcaaatataatcatcatcagcgctgtcaactcgatctattttagctgaaaactgaaggaatcaatagctccttgacctgtaacaatgatatctagttggatctattttagctgaaaactgaaggaatcaatagcagacaaaccgcagattcaaagctttctagagatctattttagctgaaaactgaaggaatcaatagcatgccagacccacaatatcggtatttgattgatctattttagctgaaaactgaaggaatcaatagcgggacttattataaagaccctacagcggccgatctattttagctgaaaactgaaggaatcaatagcgcctatcatgattcagtaccagctattcgagatctattttagctgaaaactgaaggaatcaatagccggctgtcgctttattaatagatttctctcgatctattttagctgaaaactgaaggaatcaatagcttgcgttagcagccttttttactaatacaggatctattttagctgaaaactgaaggaatcaatagcccaatcagttgcgtgagaaccgagctctaggatctattttagctgaaaactgaaggaatcaatagccccagcaatgggcgttcttttcgcgtacatgatctattttagctgaaaactgaaggaatcaatagcagacggcatctatactgtcgatcacaaagagatctattttagctgaaaactgaaggaatcaatagcacagtagtttgggctatccagttatcataagatctattttagctgaaaactgaaggaatcaatagcctgcacacagttttagagttcgctttttgagatctattttagctgaaaactgaaggaatcaatagctatacgttatgctgggttgctgtccatgttgatctattttagctgaaaactgaaggaatcaatagcaggatgtcgttaaccaaaatctaaaaaaatgatctattttagctgaaaactgaaggaatcaatagcgatcacatgccaaacaatacttgcataagtgatctattttagctgaaaactgaaggaatcaatagctaatcagcccatgatgacagcagaaattgcgatctattttagctgaaaactgaaggaatcaatagcttcttgcagccagagatttaggtttttgttgatctattttagctgaaaactgaaggaatcaatagcattatccaataacagatatagaattcaatagatctattttagctgaaaactgaaggaatcaatagcaaactcttatctattgaatccggtaaaaaagatctattttagctgaaaactgaaggaatcaatagcgtgctgttgctgaatcagcaatatagaatagatctattttagctgaaaactgaaggaatcaatagcctggaatatccacgcttttctacaatgtctgatctattttagctgaaaactgaaggaatcaatagcttgtgagcgctgatccaagaagcaatgccggatctattttagctgaaaactgaaggaatcaatagcctatatgcaaacagaccagtatctgtatgatctattttagctgaaaactgaaggaatcaatagcgtagtatgtgaatggtgccaaatgttcgtggatctattttagctgaaaactgaaggaatcaatagctgatttctgcttaacacctgccgattgtgcgatctattttagctgaaaactgaaggaatcaatagccaacagcaaccggcacgtcatttgccttgagatctattttagctgaaaactgaaggaatcaatagcggcaagacgcatttaacattaggccacaaagatctattttagctgaaaactgaaggaatcaatagcccggtactgctgcagcgactagcacgtacagatctattttagctgaaaactgaaggaatcaatagcatcagtttgcagcttggcttcaacctgcttgatctattttagctgaaaactgaaggaatcaatagcgtcataattaggtggtgtattaaactcaaagatctattttagctgaaaactgaaggaatcaatagccgacatggataaagccaaggaacttatagcgatctattttagctgaaaactgaaggaatcaatagcgtatccactatctacatcaattctatcaatgatctattttagctgaaaactgaaggaatcaatagctgggcatgtgcgctatgacatggtcaattagatctattttagctgaaaactgaaggaatcaatagctggactgatgctggtatgacctatattaagatctattttagctgaaaactgaaggaatcaatagcgataaatcatttgttattgcccgaacgaccgatctattttagctgaaaactgaaggaatcaatagcccgcttaccgctcttatcatagtagtaaacgatctattttagctgaaaactgaaggaatcaatagcatcaacaacacaaacaacacaggaggctgagatctattttagctgaaaactgaaggaatcaatagctaagcggactgccgatgctgttagaggacagatctattttagctgaaaactgaaggaatcaatagctgatgaggaggattactactttgagtaaaggatctattttagctgaaaactgaaggaatcaatagcgctgtcactctcatattcatgaattgctttgatctattttagctgaaaactgaaggaatcaatagcatctgtaaactttttaggcacgatcaaattgatctattttagctgaaaactgaaggaatcaatagcatcatcatccagtgtgattttaggttcgatgatctattttagctgaaaactgaaggaatcaatagcctcgatcatcttagcctgctcaatcttcttgatctattttagctgaaaactgaaggaatcaatagctcggttaaggcattcaacacgctctgcgtagatctattttagctgaaaactgaaggaatcaatagcattgattatggtgatttatgtcggtttcatgatctattttagctgaaaactgaaggaatcaatagctctacgattgtctgagtgtgatatttttgcgatctattttagctgaaaactgaaggaatcaatagccttagttacgttatagtctggatactcaggatctattttagctgaaaactgaaggaatcaatagctggtgctactacaagttctgtcaaattattgatctattttagctgaaaactgaaggaatcaatagctgctggcactgaattagaagtgtatggatagatctattttagctgaaaactgaaggaatcaatagccgttgcagacgcaagtgatgagtatatctagatctattttagctgaaaactgaaggaatcaatagctggggatgtgcttttttatttagtattttggatctattttagctgaaaactgaaggaatcaatagcattattaccgcattaatcccgattttagaagatctattttagctgaaaactgaaggaatcaatagcatatccgttggctgactgtgattttccttagatctattttagctgaaaactgaaggaatcaatagcacatcaaaggtgtattcgtacatgattgatgatctattttagctgaaaactgaaggaatcaatagcctccttaactggtggcccttgattaccgttgatctattttagctgaaaactgaaggaatcaatagcatggatatcagcataaacgatatcaatattgatctattttagctgaaaactgaaggaatcaatagcatatggatacgttgaaaaagaaattatagagatctattttagctgaaaactgaaggaatcaatagcagcctaccatgttaaccgtggcctaaacgagatctattttagctgaaaactgaaggaatcaatagcagccgttggatcgccaccagcggcatagtggatctattttagctgaaaactgaaggaatcaatagcagctactatggttcttaccgtcataccttggatctattttagctgaaaactgaaggaatcaatagcgcagctaacagatgatttgacaccttacaagatctattttagctgaaaactgaaggaatcaatagcaccagcttagcaacagcgtacggggttggagatctattttagctgaaaactgaaggaatcaatagcccttaccgatataaggattaataaaatcatgatctattttagctgaaaactgaaggaatcaatagcctcacgaacaacaacctttggttcattcccgatctattttagctgaaaactgaaggaatcaatagcccacttgtcagctacctctacaacccgcttgatctattttagctgaaaactgaaggaatcaatagcgtccttttgttctagccaacggttaaaccagatctattttagctgaaaactgaaggaatcaatagcagtggtaatgccagcataccgatggatcgtgatctattttagctgaaaactgaaggaatcaatagcgactgtactcttatcaaaattagcagccacgatctattttagctgaaaactgaaggaatcaatagcatccacaaatgataatgtgccaatttgcgtgatctattttagctgaaaactgaaggaatcaatagcctgcgtttcgtcgtaacttaaaatcgtaaagatctattttagctgaaaactgaaggaatcaatagcctgggtattggagtttatgctaaatttcaagatctattttagctgaaaactgaaggaatcaatagccaagtccggtgtctactttattgaggggtggatctattttagctgaaaactgaaggaatcaatagcataaagagttcttcgaacaagaaccgccaagatctattttagctgaaaactgaaggaatcaatagcatatccagtggctttagagacaggctcggagatctattttagctgaaaactgaaggaatcaatagctaatcaagtggctgatctatctcgcaaactgatctattttagctgaaaactgaaggaatcaatagcagcagttgatgacactggcgcggctgcaaggatctattttagctgaaaactgaaggaatcaatagcgtgtttggcaccttgttgccagctgcatcagatctattttagctgaaaactgaaggaatcaatagctgtgcttgtaagttggttactcaaaagtgtgatctattttagctgaaaactgaaggaatcaattaaaccctaatttcccaatttaatagctaggggttatctttttacccagcgtaaaaatcgatgtgttatcatatgcatatagcttattttagcaaaataaatgcagatttacatactcctggagtgaataactgatgtcttatcaaacaaccctaagtacgcggccgtttatgtacatagaaacaaaaaaagtagcacagcggctcaaagacggccagtcgacagctgaagtgcggaccgccgcactgacacagaattttttgcagttaccatcgcgtgcccgacgatcagcggccattaatgtgattttaaaacgacttgctaatttggatgattatttgttgcgccaatttttaatggctgatcgggaaacgagtgatttgattttattgtacgcattgatgggcagtgaccagttatttcaggaatttatgcgtcaagtttatttaccgaaacttactgggttggacacgacattgactaaacaagatggactaaaatttttggcagaaaagtcgacgcaaagtacgaaagttgctcagtggacagttgctacgcaaaatcgcctagctgctgcttatctgcaggtcctacgtgattgtaatttattacgtgctgggcagttagttaaaggaatattggcgccagatgtagctcagtatttacggcagcatggtgaccagacactttatgaagttttaataggaagtcgggtatagcttgatggcacaacagactacggcgcagcgattaaatgcgttgcaagataaattactgacagaacagtttgtccataatactggtctgggtaatgaggttggattttatatttttgactacgctccacaagatgagctattagtgcgcgcgcgtgtaccggaaattcagcaatatactgaaaagcagctacaagtacgggtgcagaattttgatttatttaccattgtgctgcagttttttgaagcgcgtggttatatggagaagaattttcaaatggaggctaagcggggcagtactattttgtttgaacgaatgcaacgggcactgaaattggcgactaatcgtgatgagctagttagttatatcggcgctaattatgattccgacgcgattatttttttaactggtgttggcaaagcctatccaatcgtgcgctcacataacttactaaatagtttacagccgttaatcacgcaaatgccgttagtgttgttttatccggggacgtattcatataataaattaaaattatttgatcagctcagtgatgatcattattatcgtgcgtttcgcattgttggggattaggagtgcgatcatgattagcgtgaatggtgaagtagaaggagttttattaaatggaaattaaacagttgtttaaaaaaccaattgaacgggaaattgaaggggttattaaaattgggcagggcaatgccgaccacacctttcaagaattagatgagtatgtgatcactgatgaaatcgagcagcatttagcgactttttttgcggcttatgatcattcgctggcgcaatcgacagatcagattggggtttggatttctgggttcttcggttctgggaaatcacatttcttgaagattctaagttatttattacgtcaagatttacggattgaatcgaagcgaccactagacttttttactgataaattgactaataatcctaagttattagcacaaatgaaacaagcgctgactgtgcctaacgaggtggcgttatttaatattgaatcgaaatctgaagctgatagtatgcagcaaaagtcagcggtcgttaaggtgttcaataaagtgttcaacgaaatgcgcggtttttctggcgccaatgcgtggattgcggaaatggaagaaacgctggacagcaaaggccaatacgctgcgtttaaacaggccttcgcggaccaagctgatggcttgagctgggaagaaggccgtgatgaaatcttctataatgaggatgcggcgattacggcattatctgaagccacggacatgagtgaagaaagtgcacgccactttatggaagctggtgaatccagttataccattagtgatgaatcatttgctaaacgggtacaaaagtatgttgctcagcagccagctaactatcatttggtttttatggcggatgaaatgggccagtatatctctgaaaatgggcaactgatgcttgatctacaaatggttgttgaggatctagctcaatattgtcatggccaagtttgggttgttgtgactagtcagcaggatattgactcgttgaaaaaagggggcatg

SEQ ID NO: 380 - DNA, 23315 bp, synthetic construct
  misc_feature 1..23315: note = Synthetic
  source 1..23315: mol_type = other DNA
ttttatttggatggtcaaactccaaacctagaacgcttagctttaacgacacgctttaatgagggtgaaaaagatttatttttaatttccctacgagcaggcggtactggtttgaacttgactggtggcgatacggttattctctatgatagttggtggaatcccgcagttgaaagccaagcaacggaccgtgttcaccgttatggacaaaccaaaaaagtccaagtcattcgaatgatttgtaccggtactattgaagagcggattaatgaattacaagataaaaaacgcgaattgattgaccaagtgataacggaaggaaaacaatcctttacaagcttatccaaagaggaaattatcggtattttaggcgatgaataaaaagagattgggaacattctaagttctcaatcttttttttaataaaatcatcataacttgttaaaattagggctctagcgatgaaaaaactacttttttcatcagtaagtggttcaaaataattcctagtgatgaaatccgggcaaatttcatcaccagacaagaatataaagcttctaatgatgaaatcgatattgaatcaagcgagtatctcaaaaaatcatgatataatgagactatctttacccataccatccattaaaattgtaaatgagggaatagctatgaacaatataacaaaatttatactcaaactcttttcctcaccgaaaatagatatgcaggagaactatttacaagtccgacgcctgcaagagtttattcaacagccaccaaaagatagttatcgaatcttggatcgccaaatttatgcagaagatatgagtcatgaaattccagtccggattttccagcctaaagaaaaacgtagtgatgaaatcttacttttcttccatggcggtggttgggtactgggaagtattgatacatatacaagggactgcatccgaatggccgataagacaggtcgggccgttttagcagttgattattccaaagcaccagagcacccatttccagctggatttgatgattgttttcgtgtagcggaagtactcattaatcgtcccgaattaactgggcttcacaatgcagaaaacctcgtcttaattggcaattcagcaggcgcaaatttagcagcggcagtttccttacgattaagagatgaaggaaagcaattaccgcataagcaaattctgattaaccccgttacttattggaatcacgatgaacgttctccttttcaaagcgttgaagaaaatggctacgattacggactgactaataagaaattacgcgaatacatggaaatgtatgccccagatgaaaaagtacggcaatcaccttatgtctctcccataatggcagatgatttagccaaccaaccagcgacactcattattacgtcccagtttgatcctttaagagacgagggcgaagcttacgggcagctactatggcaagcaggtaatgaagttcgaatttttcaggcaaagaataccatccataactatctgtttggtcctatttctaccgactcagatgaaaaaacctaccgactaattgaagattatttggaaaaccgtttaaaaggaagtgatgcatatggagaagagaaaggctaccaaccgtaaaaaatgggtgcggcttgataatgcatccaacatcttccttgccgcaatgactaatcgggatagcaaagtctttcgattcagtgcggaactgacagataccgttgattcggatctattgcagcaagctttaaatgaagtttatagccaatacttgctctatcatagtgttttgcggcgcggtattttttggtattatttagaagaaagtgacttaaagccggttgttcaactggacaccaacccatcttgccaaccgctttatcattttgatcgacgtgaattattattccgagttgtctattggaagaagcgggtcagcttagaagttttccacgttttgtctgatggaaccggagctatgtggtttttccaagatttgttaaaagaatacctcttgttaaaaaatcctgaaataaatccagaagatttggaagtagccgaatataatcatgacacctcaagtgaagatagttttgcgagacattttcgggtcaaagatcagaaaaattttgggcaagcgacccaatcggccttacgcagttttagtaaggtcacggttaaagcaaaagaactgctttacccaacaggagatgctgatgaaaagaaggtttatcattacaaaggaacttacacacctgataatcgtccacgtattgtcgagatggaaatgtcggttaaagagatactaaaacgagctaaaaaggagcaagtttccttaactatttatttaacggctttgtttatggagtctgtccgtaaaagtgccaaggattttcacggcaacgagacaatggctgtttcagtcccggttaatttaaggcaattttatccttcgacttccgcgcgaaattttttcgcagtgacacgcttagaatatacttatcaactaggtaaagaaaattcagtgtcggatatttgtaaagaattgaaagagcaattaagtccacaattagaaaaaaaacatttagagaaaatcttgacgcgattaatttatttcgaatatcatccactagcacgcattattattcgccccttaaaagattttgggttaaaattaattaatcattcgacgaataaaaatttgacactggcaatatcaaatttaggcagggtgtcttttccaaaaccaattgaaagtttcatcaaccaagtctatttccatacgattgcggttcgtccgcaattttgtgcgattagtcatggcgaatattttaccatttcctttacgtcgccttatattgaaaccgatatattcaaagagttcgcacgctctttaacagaagatggcgtaccaatcacagtaacggttaacaaggttacggaagaggagttaggagggggttctcatgcgggagtgtgaaaattgccatgttgctgtcaaaggcaatcgggaaaaatgtcctttgtgtcagacaccgctagacacaaccaaaccccccgttgcgagttcctatccagatgttcccttacggtttaataaacaacggataacaaaatggttagccctcttatctttaatcattatatttacgacgctcgggttaggtttcatttggcgggggaatattcaatggattcaagcagcgttatttggcattatgtccatgtggctggttgttttaacaatcgtccgcaagcggcgtaatttagcaaaaagtcttttatatttactcatcattctgtcacttctgtgtgtgtaccttgactatttaattggttggacagggtggtcaacaacctttgcagtgccgattttttgcagttcagccgtcattggcatgtttgtatcgagtcgcttaatgagaatgaaattagctgattacattctctatttggctgcagcagccatgctaggattaattcccattctttttttaatttttggctgggtgagtacaactattccgagttggatatccattggttttagtagtctcttactattactgattttattctttaacggtagcgaaatagtacgtgagcttcaaaaacggatttttatatagaaaaaatgatagtagcaaaactataagggggaaatttgacagatgaaaaatgaagtagcagttataaccggagcaagttctggaattgggcgagagattgccaagaacctcagtaagcgtggttacaatcttgttcttgtagcacgacgtgaggaccgtttagaagagctggcaaaagaagttgacacccattgccagattattacagctgacttagccaacttaagtgaagcgcatggtttgcacgaaacggttcaagaccaaaacgtgacggtactagttaattgtgcaggatttgggcttttaggtgattttgcaaccacagaattagaccgtgaaatcgatatgatcaatcttaatatttctgctctccacatattaacgaaactctttttacaggactttatcgaaaaagataaagggcatatcctaaacgttgcttctatagcagggcttctcccagctggtccatatatggctacttactatgcaacaaaagcctatgtggtcagtttgacgcaagcaattaatcaagaattaaaaaatcgagatagccaagtgcgagcaagtgcgctttgcccgggaccggttgataccgagtttaatgaagtagcgggcgcttcctttgctctagcaagtatcactgctgaagagtgcgcgcgttatggtgttcgtaatttattcaataataaagttttaattattccaggagcgaacttaaaggttgcagctgttattgctaaaatagcaccaagaagcctccttgttaaaattgccggtcatcaacaaaaaagaaaacattagaatgagataaccacgtatatcaagaagccattccaggttaaatgggatggcttctttgcgtattcgaataaatggaaaactagtgtgcaatatgctataattaaaaatgttacttttagccaattagagcgatttcattagagtttgaaaggggatatacccatatgaataataaaacaattcaagaagaacaagcgcgtatggataaggtgattgctattatcacagcagaagcaaatcaattaaaatccgaatatacgacaaagcttgaaatccaaaagcaattattaaaacaatcctctgaaattcgaatcaataatagttccagtgaagccatgtgggaaacttccggcgaattaagagagtttgaacaaaacttaaccataaaaagtagcgaactgattcaagttcaaaatagaagaacggttttggaaaaaatgcaagaagatccttattttggacggattgattaccaaaatcttgcttattcagaagaagaacaaatttatgtgggaatcggctcactctttgaagacaatgagaattatattgtagactggcgcgcgcctatttctgcactttattacgaaggaaatgtgggcgataccgtcaaactacgtatcggcgaccgtttccaagcttttgaagtagatttaaaaagacagtttcgtgttcaaacaggtaaaatcgttggtatgattgatacggataacgttatgggtgatccttatcttatggaagtattagaagcaggatcatcgagtttaatgggacccgttgtggcaaccttacaaaaagaacaaaatcgtatcgtccgtgatacccaatcacgcaatgttttaatacaaggtgtggctggttcaggaaagaccgttgtgatgatgcagaagattgcctatcttctatatgcgtttcgggcccatctcaaaacagatgaaattttactcttttcgcctaaccgtattttccaagcttacatctcgcaagttttgccttcacttggcgaatgggatgtggaaggtaatacttttccacaatttattcaacaacgtgtcactaacttcaaaatgattcctaatgaactaggtgaaaacacggcgattcaaaacgttaaaggaagcagtgccttttatggtgctctagaacgatacagtcaacttcttaaaaataaatatttgttattccgaaatattatgcgtgaagatgatgtcttgatttccaaagaagaaattcaagaaatttatagttctatcgatagtaaaggaaccttggctgctaagttagaaattttgcgtgctagattgctccaacgcttagatgaattaagagtaagtagtttggatgccgattgggtggatgatgctcttcaacactacgataccgatagcttgcatcgtttcgaaagccaaacccataatattgttaaaatggaaagctatatgcgccaacaaattgtcagcgacgcctttaaaccgattgagcaccgtgtaaatagtcaagcccatatacgttatcgtgcgcagtacttgcactttttaaaatcaattcctaacttaatgaatttagaaaactttcatgtttctactgaggaatggtctgatcatattggcgatgtacgtgaagaaatgcgcaagaaccgattttattactatgatatgacgacttattacgcacttttactacaaatgaaggggatgatgactcaaaagtcataccaatacatttgtattgatgaagttcaagactttactccctttcaaatgcgtttacttaagaaattatatccacgtgcacgttatgtgatggcgggggatttaaatcaaaatatctggcagaaccgtttggattatgacgtattaaaaaatattttcgaagaagaagaaataaaacgtcacctcctcttaaccagttaccgttcaacaaaagaagtcatggcttttgcggaccagtttgccatcttggacgatcaagaaaccaaacctatccgttcgcgtgaaaaaccagaagttctctttcgtgaaagtcaaacttttacaaaagatttaaaagaacgactagatgaacgtgtagctagaggtgagcggattgctttcttgacgccaactagtgcaggaattgataaggtcgtcagctttttagatgagtggggtgtagattaccaaaccatttacaccgatgacaccatcatgaataaacaaattgttgccatgcctattggcttagcaaaaggtttggagtttgacgttgtcgttggagtaggaacagatgagatcattgcatctattgctagaagtaataaccaacaaatttggtatacaatttttagccgagctatgcaccaactgtatctgattacttcaaacaaagactcaaaactactacaagggattgaccctgaaacttacaaaatagtcgaataaaaaaacgggtaggaactcttgagagttttctacccgttttttttataaatgtgatgtttttgattccatttttagtaaaaaatctgtaaaaacccggcgtaagtattggataagcggaccaactagaaaacttgcaattactgtcataataccaaccgttgcgctaagtaaatagcccaatatcacactcgtgacatcagaaaagacccgaatgttgcggaaagagatggttcccttactacgctcttcaatgataagcggtaaggcgtcgtaaggcgcaacaccgcgttgtgtggcaatatataaagaagcgcctacgataacaatgagtaacccaatcaaaccaatcaataagcgcatcataaatgaaggctgctggatgagagaagctagtccactaaaagtgaaatctgctatatagccaaccaaaatcatattgaaaaaagtcccaataccaataaacttacggccaaatagaatcataattaagattccaatcgcattgaccactaacgaaacatgaccaaacgcaatattgaagaaataactgactcctaataataaagttgtgaaagggtcggttccaagatctgccatacgtaaagttccaatccccatcccaatcgcaatgcatccaagtagggtcatcacaatacgaaaacgattatttttattcaagatataagtccctcatactttctatatggtgattcattcattgtatggtgacgagcttgtcaggtcaaggtggaattgttaacgtaagacaactgtaataactactatttatgaatcataagctcgtatatttgtcttttttcccaaaagatttttcaacaggatatttctggttatttttttctaacttatttagaacaatattttccaaatttaatccaagtgagtcggccatcattatagagtaaatcaaaatatcagctaattcatcttgcatctcctgctttttttctgaaacctctaaatcagaaccactccattggaatatttcaagtagttcagctgcctctaaagagattgatatggccaaatctttagggttatgaaattgttcccagtttctatctttccggaatttttttactgcatctattatattgttgtccattagacttctcctattcttgtacatttttgtgatactattatagtaatatgaatatagagatttgaaaagcgatggtgacggtatgggaagtaaatttagtataaaaacttatgaatttaatgaaagtgatataaatactataaaccttgaaaaatataatgattttcctatagtatacattatctatacaacaactttaaaaaaaccactagcatatattggacaaacgattcatgctaaaagaagaatgaaagaacattattcaaataaaaaacgaaaaaagctagaagatatcatgatagtcgcacacgataaattcaatcagtctgcaacttataattttgaaacgaatttgattaattactttttggcagatggaaaattcatgcttcaaaataaaagtcagacgacaaatagtcaaatgcataattacttcgaaaaaaaatactataattttgaactttttggaaagttatggcagtttttaatggatgaaaaattagttaacgattcattagatgtcttaaaaaacaaggatgtttataagttatccccctttaaagaattatctcaagatcaactagaactcaaagacaatatcatagagatttgtaaagaaaaggtaaaacttgatagaaaattcgtttacttcatcgaaggtgaagcagggacaggtaaaagtgttgttttaagtgcaatttttaatgaaattcaagatttgaccaaagaaaattcttctgctttttataaaacaaacaattatttattagtaaatcataacgagatgttaaagacttatgaaaaaatatctgaatcattaccaaatttacataaaaaaaactttcaaaaacctactccctttataaatggagtagataacgaaaaactaaaagaagcagatattgttttggtagatgaagcgcacttgttattatccaagtcagataattttaataattttacatatgaaaatcaacttgaagaaatcattaaacgaagtaaggttactgtagttgtctttgataaaaaacaagttttaaagttaaaaagtcactgggataaaagtaagctagaaaaaattaaagaaaaatatgattttgctgaatttaaactaaccacacagtttcgagtacaagcaagtgatgaggtattagaatggatgaatgcttttgtagagaaaaagattctaccaataccaaaaactcaagataaattgacggataataaatttgaattaaaaatcttcaatgatgctcaaaaaatgtacgaagctataaaaaataaagatgataaagaagggttatcgcgggttgtttcaacatttgattatatacacaaaaaagatggtggagaatactttatagaagaaggtgattttaaattgccttggaatagaacaacatataaagaaacatgggcagaacaccctgataccattaatgaagttggctcaatttatacgattcaaggttttgatttaaattatgtgggcgtaatattaggtccatcagtatcatatgatgagcgtacaaatagattaacaattgatccatcgaaatatagagacacagaagcttttagaagtagggcagatttaaagaatagtgcgcaagctaatattaaagaagaaatcattttaaactctattaatattttgatgaagcgtggtgtacatgggttatatatttatgcgagtgatgaaaaactaaggaaaagattaaaagaattgtcaatattataatagatatttttcatcgaataaaacccttgcaatatatccgttcaatgttaaaataaagaagtaaagttttagccgactttgcaaggaacgtatagtaaagggcctgcttttgcaggcgcctgtaaagctctaaccccactttcttcggaaagtggggttatctttttgtctaatgatagaataaatccaaacactaaatttccttttaatagtaggtacttgtgatataattatattgtaggtatattttgtaaggaggtaggggaatgggatatcgtattggacttgatgtaggaatcgcttcggtcggttactccatattgaaaacggattcatatgggaatccatatcgcattgaatttcttaattctgttatttttgaaagagcagaacaaccaaaaacaggtgcttcattagcagcaccacggcgggaaaaaagaggcatgcggagattaaaccgccggaaacaatttagaaaacaccgtacaaagagattatttatcgaatctgggatgttaagcgaagatgaaattactcatatttttgaaaatacaggtgatcggagtatttatcaattacgaacagaagcgcttgaccacttgctgacgaaccaagagttgtttcggattctttatttttttgcgggtcatcgcggttttaaatccaaccgaaaatcagaattaactgaaaaagataacggcccggttatatctgctatcaaagatattcaaaaagatttgacagataaggactatcgtacattaggtgagtatctgtataaagatgataagtatgcagaacataaacgaaataaagagcacacgtacattgggacagctgaacgcaatatgctagttgaagagataaaccttctactaacaaagcaacaagaatttggaaatgaagccattactccagaatttattgaacggtttatcggtaatggagaaaaaccaggcatcttcaatcaacagcgcgactttgatgaaggtccaggtgcacagagtccttatgctggtgaccagatagagaaaatggtgggctactgtgcctttgaaccaaccgaaaagagagcagcaaaagcaagctatacttttcaatattttgatttattatcgcgagtaaataatttaaaagtacaagaaatggttggcgcagaatacaagcatttgaaccatgaagaaagacggctgattattgacaaagcatttgaaaaagaaaaaataacctatgctgacatcaaaaaaatgcttaatttaggagaacatgctcgtttcaatttattgaactatggcagtgtgaaagatgctaagaaaacagaaaagacaaactttattcatttgaaaagttatcatacgttaaagaaaacggttggtaaggaagaatttagtcattttacaaaaagccaaatagatgaaattgctgatattttaacaaaatattccagtgatcgaaaacgaattgagaaatttaaagaacgaaccacattaaccgatgaacaaattgataaactacttcctataacatttagtaaatttggaaatttatctgtaaaagccatgcagaatattattccctacttagaattaggggatatttacagtgaggctgcgacgaatgctggctatgacttccgccacaataagattgactgggaatacattgaagaaaatgtcatgaatcccgttgtaaaacgagctgtcagcaagacgataaaagttgttgatcagattattcgtaaatatggtgagccagatgcgattagtattgagcttgcacgagagttagggagaagttttgatgaccgcaaaaaaataacaaagcatcaagaggaaaatagagcacgaaatgaaaaagtcgctaaaagattagaagaattaggttttcctgtaaatggagagaacataacacgcttgaaactgtgggaagaacaaggaaactttgacccttatacagggatcgaaattccattggaacaagtttttacctatatgtatgatattgaccacatcatcccctacagtaaaagttttgatgatagctataccaataaggttttaacatctgctaagtgtaaccgtgaaaaaggaaatcggctaccgttggaatacttcggaaatgatccattacgtgtcgctgcattagagtccgttatgaaatcaatccataataaaagaaaaagagactttcttttaaagaaaaaattgagtaaagaagatatttcagaatggaaacaacgtaacctgcaagatacccaatatatatcaaaattacttagaggttactttgaccaaaatattacgttttctaaagaattagataaaaaacaacgtgttttcgttgcgaatgggatgatcacttcacgcttacgagcacggtggggattaaataaagtacgcgatgacggtgataaacatcatgcaatggatgctactatagtggcttgtattacaccaactcttacaagaatgttgactctctatagtcgtcgccaagaagtaaaagaaaatccaaatttatggaaagcatacgaagagtctgaagatccggaattggcaaaaatgacttctattaagagggaacagtatgagaaaatattctctaaatacttcccacaaccatggcctggatttagccaagaactaattatgagattaagtgacaatccaaaagaacttattaaagcacaaggattcgaagaagcccgaaaactttatacgcctgaagagattgaagagctcaaaccaatttttgtagtacgaatgccaaaacgtaagataagtggcgcagctcacttggacactattcgtagtgcaaaactattggatgaaggtaaaacaattagccgtgttccagtcaataaattgaaattagataaaaatgatgaaatagtgtccggaaacgctcatttttatcgatcaacagataaaggttggacgatagtttacgaagctctttacaaagagttagtgaaacacaacggtgacggggctaaggcttttccagagggagagttgcgttatagccataatgggaatgaacacgtcgttcgtaaggtgaaaatggttcaaaagtcaacgttacaagcgacgttaaatgatggaaagtcagttgcagataatggctcaatggttcggattgatgtattcaaaactcctaagaaatatgtatttgtacctatctatgtaaaagatactgtggaggaagagttgccgaataaatatgtggttccattgaaaccatatagcgagtggataaaagttgtagaagatgaatttctattttcattatacccacgtgatttagtacatatcaaaagtaaatcaggaataaaaccaatatttacgaatggaagaaaagcagaaaaaaatgaaattattcatgatttcttagggtattttgttggggctgatattcatactggcagtatacaagttatctcaaacgacaacgcttttaagactagaggtattggttttgctactttacctaaaattgataaatatacagttgattattttggtaattaccaaaaagtaactgaaaagaaacggcaaaccttcaatagaaagaagggataagacatggcatttcgtaatatttatattgagaacccagctcgtttgagtattcgaaataggcaattagtcattagtcaagaacaagagtacacaattcctgtatctgatattcaaagtgttattatcgataatctccaaacatcattgaccgcaccaactttatcttttctagctgaaaatcaagtggctctttttacttgtaatcggcaacatatgccttgtgctgtgctcttgccactcgggaatcattctagaaaattacaagctttaggtattcaattaggaactacaaaaagatttaaaaatagaatgtggcaaaaaattatcaaacaaaagatattaaaccaagcgacttgtctagattttaataaacgtggaaaaatagcagaattaaaacagttagccaactcggttactgaaggagacttcacatacaatgaatcacaagcagctcttatttattttcgagaactatttggagagggttttagtaggcgagaagacaacgtgcaaaacgcagcactaaattatggatatgcgatcgtcagaggagttatagcgcgggatatttgcgcgtatggatttgaacctgctttggggatattccatcgaaacgaattaaatgcttttaatttagcggatgatttaattgagccttaccgcccatacgtagatttatgggtttctaaaaatatctcagaggatgaacgctatcttttacctagccataaaagacagctcgtaagtctgttatttactgaagttacaatcgataatgaaattcatagtttaataaatgcggtaaagaagacagtgtcttcattttctagttgttgtcgaactaactctgtgaaatttttgaaacttccacaaattattccattaagacttcacgagtatgagtagatttatgagaatattagtaatgtttgatttaccggtagttgcaaaaaaagaacggagagcagcaacgaaatttagaaaaaatttattaaatgaagggtatgttatgatgcaatactcagtttattatcgagtttgtaatggctacgatatggcgaagaaacacattcatcagctcgaaagaatcgttccaaaaaaaggatccgttagggtgattctgttgacagagaaacaatttagtgacatgaaactactagtaggtgatcctctaccagttgaagtaaaggttaattccgataatttaaccattttttagacaataaaaaaccctgtttatccttgcggtaatagggtttttcgctgtgcctatttaatcttagccgattttgtaaggaacgtatagcataatgacattgaaaagtttatcacacaagatttaatcttagccgattttgtaaggaacgtatagccatacacatcatctgtaacgctagatggcaatttaatcttagccgattttgtaaggaacgtatagcgtttttgttctcggcacgcttttctaacgcatttaatcttagccgattttgtaaggaacgtatagcgttgactgggggtatgaacactggggatcaatttaatcttagccgattttgtaaggaacgtatagcttcttccagctccttaattaccatcacgaaatttaatcttagccgattttgtaaggaacgtatagccactttttacaaatgaacaacgtgctaatcatttaatcttagccgattttgtaaggaacgtatagctatagtaatgaatccaataggtgacttcatatttaatcttagccgattttgtaaggaacgtatagctcatgacgccaatcattcattagtcatgatatttaatcttagccgattttgtaaggaacgtatagcgtggatggatgtaggaatcttcccaaaagaatttaatcttagccgattttgtaaggaacgtatagctatttccgcttcttgtgacatcagcgttatatttaatcttagccgattttgtaaggaacgtatagcagaacaagcggtaactaaattcaaagatgaatttaatcttagccgattttgtaaggaacgtatagcatacgctactaaagagttgtggtgttcttgatttaatcttagccgattttgtaaggaacgtatagcggtacgccattttgtatgttttttaaccaatttaatcttagccgattttgtaaggaacgtatagcccttgctagatatagaaaaaaagaatttttatttaatcttagccgattttgtaaggaacgtatagccaagtattcagatgtgaagcagatagatagatttaatcttagccgattttgtaaggaacgtatagctacctgcagcaccatttaaaagcggcatcaatttaatcttagccgattttgtaaggaacgtatagcgtctaatactgttgttaaaacgattagggtatttaatcttagccgattttgtaaggaacgtatagcatcggttgataatttttcatcaattttgaaatttaatcttagccgattttgtaaggaacgtatagctcagactattaccaaaaatatatcacttatatttaatcttagccgattttgtaaggaacgtatagcatgatggcgtggcagatgatgtctccagcgatttaatcttagccgattttgtaaggaacgtatagcacgaagcagcactgcaatgggcattcaaagatttaatcttagccgattttgtaaggaacgtatagcaacggattatcgagtgcctcttgaatgctgatttaatcttagccgattttgtaaggaacgtatagcatccatatttgtcggaaccgtgtccatgaatttaatcttagccgattttgtaaggaacgtatagccccatattttcattgtattgaaacgtttcaatttaatcttagccgattttgtaaggaacgtatagccactgtttcgggtgggtttaatggcgaaccatttaatcttagccgattttgtaaggaacgtatagctattccaatgctgatagataattttaatttatttaatcttagccgattttgtaaggaacgtatagcacctctttttagttcttacagctttcattaatttaatcttagccgattttgtaaggaacgtatagcttgtacatacagatttttatgccattacatatttagtagtagagcattttgtaaagatctacaaaatcaaaaaagaaccgacttttaatacaagccgattcttctcgagaattatcctaaaaatgaaagttgttatttcttatatagtactcttcatctcatgggcatcaacaatttcaattccggccatggttccaagtccttgatagtaaaaatcagtttctttatcccatagttccatttgaaggttacccgaaacgccttctttaatggttttatgcataccggattcaactggtgcttgtagattaccaagatgttcaacggtaccaattagggtcacttcagcttgatcgttttctattttaacgtttacttggttttcagagggaaaagagatgctgagttttgagttgttataagtagcaaaacgatattcttttcctttaacatgaatatttgaaataaagccttgaagctccattcctaagaaaggaacatgggcaacggaaaagaaaacgctcgtatcttcttctctaaaatgattactttgaatccaaacatagtgtttaggaaatttacttccccaatctttttcgatataccctttgccacctgtaaaatcaaccatttttccattaatcaacaaactaccttgtaggctatgattcatactcgtgataccatggtagcattccattttaggaaaataagcaaatggccccataatgtttggctgtagtgcagaggttccaattggactaagggcaccgaaatggatggcaccggatatgcggtctgtttttgtttcaatattaacagataatttttcggtcgagaaaagattttcacccaccatgacttggaaagggtcatcttgccatttgaaagcatctttggttaatcgtaaataacccgtatgagtatcttctcgttcatcttcttgaacaataatgtattgaacgaaggaatggggttcgtctttatttaaactgatacctggaatgaaactgattgcggttttaccatctgcactgacctgtttatagtaccaaccttcaaaatattgttttttattgagattaccttgaaacaaatttggatttgttaatcggtttgccaatatatccaccagccttatgctatatttgtatccctactatgcacgaagaatatcccttttgtcaaagaatagttgcttattatactcgtattttgtgacatatgctacaattcaggtaaataaaagagggggaataacgatgccatttgtaagaatccagttaaaagaaggacggacaccacaacaaaaagaagaattagctaaggccattattgaaaaaatggaggaattaaagtttgcatctccggatgctattcgtgtgatctatgaggatatagcgccagaagatttttattctggtcaagagaaatgataaaaataaaaaggttgccttaaggcgcctttttttctttgtagttgacttaaaaaccagctgtggtaaaatgaaattgaataaacgactacaaatgtaatcgataaaagaaagggagtttaacatgaagaaagaatcagcagaacacgcagatcatcatgaacacgaccattcgcatcataaggagcacaaccatgatgaacatcatcacgacgagcatatgggcggagggcatgagcaccatcatcatggtgattttaagaaactattttttggttcattacccttgggtattcccattttaattttatcgcctttaatgggcattaccttgccatttcagtttacattcccatactcagatattttagtagcaattctatctacgattttactggcttatggcgggagaactttttatcaaggcgctattgcggagtttaaacagaaggcacctggtatgatggctttagtctctctaggtatttctgtttcttatatttacagtgtctacgctgttgtgacagcttatttaaccggtaatacaatgatggactttttctttgaattcgcatctttaatccttattatgttactcggacactggattgaaatgaaagcagtcggtgaagcaggggatgcgcaacaatcgcttgccgagctgattccaaaagaagctgcactggtcaaagaagatgattccattgaaaagcgtcccgtctctgaattaaaaaaaggggacttggtacgtgtccaagcgggcgagaatatccctgcagatgggaaagtcgttcgcggggaatcgcgagttaacgaagcacttctaacaggtgaatctaaattagttgagaaaaaagtagaagataaagtgattggtggttctacgaacggcgatgctgctctctttattgaagtcagtgaaacaggcgatcaatcctttatctcacaagttcaaaacctcattagagaagcacaaaatcaaccttctcatgcggaaaatctggctaataaagttgccgggtggctattttacattgctttaggagtttccattgttgcatttgtcgtttggctgatactagcggatcttcaaactgccgttcgcttcacggtgacaacgctagtcattgcttgtccgcatgccctcggtttagcgattcccttagtggtggctcgtagtaccagtttaggtgctagtcgtggtttactcgttaaagaccgggaagctttagaactagctaacaaagcagatatcatggtcttagataagaccggaacgctcacaacagggacctttgaagttttagacgtacaagtattaaatgaaagctatgcaaaagaaaaagtgattggattactagcggggattgaatctggatccagtcatccgattgcaaaatcaatcgttgcttactctaaagcagccgatgttaaaccagtcgcatttgattctgtttccattatttctggttctggtgttgaaggagagtcggcaggtaaacattatcaattattaagccaaaagagctatggaaaagatttaaatatagatattccaacaggcgctacagtcagtattctgattgaagaaggacaagccattggtatggtcgctttaggagatgaattaaaagcaaccagcgctgatttaatcaaaactttgaaagaacaaggaattgaggcactgatggcaaccggtgataacgaagcagcagcaaaagcaattgccgatgaactgggaatttcgtatgtatccaatcaatcacctcaagacaaatataaccttgtagaaaaattaaaaaaagaaggcaaaacagttattatggtaggggatggtgtcaacgatgcaccgccgttagccttagcagatgttggtctagcggtcggagcgggaacacaagttgcgattgattcagcagatgtggtcttgactcaatcagatccaggtgacattgctgcctttattgaactagctcaaaaaaccacacgtaaaatgaatgaaaaccttctatggggagcagggtacaacttcattgcgattccactggcagctggaattttagcgcctatcggatttacactttcacctgcagttggagcgattttaatgtcgctttcaacggtaattgtagcaataaatgccctgtttttaagattagatgataaaaaataaagtcgctaaacatcacaaaaaaatattttttgtgatgtttttgtatgtaagggtataatattgtaaaacaggaaaacggaggagaaagtatgtcttatggagtgattgcaacttggcggatggcttatcaagccgttcttaataatattggtacgttagctaacgaaagtgatgctgggcaaaccctcgaagcagttattagcgaagtcgaaaattttcccaattatatttcagtaggatatggtggcttacctaatcaagatggaaaggtacaactagacggtgcctttatggatggatccacttttgaaatcggtgcagtagcggggatggagaatgtgaaaaacccaatttctgttgcaaaaaaattaagttcagagcgctttaattcctttctagtcggaaaaggcgcacaaagttatgcttcactgaatggctttaagatagaaaccttattaacagaaggttcaaacgcgcgttatcaagaacgaattaatcatgttaaaacaggcgaaataacaccctatgatgggcatgacacaattggggtagttgtattagatccaaagggacacatggtagctggaacatctagcagtggcctctttatgaagaaggacggtcgcatcggcgattctgctctgccagggtctggcttctatgtagatagtgatagtggcggtgctactgccacgggacttggggaagatttaatgaaaggaatcctaagttatgagattgttaggaaaatggaagcaggacttctaccaatggaagcagctcagcaaacattgactgattttgaaagaaaattactgaaaaaagctggcaaagtaggagccatgtctttaatttgtatgaataaaaacggtgagtggggagttgcgactaatgttgattttacctttgtagttgcgaccgaaaaacaaaaaccaactatttatatagctaagcaaaatgatgctgggcaaacaaaagtaatagaaccaagccaacagtgggtagatgattttctcttacatcaaaagaatcgactcgagtaaaacaaaaaaaccaaagcacgatctgctttggtttttttgtttataaaatgttatctggatcagcgatggtttcaattgttgtatgcgtaacgtttaatggtataaccaagctacgaattttttcctttaatttttcccgtccatcattcgaaaaattatcggtactgattgtaacagacatggcatgttcttcaccatcaatagaccaaatatgtaaatgagcgagggaatggacacccgaaatatttaaaatttcttctctaatagcttctatatcaatctcgcttggaacaacttctaaaaagatttgagcagtttctttaaaaaggggccatgcttgccagataataaatgcagcaattataagtgataaaataggatctaatatataccactctgtatatttcaccacaatactaacaattaaaacaccaatccaacctaaaacgtcttctaataggtgcaaattaagcatcgattcattagcagaagatcctctattcatcagccaagcagaatatccgtttgccacaattgcaaaaattgctaaccaaaacattccttggtaattaacaggttgagggtcaaataaaataggaatcgtattggcaattaaaaagagtgacccggttagcaaaataccaccggttactaaagcgcccaaaagagaaaagcgttgatgaccaaaactatatttagcatcggcttgacgtgtagatattttttggaaaaaccaagccaaaccgattgaaatggcgtcacccaaatcgtgaacggcatcagttaaaatggcagcactattaaatagaacaccaaagaagaattctaaaatcgaaaagaaaagattaataataaaaacaattttcatattctttgctgctttgtcactagaagaaaaatcaacatcttgatggtggctatgactgtgaccactttcatgttgatgcgagtgactatcctcttgctcactattatcttctgcttcaataataattttttcaaaagcagcgatacggtttagcttattgatatcgaggtcagaaggaaaagatagagttcgatgtggataatcgattctgattgaatcggtattgatggcgcgattaaatttctcttcaattgcttttgcgcgtttttcactgtgaatgccacgaatacggtaatttttcatcaataaaactcctttcaaatggttgcatacatgattaattgttcatgtgtatgataccataaatgaaagtattttaaaatttaattgaacatagtatagtaagagggaggtgaggatatgttaaaagaagcatgtgtcgaaaactttacaaaagttccaagtgtcatccaaagaagcgcacaacgcattgagttatgtgataatttagcagtgggtgggacaacaccgagcgtaggcgtgatgaaaaaagcaattaactattgccatgaaaaagaagtttcagtggcagtgatgcttcgcccacgcggcggaaattttgtttatactcctgatgaaaaaaagataatggttgaagatttaaaaacgattttaaatgcaaatgcagatgccgttgttatcggtgccttaacagatgacaatcagctagatgaagcatttttaatagaaatagccaaacaagtaaaagaaagacaacgagaacttgtttttcatatggcttttgatgaaattccagcggataagcagaaaagagcccttcatcgcttagaagagattggtttcgatcgtattttgacacacggagggccaatgagtcagtctatctttgaaacagttgaaaacttaaaaaaactgatggagtggcgtcagagtataacgattttaccagggggcgggattacaaaagataatcttggggctttacaagaaaaactatctttccaagaagttcatggaactaaaatcgtctaatcagatttgaaatgtacattcttacagatacctgttacaatggttaagatgaaaagtgaatagccttgttaggtgaggttactgtactagagatacgctgctgcccagaaatgtccaaagacgccaacgggtcaacaggaatttccgaattaaggggattcttaatgtagctgggagtccctatgctgtacagagctgaaactcaatgaagaggtgcgcattttaagataaacaaatttggggcatgctctttagagcgtgcttttttgtttgatatttcagggggtggttgatgtggacccgagtcctcatttgtttacaaactcaaacaggtacgtgt

SEQ ID NO: 381 - DNA, 23309 bp, synthetic construct
  source 1..23309: mol_type = other DNA
  misc_feature 1..23309: note = Synthetic
tttttattttagattcaggctattttttacaaagtaggatagaaacaaaaaaagtatcaggaaaaattcccgatactaatcgtcaatagacaccaaacaaaacactcaacccatcttattccctcacttgaacaaaagttcttctataaaagcacatagaaatggagtacaataaaataagctaacacatgttgttagtgactattggcaacttgtctgggcagtttgtgctgtctctacaaggctttgaaagtttggttcccgccaaacttcaaagtgccaatttttttatttatataaagtttttttgattctatcctacttgcgtctattataaagaaacacgagtaatttttcaacctaaaatagaaaataatcaaagaattaataaataacctattggaactcggatcactatccacgatagcaaacagaatggtttggaaatgaaaccgcattatcgtggcaatgacgataatgaatccgaagaggaaaatgattcgaattacttttttgaataaaaataaatcctagtggacactcatgctaaaattacgatagatcataaagtaaggttagaaaaaagaaaacacaatccttagcaaacgaataaagaaagataatgcctactttatttacaccaaaagtaaattttcaaaaactaccaaatcaacaaactatcctgttttacttttacacttcaaactcaaccaaattagaaatatttttgagttacataaacgagaaacaattgtctcgttaactattaaaatatcgtagaagggctttacaacgaaaatagtctaattatttattaaaaaaagaaaaagcttattaactataacatttgaataaaataggaataatcatgtgtttctgctagtttggcgcttgtaatttagacattaaactttatctatagctataattttagctgttattttaactgttgttattttaatttaattctaatgttagcgttttttttatgtgctaaactgataaattaaaaaggaggaagcaatatgaaaaaatggattgtaacaagtttggtttgtttagtaacgcttttactaggaggtacacaaacgcaagcagcaactgaaggggagtcagttccagatgctatattaggggaagaaatttatagtattgaagaaccaacatggttatttaaggcaggaactagcaaaggaaaataccatgaccgacaagatttaggcgtgatattagaaccgaatacaacaattaaaattagacaagaaaatccaaacttcaaaggagatgtgactttaagattattaacaaatgattctaaaacagaaaagtcttcaaaaataggaacggaatgggtatcagtcaagacagatgctagtgcggtaccatttattgaaacgccttatggggaaaataatgcaacggttgaatatgaaataacaggtaaatttaagatgttgtctgtctttaatcaaaaaacaacagaaaaagaattttttgaagagtgggatgctgaagatggagaatttgctttaatacaaagtaaaagttttcaattatttattccaaaattggataaagaagccgttcgtcaattaaaagattttacatcaattaatgaattagttacgtattatgaagaaatatttacacattacaataaaatgcttgggttagatcccaaagatacagaaacagataaacttaaccaaaatcgctattttatgaaagcggataaaaatggagctggcggagcatactatagtagtaattggactgcaagtacgtcaaattctgtttcaatgtggctgaaaaaaaacagctggggtgcacttcatgaaatcggacatggttatcaagctgggtttgatgggaaagggatgtatactggagaagtttcaaataatttatatgcggctgattttcaatacagtcaatatggaaaagaagccgataaaaaaggctggatgtttgaaggtggcaaagagattgtagaaagaaacctttatcaagcaatgattaaagacggtaaaagttattcatcaacagaaaaccatcgttttcgcttgattttattagccatgatgaagcaaaaagcaggaaatgatgcttttataaaaatgaatcaagaatatcgaagattggcaagtgaagctgattttaaatcagctaattacaaattacctgatttaatgaataaatattatggtgaagtaagtggatatgactttacaccagtatttaataaatggcaagttgcaactgaagaaacccaagcaatggaaaatcgtaaaaaagagtaccaagcgacggcctcacttgcagatattgtaccagagtcacaattagttgcagcaagagctctagttgatccagaaattttaatcaattcaaattttgaaatggtagataatcaagacattgcgccgttaggattaaaaggaacggttcacttaacaatagatatacctgatatagcagaacttaagaatcaatcgcttttaataaaagaaggttcaaaaattgttaaagaaattaagctaaatagtaaagaaataacgattgaaagtattccaaacggcgtttatacaatgatttttcaaaacagcgagcagcaaaaataccaaatggatcaaccctatttgttcgttaaagaaaatcaaaatgagttaacaattaaatttaataaatatagagaaatcaaaacaagtaatctagtgaatcaatcaattcaatttttaggtttaaatgatcgcaaatttgctgaattatcaacaaatctaagagagcaacaagcagctttaactatgttatctgccaatccacatagttattatagtggaaaaaaatatgtagcaattgaagtacgcgatacgaaggatcaagttgtttatactaaagaaatacaaggaaccaaagctagtgtaggaacagaaataattccttttaaaatagggtataaattatcaattttccacgatgagactaaaaatcgtttgaagagtaatgaagaaattttagatttatctaaaaaagaaaataattttactatgactcaatatggattagacaataagcaactagactataatccagaaaataggtttaaagacaaagttttcgatatattggaagaaatcactaaagaagaagatagtaatggtgacgtagttgtcaatgaggagcttcttttaaagatgaaagatgatttatggtttgcgatgtattcattttcagaaccaaatcgcacttattttttaaatgcgtacaaagattttcttaagtaaaaaataatttaaaaatactttctacattaggagacaactgtcttcactaagtagaaagtattttttataggtaaatgaaaatagcgattgttactcttaaaacgcaaccaatacataaaaaagaacatgattacgagcaactttcactaaaaatgtagcactatttaactactcctaacgataccgttttcgaagcaagactaaattattaatcgtaaacaataaaatccctaaccaaatacagccaaaggctaataattgtggacccgcaaacgtttcattaaatagaaagaccgctgaaatcaacatcagtgttgggccaatatattgtaaaaaaccaagcaaaatataagagatatttttagcagcctcagcaaataaaaataagggaatcgccgtcacgacaccagcaccgattgctaataaattgattgaaggggagtaactcataaaaccagctggtgcaaaaaagcacaggtaaatcatcgcaataggagccataatactagtctccaaagttaaacctgtcaaagaacttacagaggcctgctttttgattaacccatacagactaaaagtagtcgccatggctaaagcggcccaaggaatggcgccagtttgaatggccagtccaaccacaccaatcgtagctaacacgcaagccactttttcaactcgacttaaacgctcctttaaaaagagagtcgcaatcaagatatttgctaaaggattaatataataacctagactggcttcaacaacattgccactcgtgacagtaaaaataaaaataaaccaattagccgtaattaataatgctgctaaaataatggcacgacgtcttttggtatccttcataaccgttaaggcttcttctttaaaactacgccattttctagttacgagtaagaccactaacataaaaacaaaagaccaaataatacgataagataaaaccgataaaggtgttacactacctaaagctttccaatataatggcaagacaccccatattagataagctccaataccagatagcaagccttttttttcattttgttcagaatgattgttcatttacaaaccccctttttaaatagtatacaggaagatgttcaaatttctttctttttttgaaaattgttgtcactaaaaataaaaaaactagtcaccgaagcgactaggctttatccttacacaaagttcttttcttgttcactgttagcctgacgataaatagctaagcaaaaaaacaaactactaaagccaactaagattgcaatattcagcagactgtcccttaacaagccgctactttgaatccttttaataccatcaatcaaccaaaattgggggaaaaggtgagcgactttttgcataaagcgaggcatcaattcaatcggaacaaacatcccggccaacatactactgccagtgaaaataaacatcttcatagagttcatcacacggtaactggtactataagaaaaaatgactaaggttaaactaaccgcaaccaatccaaataaactcagcatcaaaaataaaacaaaataagaaacaccaggatcaatctgtaccaaaaatttcatcacaaacaacgtcagaaaaatttgtccttcaatcaataagaaatttgcaataatcgtacttaaactatacgtactacttttaatcggcgtacttaacaaacgataaaacgttttttcttctttttctttagccataaaatcactcatattcccagcagaagaaagtaagaaaaaggttaaaacgcctaacatagccgtactaagcagttgtcctgtttgtttcgtagttgaaagctttttggcagttacaggatacgcatttttttggtagtccgctagtaaggagttaaaatcagcaccctgttgactagcagcaattaatggaatcaagtgatttaagtgggtcgttaattctcttttaagcacagtattaacgacatctccttgaatcgagctaatctcaaggtcattaatttttccttttgctaaagaagcttcaaagccatttttaaagagaattaacgccgtatttttattttcaacaatagactgttctgcctcacgttttgtttgatacaccgtgatttttttaccactatccttcatccattccattacttgcttgccagcaggagtatcttcttgataaataacaccataagcggccggcaccgtttccccactagaaatagagtttaaaacaagtacaaatagaatcgaagctagcggaaatactacataggtcactaattttcgtttattcgcaaaagcgtttttaaagtgatgagcaattaaccaaaccaattgtttcatctatagcacctccctttttctagtcaatagtccgtagccaaaaatacatccaaagctaatcagaagtaacacactagcaggaagcagaagggcgctaacgttatcttgataaaccgcttgtttaaccactgttgaaatgtaaccaacaggagaaaggtttttccacgtatgagtgtcagaaatcgggaagtacgcaccaccaatagctgaaaaaatagtgataacaatcgaaaatagactagctaaggcacgagaatttccctttgtaatcccatcaaacaataaaccaagtgagactgcaccaatcatttccagcaagaaaagaccatagacagccaacccataaggcccccaattcatatcaaaaacaaagcgactgtaaagcattgtaattgctagaaagagggcttgaagtgaaatacagccaattaattttccagcaaataagtgagctttagtaataggggtcatcaaaatccgactcaacgtatgcgaacgtttttcagaacttaaaatcgacgagccataaagcaatccataaagcatcatcattgcaataaccgcaatggaataatattgaatagaagtttccgctttttttccagcaatccctgttgtagcaatcgtaacagtggaggattgtggaatagtaggggaggatgcagccttttctggcgttagctggtttagtgtcgccatcaattgaaattcaccactaaatccattcaaataaccttcaatgacagatttagaaaaatcacttaacgtatccgcataataaagaattaagccttgtttcccaacgtcaacaacagcagttaactccgtttcttgaactttcttttttccatcagctaaagacgaaaccttttgaaaagcaaaatgagctgtttcaacgtcctttctaaacgcagtaaaaggttcttgaagctgagcttctgtaatcgtgtaaccaattttaatgtcttctacttgaactttctgatcaaaactaccacctaaggcaagtcctaaaacggttattaaaaaaataggcaaagcgagcatatagacaatcgcacttttctcacgtagcgttaagttgatttcagctaacgcaatcgtaaaaatagacattttcaattcctcctttcaataaaatatttagtctcgtaacgttcgacccgttagtgttaaaaagacagtttctaaattaattttttgagcatcaacgcttttaatttcaatagtttgctccattaagtaaattaaaataacgtttaaattcgtaacttcaattgcagaggttatctcaataaagtcaccggttctttcaacatgcttaacgccgcgaattaaagccaaatcacttagttcgactccttgatcttgtccaatttcaatcctaattttatgaacatccgttaccatactcttaagggcttctttactcccttcagcaatgaccttgccgtggtcaataatcgcaatcgttgtacaaatttcttctatttcttccatataatgacttgtataaatcaccgtagttccttgttgatttaattttttgatggattccagaatgtagtttcttgattgaggatcaattccgacagtcggttcatccataataacaagttgaggttcatgggcaatcgcacaggcaatatttaaacgacgtttcatgcccccagaaaaagaggcaggtttatcattcatatgttccgttaaccctacaaaagccagcgcctttagaactttatcttttaaatcagcgccacgaaaaccatacaatccagcaaaaaaatgaacattttcataagcagtcaattcatcataaaccgcaatatcttgcggaaccaagccaatattttttctgatatcgtcctttttttgtcccgtttgttcatgacctaaaatcgtcatactgccttttgatttctgtaataatccacagatcatatgaatcgtcgtactttttcctgcgccatttggccccaatagaccaaaaatttcccctgtttcaatcgtcaatgagagattatccacagccagatgttgcccaaattgttttgataaatctttgataacgatacaattcatttcaatccgctcccttaccgttgtgatagctctatcatagcaaaaaaaaagaccgttgcttagtgcaatcagtcatcttttagatatgagaattctcatgtgttgacaatggaatcagtgtagtgaccgtaaaatgaggatgtcccacgactaaaagcgttccgccaagttgggcagttctttcttccataccagtcaaacccaaacttgcttgaaaatctttcgttccaatcccattgtccttaatctctaaacggacaaatttatggtaaacagccaattccacttcaatccgggaagcttgtgcatattttaaacagtttgttaaagcttcttttaaattttgagaaaaaacgtgccacatgacaggcgaaatagccgtcaaatcaccagaaaattgaagagacgtttgaatcgcataatctgttgaaaaagcaattaaatctccttttaaacgctgaatacctaaactttcttgtggcggtttcaactgtttcaaaaccaaccgaatttgctcaacgccgtcctttgtaatggcaatagcattattcaataaatgttcagattgattggggttcccccgcattgtttttttcgcagcctccatttgaatcaaagctcccgtcagagaatggccaatttcatcatgaaataaatgggctaactgattatgtgtttctaattgaagcaattgctgttgttgctgagatacgtgctgttctttccgttgagtggcttgcttttgattaagctgataatcacgtaattggagggttaacgtttgaatgttctcttccaaatataagacaaagaaagtcaataaactgactaaactataacttgcaatcaacaagaaggaatctttaaaaataaaaaaagggacacctactaagcaaaatgttagccagggaacacgatcaaataaagcaaaatcaacccaataaccacctagtgtcatcggtactaaataataaaaaagctgagaacaaaaagtaccaaaaacaactaaacttacaagtaacccaagcgctactaattgttgctgtttttttgttttgcagctgtaaaaaagcaaactaattgaaaaataaagtaagcaccctaataaaaagaagccaaattgttgaaagtgttgcatttcttgaaaagcccctaaagtaaaaagtaaaagcaactgaaaaatcaatttatgattcaaaaccatgtcattcaccaatcttcccagttaaaaaataaatcgcaatctgtgtccgatgggccaaccccgttttgctaagaatcgttgaaatataattggcaacagttccatcagaaataaacaaaactttaccgatttccttattagacaagcctttggcaatacttgccataatgtcaacttctcgactagtaaacgggctcaagtcaatcgtaggcgacaacgcctcattctgatttgtttttaattgcagcctaaatttttcaaaaatcgtttcttgcaagacatgctggttcaatgcaacactccgaatggtttgagcaatcacatcaggatcattatttttaagtaaataaccctttgcgccattttccaaagcttccgatatgtaatcatcgtcatcaaaagtcgttaatatcaatacctttgtctgcgtttgttgaacaattttctgtgtagctgccacaccatccataataggcatccgaacatccattaacacaacatcaattggcgtttccaagcaataattaagggcttcttgcccgttagcaacggtaccaaccacttcaatatcctcataagaattcaatacaatcgccattccacctgtaataaagacattgtcatctgcaattaaaatccgaatcattccatccacctctttgacttttattatacggagagttgaattgatttgcacgttaaattaaacaactagtaaaaaatgtctttaataaagtttaacactttattaaaagtattctacatttaatgtaaactaaacgaaatgaaagtctaaatccaaaatataaatcggttgtttattataaatatttttataataaaaacggattatttttaataagtgttgcatttaatgctaacttacagtataatgaatttaagatttatagctgactctgtaaggaaattatagtaaagagcacgttttacgtgcttctgtaaagctctaaccccccacttttttattaaggtggggggttatctttttttatataaataagtcttttatcgtatgttgttatggtataattcaaatagataatttttttaaggagtgaaacaaagtgggatatagaattggattagatattggaattacctcagttggatacgctattttaaaaacagatgaaaaagggtctccctataaaattgaacatttaacatctgtcatttttccaattgcagaaaatccaaaagatggaaaatcattagcgatgccaagaagagagcaacgaggagcaagaagaagaaacagacgaacaaaatttagaaaacaccgtacaaaaatgttatttgttagaagtgaattattaacaatcaaacaaatcgaagcaatttattcagaaaaacaaaagttgtcaagcatttatgaattgcgaacaaaagcactaaatgagcgacttacaaatgaagaactatttcgtattttatactttttttccggtcatcgaggctttaaatcaaatcgaaaatcagaacttacagaaaaagatatgggacctgttttaacagcaattaaagatatcgaagaaaagctggctgatggcacataccgaactttaggcgagtatatggagctagacgaaaaataccaagaacataaacgtaacaaggacggtattgatcgttatttaggaactgcaaaacgttcattgatagaagatgaaatcaaacaaataattattgcacagcaacaattcggaaatacaaaattaacttctgggtttcaagttgcctttattggagacgaagaacaaacgggtattttcaatgaccagcgagaatttgaagatgggccaggcaaacaaagtccttatgcaggcaatcaaattgaaaaaatgattggagcctgtacctttgaagaaaatgaaaaacgagctccaaaagcgagttacacattccaatattttgattttttatgtaaattaaataatttgaaatatcgtgaaactattggtggagagtatcgctttttatcactagaacaaaagaatgtgcttaaagaaaaagtgttaacgactcaaaaaataacttttagcggtgtgaaaaaattattagatttaccagaacatgcccaatttaatttagttaattatggaacgaaatcaacagtaaaagagacggaaacaaagagtgttttttacgctatgatttcttatcacaaactaaaaaaagcgattccagcacctattttttcaaatttgagtacagcagaattagatgaaatcggcagaatcctaactctttattcaagtgataaaggtcggaaaaatgaattttatagtcgattagctatacctgaagaagttgtcgaagccttattgccaatcaattttagcaaatttggtaatttatcattaaaagcaatgcgcaagatcattccgtatttagaaatgggtctcgtctattcagaagcagcaacacaggcaggttatgattttagacataagaaaattgatcaagcctacattcatgaaaatgtcaccaatccagttgtaaagcgagcagcatctcaaacaattaaaatcgtaaataacattatcagaaaatacggggaaccagatggtattaatatcgaacttgctagggaactaagcaagaatttttcagaacgtaaaaagacagtcaaataccaagaagaaaatcgcgcgagaaacgaacgaatcgctgataaattaagagaatgtgaacttcctgtcaatggtgcaaatattacacgtttaaaactctttgaagaacaaggcaaatttgatccgtatacagggcttaaaattccttttgatcgagccttttctgaagagtacgaggttgatcatatcatcccatatagcaaaacattagatgacagttatggaaataaaattttagtcagcgctaaagcaaaccaagaaaaaggcaatcgaattccaatggaatatttgcaaggaaaaccagaacgaatcaaaaaattagaatcaattacagcaacgattaagaatccaaaaaaatgcgaaaaattattaaaacaacaattaacaaaagaagatgtagatggttggaaaactagaaacttaaatgatacacgctatatatcgtctttactacacgattactttaaccaaaatatttcatttgcaaaacttgaaagtgaaaaaaagaaacgtgtcatagcagttaatggtgccatcacatcaaaattaagagcaagatggggatttaataaaattagagaaaacggtgatgaacaccatgccttggatgcactgattgttgcttgtgtgactgataaatatattaaagaaattacaagtttcagtaaaagaaaagaagttcgtttcaatgaaaatctttggaaaagagaaaaaacaccacaagaaattgagcaagaagtcgttcatttcaaaaaagactacgatcgtatttttaaccaagcctttccattaccttggactaatttcagagaagaagttagctgtcgcatgtcagaaaatcctgcagaattaatgaaaaatcacacatgggagacatatacagatgacgaaattgctgcactacgccccattttcatcgtgagaatgcctaatatgaaaacttccggaccagctcatcaagaaacaattagaagtggaaaactcgaagaaaaaggactgaatattagtcgagtttctattgaaaaattaaaacttgataaagaaggaacaattaaatctggtaatgctcagttttataaagattcaggtaacggttggcagttgctacatgataaattaaaagtagccctagaaaaacacgatggcgatggtagtaaagcttttccagatggtgtattcaaatatcaatatttagataaagagcatacggttcgaaaagttcgtttagtggcaaaatcaacattacaaacatcattaaatgaaaaaaaatcagttgctgacaatggttcaatgatccgaattgatgtattcagaaacgaacaagggaaatatcaatttgtgccaatttatgcaaaggatagggtggctaaaaaattacctaatcaggctgtggcagttggaaaaatagcaaaagagtggccgcttattgaagaaagtgattttaaattttcactttattcaaatgacttgattcgagttaaacacaaaaaaggtgtcaaacatgtctcaaaggatggaaataaggaagaaaaaagtaaaacagatttctttggttactatacaggagcagatattgctacagcgagtatttctggaattagtccaaataatttttttgagtttagaagtatgggattagcaactttaatcagtattgaaaaatataaagttgattattttgggaattaccatcaggtgaatgaaaaagttcgtcaaaaatttccaaaaaataggatgtgaatgcagttggcctttagaaatatttatattgaaaatccagccaaattaagtattaaaaatcgtcaattagtcattcagcaagaagagaactacacagttccagttgatgatatccaaagtgtaatgattgaaactaggcagtgcagtattacagtcccaactctttcttttttagctcaaaatcaggtagccttatttacttgtgacgagcaacatttaccttgttccgtcttgttacccttaggaaatcattcaagaaaattacagacactgtattaccaagttcatttagcaaaacgaaccaaaaatcgaatttggaaaaaaatcattcaacaaaaaattagaaatcaagctcattgcttatctttaaatgggaaaaagcatgttgaaaaattattagatttagcagcaaaggtagaagaaggcgatcgaacattttgtgaatcgcaagcagcacaaatctattttcttgaattgtttggtgaaggctttaatcgtagacatgatcatgttcaaaatggtgctttaaattatggctattcgatattaagaggtgttttagcacgagatatttgtgcatatggattagagccagcttttggtgtttttcaccacaatgagttaaattcttttaatttagccgatgatttgattgaaccttttagaccctatgttgatttatgggttgctaaaaatgtttacccagaagacttaatcgtaacatcaaaaatgaaaagagaacttttctcgctattatttacaagagtcccagttgaagatgaatatcattcattagctaatgcgttaaagaaaacaacaagttcgtttacaagttgttgtaaaaataatcgtgctactttgttaaagttaccagagctaatgattttgaagcctcacgagtatgaatagatttatgagaatacttgtaatgttcgatctacccgttggaacaaaaaaagaacgaagagaagcaacgcaatttcgtaactatttattaaacgaaggatatgtaatgatgcaattttcagtatattgtcgaatttgtaatggatatgatatggtaaaaaaatacgagcgaaaaatcgaaagacatttgccaaataaaggatcagttaggatggttagtctgactgaaaaacaatattcaaatatgaaacttttagttggtgatgatttagagaatgaaaaaaaggtgaatacttcaaatttgtccgtattttagacaagaaaaaaaccgtagaatcattaagattctgcggttttttcaagtagaccatacattatagctgattctgtaaggaaactatagcgtaggtgattgctaatgtatttctcaaaatcatacattatagctgattctgtaaggaaactatagctaaggtgtttgaacttaatcgccttgtactcatacattatagctgattctgtaaggaaactatagctccagcaacataatttgcctctgtgcggaccatacattatagctgattctgtaaggaaactatagctttgcctgcgttatcaatttcatcaggtaacatacattatagctgattctgcaagaaaattatagccacccatgctttattgtttataaggttaaatttttagttatctctaactaaaaaaagaccaaaaaatttaacttttggtcttaaactttaaaaattcacttcaacaatccttctttttgaagaaactctttcgcaacagtagctgcagattgattgttaatattcacttcataattcattttccgcatctcatcatccgttatttttccacctagcttagttaaaacatctgctaattctggatatttttccagcgtgctgtttaaaagcaatggcgcgccttgataaggagggaagagctgtcgatcatcttttaagaccgttaacttgtattgagccagctcactatccgttgagtaggcatcaatcacttgaatatcaccagcttcgatagcagagtaacgaagtttaggctccatcgtttgtaaacgatcaaaggtaattccatataatttttgaatccctttatacccatcattacggtcagcaaattctaaggtaaagccaacatttgcagtatgactaactgcttgtaaatcagaaatagaggatagttgatgttcttttgcatagttttgagaaaccgctaaagcataagtgttattgtacttcatcgggtctaaatacgccattttaaattgcttatccagtccggtcttagcttgttgatagacttggttttcatcatgacttttagaaggctcattgaagaaggtctctaaaaccgtcccagtaaattctgggtaaatatcaatatcgcctttttgcaatgcattaaataaaaaactagttttccccatatttggttttaacgtaaccttcaaatccgtttcatcttcaatgaggtatttatacatattgattaaaatttctggttcagcacctaatttccctgcaatgacaacttccttttgaggttgattaataagcgggattaaaataaagcctagaataacgactgctaaggtgcccaaagtaatcaagctttttttaaaggagatacgttcaaaaatccgtaataaataatcaaaaataatagctaacaaagcagcaggaattgcccccagtaaaattaattgatgattatttcggtcaatgccaagtaaaatcaaacttcctaaaccaccagcaccgattaaagccgctaaggtggccgtaccaataattaaaaccattgctgttcgaattcctgccataataacaggcatagcaattggaatttgaaccttgtacaggctacgccaacgattcatccccatcgcacttgctgcttcaacaagagaaggatcaacctccgcaattcctgtataggcgtttcgcaaaattggaaggagtgcataaatgactaacgcaatcacagcaggcaacgttccaattcctactaaaggaatcattaagcctaataaggcaagagaggggattgtctggaaaatagccgcaacttgaataataggctctgcaatttttttatgagaagttaaataaattcctaaaggcagtgcaattaaaaccgcaatcaacaaggcaataaaagaaatttgaatgtgttgaaggagagccgttgctaaatcttctttacgttcttgaaatgtttcaatcaacgtcatcatcaatctgtccctcctttttgaataccagaacttagaaatgcaaggaagtcttgatgagtgattttacctaagtaagtggagtcctctataatttgaacaattggaaatctcgttaaggctaaaatcaagtcatcaaccgaagtctcttttgtgaccactaaagcctccgtttcttcaagtgctaaaggtgatattgaaaaatgattcatagccatcaacgtttgaacggtttgagaagtggtaacagctacattcccagattgaagaaattcgcgaacaaactcatttttaggattctgacaaatttcatcaggagtcccgatttgctccacatgcccctccttcataatacaaatgcgatcgcctaactttaaagcctcttgcatatcatgagtcacaaagacaatcgtctttttaacttgttgatgaagtttcgccacatcttcttgcaacttctttttactgatagggtccagtgcactaaagggctcatccattaaaataatatctgggtcagccgccattgctcgtaaaacacccacacgttgttgttctccaccagataattcagaaggcaaacggtgacggtaactttcagcgtctaagcccacactcgttaacaactctgttactcgttccttcattttgttttttgaccattttttcatttcgggtacagttgtaatgttctcttcaatcgtcatatttggaaaaagggcaatttgctgtaagacatagccaatagtccaacgcaactcatgaatcgtataatcactaatcggtttattctgaattcgaatcgtaccagttgttaatggaattaagcgattgatcatttttaaggtagtggtttttccacttccactaggaccaatcaagacaaaaaattctccttcgttaatttcaagagttaagtccgaaacaataggttttcctggagaataagattttgagacgttttcaaagcgaatcatttcatccctcctttaatgtttttgtaaacaaaattatagcattttttaatttagaacgctagttcgctgacttggaataaaaaaaaagaacaataaacgacgaatcatttattgttcaaataacagatacttattgaagtttcagctcaagtcgtttcgatacacgggaaagtaagaaacaaacaataaaatacaagaatgtcatagcagcaaacatcggtaagacggctgttgtatcttgaccgtaaataatttttgcattatgagtcaattctggtaaagaaataataacagcaagagacgtatctttaattaatgaaataaattggctgacaatcgggggaagcatcttttgaaaggcctgtggaaagataatcgaccaaagtgtttgaccatacgtcaatccagtcgaacgaccagcttccatttgccccttaggaacggcatttaagcccgctcgaataatttcagagagcattgccgattcaaaaatagttaaagcagccacgcttgaccagaaaatacttagacgaatgccaacctgtggcaatgcaaaataagtaaaaaagataatcaacaacaaaggcaaattgcggataatatcaattaaaacaccgacaatcgctgaaataaatggaactttcataaaacgaatcagacctgcaatcccgccgatgacaaagctaaaaataatcgacaagacagcgaccataattgtgacccataaaccatctaataagaagcgaatattgatccatgaaaaagcctcgataaagttcaaatcaactctcctccttcttaatttttaacctctaaacgtttttcaatatgcttcatcaaataagacaaaggcaatgttaaaatcaaataaaacccaccaacaattaaatacgtatcaaaggtattaaaggtttcacttgcaatcaaatccccttgatacatcaaatcaagacctgcaaccatcgctaaaatagaggaattttttactagattaataaactgattgcctagtgggggaatgacaatcttaaaggcttggggcaaaataatgtaccacatcaccttggaataggtgaaaccagaagaaagcccagcttctaattgaccttttggaacactctcaattcctgcacgaaccgtttcagcaataaaagcagaagtataaagagttagcccaatggttcccgcagtaaagccatttaattgaaaccaatacaaaggggcaaccacgtagaaaaacataacaataatcaataacggaatattacggaaaaattccacataagcctttgcaaggtattgaacccattttttatgagagagttgaaaaatagccatcaacgttccgataatcaaactaaaaagcaatgcaagcaaacttgcataaagtgtatatttaaaaccttcaatcaaaggcgttgagtaagttgaaagaattgtacccatagttacgcgtcacctcacttaaattattttttaggaaaccatttttgataaatcttatcataagttccattagctctaattgtttctaaagcatggttcacttcttttaggaaaggttcttgccctttattaatggcaatcccataaggctcatcagtaaagttcccaccggcaagttcataatcaggattttcttcagcaatccctaaaaggatactattatctgtagtcatagcgtcaccttggccagattgcaaggcagtaaaagcctctgcataattttctaattccaatacttttgtctcaggtgcctttgctcgaatatttatagcagaagtggagcccttaaccgctaaaaccgttgtgttagcatttaaatccgcaatgcttttaataggactgccttttttgactaacaaagattgccctgcatcaaaatagctatctgtaaaatccactacttttttacgctcgtcagaaatcgtcatagtagcaataatggcatcaatattcccgttttttaacaaggggattcttgttttagaagtaacttccacaaactccgcttttccattcttaccaagcatttctgttgttaaggcctttgcaatatcaatgtcaaagccttcaatttcacgagattcaatattgattaaaccaaaaagccgtgtatctgtttttactccccaaacaatcgttggactggttttgattcttgttttaatgtcctcgttcgcaacacttgctttgccacaagccgttaagacgagcatcatcaagaagaggagagcgcctttttttaataattgtttcatcagcaaatgcctcctttaattaatgattaatgattttgcttaaaaattgttgtgctctgatttcttttggctgctcataaaattcaatcgcatttgcatcttctaaaatttgaccatctgccataaaaatcacgcgatcagccacttctcttgcaaagcccatttcatgggtaacaacaaccatcgtcatgccttcacgtgctaattttttcatcacctcaagaacttccccaatcatttcaggatcaagtgctgacgttggttcatcaaacagcattacttccggttgcatagctaagccccttgcaatcgcaattcgctgctgttgaccaccagataattgtgaagggtaggaatcctttttatctaacatgccgactttttcaagcaacgtttctgctaatttagtggcatcctcttttgatttttttaagactttgattggtgcaagtgtgatgttttctaacactgttttatgagggtacaaattaaaatgctgaaagaccatgcctaggtttttacgaacgtgattcatatttgttcccttaccatgtagatccacatcatttatcaaaagctgcccttctgtaatatcttccaacccattaatacagcgaagcatcgtacttttaccagagccagaaggaccgattactaccacaacttcccctttttgtacggttaaattaatgtctttcaaggcgtgaaatgagccgtaatatttttcaacctctttaaattcaatcatgaaatcactcctctattaagtcgataatctaaagaaactattagaatacattcattatattttaatgatagagctattatatcggctaaataagcagtttgtaaagtttttagtgaaattttttttataaaagtgctatcttggtgttacatttccttacatatcaaagaaaagttgcgaaaaaggtcaggttgtgttaatctaattttaataaatgaaatggaggtgaataaaagatgagtggtaatttagttggaatgattgattttacaattttatttgttagtttctgtcatgccgttatttttaatgttgcgcaaacaagggataagtctgcccaaaatttcaacaattcaattaaaaataagttgccaacttgtcttttatttccctaattcagaaatgatctgtaactaggaagtcagttggacaggtggagaatcgtctccagttgtccttttttgttgcaataaaagataaagatgatggcacaaaggagtaacatcatgtttattacagtcaaagaaatcggaaaaaccttcggaagtttaaccttatttgaagaactttcctttacaataccagaaaataaaaaaatcggtttagttggagacaatgggagtgggaaatcaagtttatttaaacttttactcggcatagaattccctagtagtggaacaatcatccgaaaaaaggggttgaaaatcggctatttagaacaattgcctgtagcgctacccaatgaaacggtctaccaagtaattgaacaaagctttccaacctttatcaaaatgaaaacggacttaacgtcaatggagtgtgaattagcaacagaaactgatgaagataaaatggcttctctgcttttaaaatacgggaaattacaagaagagtttattgaaatcggaggatatgaattagactacaaaatccaaaaactagcaacaggtctaggaatagaaacacttttaaaagcaaccttcaatcaattaagtggaggcgaacaaaccaaagtcggtttaatcaaaaccctgctacaaaatcctgatttattattattagatgaacctaccaatcatttggatttacaagcaatcgaatggttagaacattatctaaaagaatacagcggtggcgtggttattatttctcatgaccgccatttcttagatgaagtagtggagcaaatctacgagcttgaagacagtgaagtgagtatttttaatggcaactatagtcgttataaaattcaaaaacaaaagaagctagaactagaattaaaagattaccaagaacaacaaaagaaaatcaaaaaacttcaagatgccattcgccgttaccgacaatggggaaatgaaagtggcaacgaagatatgttcaaaaaggctaaaagcttagagaaaagggtgcaacgaattcaacagctagctaagccaactatggaaaaagaaaaagttaaacttactttagaggtcacacaacgaagtggaaaaaaagttttaagctttcacgatgtaagtaaagcttttggtgagaaacacttatttacagaacttgatttcaccttactatggaaacagcgagtaggaatggtaggtgaaaatggcaccggtaaatcttccttgatacgtttagctttaaaagaaatagctcctgataaaggagaaataaaaatcggcgaaggcgtaaaaataggctacttgcctcaaaaaattagttttccaaaagaagaagcaacggtattagcgaccttccgttcagaaatcggcatggaagaaggagcagctagacaatttctagcgacgtttttattctttggcagcgatgtttttcgtaaagttgggcaattgagtggcggggaacgaatgagattacgtttagccattttaatggaacaagaaacgaatctcttgatattagatgagccaaccaatcatttagatatttctaccagagaagtaattgaagaggtcttatctaattatcaaggaaccatttttgcaatttcccatgaccgttattttttagcaaaagtaacgaatgaaacattatggttagataaaaagggcctaacgatgtaccatggcagttatcagtgggcaacgactaaacgaaaacaacaacctccaattggatcaattccactttcaaacaaaaaaagaacattatcagtagctacgattgaaacgaaattagaagagaaaacgattgaattgacaaaattgacgcacacactagaaacaaaaccagaaaacgctgcagtacgtcaaaaaatcaatgaagtgaaaacagcgattcatttattagaaaatgactggttccaacaaatagacaactaaaaaagacgcttcaatccattatcagattgaggcgtgttttagatgattatttttttcaaaattcaacaaccattctttcgtcgttaagccgatttccgaagagccactgtacccaacaagcttgccatttttgccaattacccgatgacaaggaatcacaatcggaaaaggattattgcgattcgcttgtccaatagcccggaccgcctttggattttcaatggcttcagcaatatccccgtaacttcttgtttcgccatatggaatagttcttaacgcctgccaaacgctacgttgaaaaggagtgcctgaatgaatcgaaagaggaaccgtaaattcagttaaatttcctgcaaaataagcttctaattcttctttcaaagccaaacaaaaaggttcatcctgaatcgcattctgtgcatcctgcgggtgaatcgttaaattatgaatactagtaataccacattcatcttcctttaattcaagtaaaccaa

SEQ ID NO: 382 - DNA, 23306 bp, synthetic construct
  source 1..23306: mol_type = other DNA
  misc_feature 1..23306: note = Synthetic
tcttcttcaaatgatttttcaaaaattcaaggtcgctttccgactcgtttaagcttaagctctgcaaatgctgatgaagttatcaaaaagcgcttattagccaaaaatgacacggcaaaacaaacgttacaaattacatacgatgaacgaatgcaagcggctttacggaataagatttctttttcaacggatacggctaccttaaaagtatacaacacaatgaaagattttgttgatttttatccttttgttccttatcaaattacattattacaaaaagtactagaagaaattcgtagacatggactcgctggttcaagtgtctccacaggagaacgaaatttattaggaacgattcaattagctgttttacagtacaaagataatcctgtgggttctttaattccgtttcaatcgttttttgcgaatctagactctagtttagattatagtatacgatcaacgattataaaggcacaacaaaatgctagtttaaataaatttgacgtcgaagtattaaaattattattcttaattcggtatattcaagaaatcccagctaatattgaaaatgtcgcgactttaatgattaatcaattagatgaggataaattagaagcaagtaaacaagttgaagaatctttaagaagattagtgaaagagtacttagttcagcgtaatggatctgagtttatctttttaactaatgaagaacaagatatcaaccgcgaaattcaaaatatggaagtacctacagccaacttactgaatcaaattggggaagtaatctatagtgatatactcgacttgaaaaaatacacacattattcggttttgaataagaaaagcgtcagttacaactttgatgtagctcgttggatagacgatcgtgttattggtaatgctaacgctgaaataggtgtccgaatgattactccttactcggatagttatcaaaattcagaaagtatcttgcaactgtcttcaagagaaaatcaagtaattgtggaattggattctacaggaacgttttatgaagatatgttaaatattatgaaaattgatcagtatttacgtgtgaattcttctcgtaaacggacagacttagaacaggatattttaaaccgtaaagctcgtgaacgaaatgagttaacagccactattcaagttcaattgcggaatgctttagagcatgcacatatctatatttatggttcagaagtagaagttagtggaacaaatgctccttcaattattagtgctggtttacatcaattggtaacaaacatctatcgtcatctcaattatatccaaaaattttatgaacggagtgattttgattcagttattcatcaagatgatatcgaattactagagatagacggtaatgatgaaaatcacttagctacggagactatccaacagtatattcaacgacaatctgaaagaaaaattacgtttacattgtttaacttgattcaagaatttcaaataaaaccgtatggctggcgtgtagaggatattctagtctctatcattcgtttagttaaggcagaaaaaatcattctaaaaacaaatcatcaaaccattgagttgcacgatccaatgctagaacgacaactgatgaaccgcaattctcaagaaaaaatgcttattcaaaaacgaaaagtgattgacgaacgaatcctccgtgaggtcaagcaactccataaagatttatttggagttcgtttaacagaagataaagaagatagaatagccgaagaatttcgtgcgagattagaacggaaacaaaaagaattacacgcactattagaaaaatatcgagaacatttttatccagggcaagaagagattaatcagtatttgaaagatattacccaagtagttcatgtacaagatacattagaattcattcaaactttacatcgggcagccatagacctgtatgatgatgcggatgaaatgatagaaatacagacattctttaagtatagtcaagtagtttatgatgaagcttacaaaatacgcaatcggtttaaagatgatcaatccatgattcaacttgaagaaactttaagcgtgggaaatgaaatacaaaatattataaaaatggtacgtccatataaacggttgagcgacttaccaaaattagtcaaacactataaacaatcattaaccgaagaaatgaatagagaaattggaccgctgatggataacgtaacaaacaaagaaaaaatattactcgattctattcaaacggacaaagaagtaaatcagcactttgctcatagtattcgcagtcgctttgaggtattaaaacaaaaggttgataactctggcacgttgaaagatttaagtgctgctaaatctgaagtcgagtttattacagatcaactatctagtcaaattaatagataccagcatgaactagctgaagaacggcgaatagcattaaaagcaaaacaaaatatacaaaaagaaaaatcttatcctgaaaaagaagaagttgaacccatcatacatgaaccacaagcagtattggtacatgtcagtcaattgataccttctagtagctatactatccgaaatgaagcagagttagctaagttgatggaagaagtgaaacaaagacttcaaaaagagttaacagaaaataaatacattcaatttatctaataaaagaaagagctaaatcattttagctcttttttaaaatgaaagaagtgtgagtatggataaaacaaatttgaagacatttgctagagaagctcgaaaaaaattaattattagtgtcaaacaaagagcagcttattttaagattacttcttctggtattgatgaactacaagtactagaaggcataaaattagtcaatggacaaccagttaataaaaaaacaagcgactattatactgatttagtaaataaaataaaactattagaacgagaaacaaattacaaacaggcatatgaggaagtaatggaagaggtagcctatacatggtttaatcgattaattacttttcgatttatggaagttcatgattatctacccatcagaatgttgttactctcatctttagtaaatggaaaagaagagccagatgcattaacggatatagggctgcttatagatgagttaaatctagaagaaaagttaatatggagtttacaggatgaccataaccaaaatgaactttttaaatatttattgattcaacaaagtcaccaactagggaatcttatcccaacagcttttgaaccaatcggtggttcagaagaacttttacttccagataatttattgagtactggtagtgtagttcaggatttagttcgtgctgttgagatatcgaactggcaagaagtggaagtgataggctggctgtatcaatattatcaatcagaaataaaagaacaagtggggggacttaaaaattataccgtttcaaaatataaccttgctaccgtaacgcaactctttacgcctaaatggattgttcgatatatgttacaaaattcattggggaaattatacaatgaacggtatccaagtaatgaactaacagatagatttgattattttttaaaatataataaagaagaacctttattaccaactacttttcaaaatttagaagacataagattagtagatcctgcttgtggcagtgggaatattcttatagaagcatttgatttattatacgatatgtacctagagcaaggctattctccaaaagaagttccacaatatatcattgggaaaaatctttatgggtttgaaattgataaacgctctactcaaatcagtcacatatctctatttctgaaagctgttgaaaaaaatcctagaatcattcgacatcaacaaaaatttgacttccatatttatgaatatattgatgcggtggtagaagtatccgaagagatgctggaaatagtttttgaagaagaagagatagagcgctatcgtacagctgaaagtaagcaagaaaatggcaaacaatttggaacgttaatcaccttcccagaatcgtatgatgatttacttattaagttaaacaactttttagaggaaaaaacggaagatttatatattcaggcggtaaaatcagaattaagaaaaaaagtactacccatattaaatatttcacattttttaacgataaaatatgatgtggtttgtacaaatccaccttatcataataagtttaatccaatattgaagaaatttatgcaacaaaattatccgagtacaaaatcagatatgtactcagcctttattgaaaaaacgtttagtatgactaaaaaaaatggatatgcagctttaatgacaccatacacatggatgtttatatcaagtcatgaaaaattaaggaagtatattatagaaaacggcgcaatcagtagtttagttcaattagaatactcagcctttgaagatgctacagttccactatgtacacttgtattgcaaaatcagcatgaacacactgtgggagcatatgttagacttactgaatttaaaggtggaatgaatattcaggataaaaaaataaaagaagcatctactaataagaattgcttctatttatttgaagttaatcaaatgaattacaaaaaaataccaggaaatccaatttcatattggatacctattgaaaaagtatccaggatttataacaataatgagactctagaaaaatttgttgagataaaaaaaggtctagcaactggaaaggtttctttatttattaagtattggcatgagatttctttaaataacttctcaataatgattaagaatgctaaatggtatccttgtcataaaggaggagactataataagtggtatggaaattttgagaagataataaattgggaaaataatggagaagaaataaaaaattatagagataataatggtaaactattatctagaccccaaaatttagattatatgcaaaaaagaggaatagttttttctaaaataacttcaggaggagttagttgtcgaattatgacaggagaagaattctttgatgatgcagtgcaaggtatgtttttaaaagatgaaaaattatataattatatactggcacttttaaattcaaaacttagcggatattttttgagttttttaaatccaacattaaacaaacaaatttatgatttaaaaagaatacctgttattatttctgagaatttagagattaataaatatactgtaaaagcagtcttactatccaaaaaggattgggattcgtttgaaacgtcttgggattttgaacagcaccccttcattacctatcaagaagactttagaattattaatgatatatttcagaaatggtctaatgtagctaaacaaagatttgatcaattaaaagaaaatgaagaagaattaaatcgactatttattgacatatatggactacaagatgaactaacgcccaaaatagaagatgaggatgttacagtaagaaaaacagacttaagtcgtgatgttaaaagctttttatcttatctagtaggagtcattttcggtcgttattccttggacaagccaggcttaatatatggtggtggtgactttgaattagagcagtatcagacatataaaccagataaagataatgttattccgataacagatgaacattattttgaagacgatattgtgtctcggataatagaattagtaacgattatttttggagaacaaacggttgaagaaaatctacagtttatcgcagaagctctaggaatgaaaacgaatgaaaattcaagagaggctcttcgccggtattttatgaaagatttctttaaggatcataaaaagatatatcaaaaaagacctatttattggcagatgacaagtggaaaagaagacgcatttaaagggttaatttacttgcatcgctatgaaacaaatactttagctcgtgttcgtacagattacgtattgccattaacgaatactatttctgaattaatgcgccaagcacagcttgttagtgatggcagtgattcttcaaaggaagttgctaaagctcaaaagactaaagaaaaatttcaaaagcaattacaagaattaagggattatgacttaatattgaagaatttagcggatcaagaaattgagttagatttagacgacggtgtaaaagttaattacgagaagtttcaaaatatccctgtaacaggaacagagaatcatagggtgactcaaatgaatttgttagaaaaaatataaggaaagatacttcctagatagtaagtttatctgggaagtttttttatggaaatctagaatagaaaaaacactctttttgtaaagggttgtaatgacatgttacaatgataaaaaaaggaggcgtttctatgaatacgattaaggctagaaaacaagggaattcaattatggttaccatacctagttcttttggtgttaaagaaggagaagaatttttttcatcaaaaaagataatggagctatcgtaatgattcctaaaattgacaatccttttgagattgctgaagatggcgaattctatactccagatttaaacgtcggttttgtccctgttaaaggagaattagatgagctataaacctaaacaaagagatatagtcattattgattttgcaccgtcaaaaggctatgaaatcgataaaagacgtcttgcgttagtggtaagcagtgataactataaccgtgcaacgaatcttgtgattgtttgtccaattacaacgacagaaaaagaaaaagtttttcttattccaattgaatcagacaaattacgagctaacggaatggctaccagcaaggtaaatacaaaccaagttttttcattagattatacagaaaaagcgactaggaatattcaatttttagataaaatagaagaagaaacgttttatcaaattgctcaaatgtttatgcataatttttcgtttaaaatttaaaagactaaagagaattaataaataaaaaaataagcacacttcactttgacgttatagtggaatgtgcttcttttaaattaaaatgaatgctaaacatagtagtaaatagtgtatcttattgttaaaataggtgtagtttactttggattatttattaaaagagtaataaagagaaatagactagcctatctgatagccaatatgatttatagtgaacgaaagttgcaagatagaataataataaacaactaatgataagaaagtatggtgaagtagtgtttgaagctgaagtaaaattaaaagaacgttttaaacaacccttacgagatgagcaaataagaaaaattatcttttggtacgatgaaacacaaagttacttatccgaagtggatgagtatagcttagaagacgttcataccattaaagttaatgagaataacttaatttatacaaaatatctgattgaaaaagaatttccaaatgattcttttttgttgtattttggtcaagcaaggccccttgaaaaacagaataatcctttattggatatctatttttattcagaagaatttaaactggatgcgatagcagctatcatggatgaattaggattagaagataatgaaagtgattattttttccaatctcatgcatctttttttcaaaataagaagcgacaaaaagattttcgtgatttattaataggagatagcgacaaatctatcgaaaaattaacgctaggaatcatgtgtgtgttggttaaagcaaaagagttcagtttttcagttgtttgtgagaaattatttgcagaattagctcaagattctagcctatcttgggaacaaatagagaagtttggtaaactaagtgagttttgggagtttgcagagagcaaatttcattaccataaagagaagcctagcttaaaagattttcttattagtatttttgtatctaagttatcaatagactataatgaaaaaattcctgctaattgggacaattatctaataacacctgaaaataacagcgttgtttttttaaaccgttggatgaatcaagttaacgggaagatagaatacaagaaagtagctatacttgttgcagacgaattaaaattccaaaagttcttaaaaaagaaatcaagtgaattcttgtctcaatcggatactttttctggaatagaagactatttagttgaatcaaccattgatgcacttcttatacctgttgttaggcacaaccagatagagcaactcatcttaaatcgacgaaatagtttttggtattcgaactatagcaagcaatataaagccttattagctgcaagtcggctgctatttaaaattaatgaaatcgaacagaacggtatggaatcaggaacagaaaaattatggcatgcttatcaagaaaattactatcaaattgatacgtattaccgtcattttaatgtttcatttgctcaattagaaaatccttcagataatttttaccagttacaagaaaaagttgagaatttctatacaaatggctttctacagatttttgcagaaaaatggacagcaaaccttaatcaaatggagacctttgaaatcgagggaatagccaaacaaacgaacttttatcaagatgatataaaaggatacgtagataaagatactcgtgtattcgtcattatttctgacgcattacgctatgaaataggtgtggagttagctgaagaactagaaaatagtcactactatcaagtaaatgtaaaaaatatgcaaggtgttttacctagctatacagggttgggaatggctagtttgttgcctcatcaagagcttgaaataggaagaaatcagataatagtagacggaatgagcagtcaaggtctagataatcggaataaaattatggggaaaaatataggaataaataaaggcagagctttcagggctaaagatatcctaaatgctactaaaacagagttaagagaacaattcagtggtggattagtttactatatttatcataacactattgatgccactggtgaccatgctgctagtgaggataaagtattccaagctgtggaaaccgcaaaatcagaattgatacgactatcagataaactagtaaataatcttagtgcaacacatctctatattacagcggatcatggatttatgtatactaaaaatccgttagctaatgtggataaagtatctatgcccgtcaatcaatctattgaaagcaatcgtcgattttatattgattcaataaaagaagcgtcaagttcttttcatacatttaaactagaactagctaatcagggggaaaactttgtccatattccaaaaggcctaatgagaatcgcggtccaaggagcgggttcaaattatgttcatggaggatctatgccccaagagtgtttgattcctctattagagattaaagcaacaagtgggcgtgatactcgtaaacgagtaggtattcaactggttagtgagcaaaatcgaattacgaatgtagtgacttatttgactttcttacaattacaacgggtaaccaaagaaaataagagccaaactgtgggagcttattttgaagacaaagataaaaataaactatcaaatgaaatcattctattagcggattcaattagtgaatctccagaagaccgaattacaactggaaaatttacttttattcaacgtctatatagtttgaaagaaagttattttttcgtactagaagaccatcagagtgatgaagaattagatagacgccattttacaattgatttataaaaacaaattaaataacttgtaatataaaaaaacatagtatataatttagaagtaaagttttagccgactttgcaaggaacgtatagtaaagggagtgttctgcactctcctgtaaagcactaaccccatcttcttttgaagatggggttatctttttttttagagtatcgaaaacagtttctttgtattataataagaatataaaacacgtgatatttaggagggatagtatgggttatagaattggtttagatatcggaattacttctattggttattctattttaaaaacagatgagaatggaaacccgaaaaagattgagtttttaaactcagtcatttttccaatagctgaaaatccaaaagatggtagttcattagcagctccaagaagagaaaagagaggattacgcagaaggaacagacgaaagaatttcagaaaatatcgtacgaagagactatttatagagagtgaattattaactgaaaaagatagtcaaactatctttgaaaagaatgccgataaaagtatttatcagttgcgatacgaagcgctaaatgaacgattaacaaatgaagaactatttcgtattttttatttcttttcaggacaccgtggatttaaatctaatcgaaaagcagaactgaaagagagtgagaatggtccagtactgacagctattaatgagacgaaagaagctttatctactagtggttatcgtacgttgggagaatattattataaagatgataaatttaatgcacacaagagaaataaagattataactatttaacgacacccgagcgtagtttactagttgaagaaattaaagagattatctctaaacaacgagaatacggcaataaaaagctaacagacaaattcgaagaagcttttattggaaatcaacttgaaaaaggaatttttaatcagcaacgtgattttgatgaaggtcctggtggcaatagtccttatgctggtgatcaaattgagaaaatggtcggttggtgtacttttgaaaaagaagaaaaaagagcagcaaaagctagttatacctttcagtatttcgacttattatcaatagtaaataatcttcgggtacaagaatatgctggtgaattatatagacctctgactagtgaagaaagacagctaattattgataaagcttttgagaaagaaaagattacttacaaagatgtaaaaaaactattaaccttagatgaatacgcaaaatttaatttacttaattatggaagtaaagtcgaacctgaggtaacagaaaaaaagacaacgttcgtttctttaaagtcgtataataaattaaaaaaagcagttggtaaagaacaacttagtgagttgtcaccagcggtcatagatgaagtaggatatattttaactgctttttcaagtgatactagtcgaatacgtgaatttaagaatcgattagatttctcaaatgagttagtagaaaagttattgcctataaccttttcgaaatttgggaatctttcaataaaagcaatgaaaaaagttattccttatttagaattaggagatacgtatgataaagcctgtagtggagcaggatatgacttcagacaaaaccatgttgacgaaaaatatattaaagaaaatgtaatgaatccagtagttaaaagagctacaagtaaaacaatcaaagttgtaaaacaaattatcaggaaatatggacctccggatgcaattaacattgaattagctcgtgaattaggtaaaagtaatgaagaaagaaataaaataaaaaaacgtcaggatgagaatcgctcttacaatgaaagagttgcctctcaaatttcagaactgggatttgctgtaaacggtgagagtattatccgtttaaaactttggtttgaacaaaagaacttagatccatacacggggctatctattcctttggatgatgtattttcatataagtatgatgtagatcatattattccttatagtaagtcttttgacgatcaatttactaataaggtattaacgagtactgcttgcaaccgagaaaaaggaaatcgtattccaatggagtatttaggaaataacccaatccgtgtaaaatctttggaagcagtagctaaccaaattaagaatataaaaaaacgtgaaaaattattaaaacaaacgtttagtaaagaagatacagatggatttaaagaacgaaatttaaaagatacccagtatatttcgaaattattaaagagttattttgaacaaaatataattttttctgaaagtttagaacaaaaacaaaaagtattcgtaggtaatggcgttgtcacagcaaggttgcgtgcaagatggggactaaataaagtgagagatgacggagataaacaccatgctatggatgcaacagttgtagcttgcatgacacctacattaatccgtatgttaacgttatatagtaggagacaagaggttagagcaaaccttgatttatggcaaacatatgatgaaaaagaggatccagattttctgaaattatcaaaaattaaaagagaacagtatgaaagtttattttctaagagatttccagaaccctggccaggatttagagatgagcttttaattagaatgtcagaagatccgaaatcgttaataaagaattatccaacagttaaagctaactattctgaacaagaaataatggatttaaaaccgatgtttgttgttagattagcaaatcataagataacaggtcctgcccatcaagaaacaattagaagcgctaagctattagacaaaggcaagacagttagccgtatgtcagttgataagttgaaattagacaaaaatggtgaaataaagacagctaaatgggaattttataagccaagtgataatggatggaaaatagtatacgaagcaatacgacgtgaacttgaaaagaataatggagaaggaacaaaagcttttccgaaaaaagagtttacgtacgaatacaatggacactcacataccgttagaaaagtacaagtagttcaaaaaactactttatctgttcaattaaatgatggagaacaagtagcagataatggatcaatggtaagaattgatgtatttaaaacgcctaaaaaacatgtgtttgtccccatttatgttagcgatacaattaaaaatgagttaccgaagaagtgttctgctcaagggaaaaaatatttagattggccggaagtcgatgaagctgaatttcaattttctttatatccgcgagatatgcttcatatcaagcataaaacaggatttacggctttttataatggagaaaacaaaggacctgtaaaaataactgatttttatgggtattttacctcagctgatatcgctaatgcacaaataaatattgtttctcatgataacagctttttaggtaaaagtattggtattgcaggactagaaaagtttgaaaaatatagagtagattatttcggtaattaccataaggtaaatgaaaaagttaggcaaacattccaacgaaagaagggataattatggcatttcgaaatatttatatagaaaaccctgctaggctaagtataaaagataaacaattagttgtcagtcaaagtaaggactatacaataccagtttcagatattcagagtttagtcattgataatctgcaaacaattctaactgctccggctttatcttttcttgctgaaaatcaagtagctgtatttatctgtgatcaaagacatatgccttgtgctgttcttacaccgttagggaattactctagaaaactacaggccttaaattatcagttgagtactacgaaacgatttaaagataggatttggcaaaaaattataaaacaaaagattgccaatcaagctacttgtttaaaaataaatgataaaccgaaagtaccagaacttgaacatttatctaaacaagtaattgagggtgatcgtgcttattgtgagtctgctgcagctaggctttattttattaatttgtatggtgaagggtttagccgaagagtagataatgtgcaaaatgcggctatgaactatggatatgcaataattagaggtgtaatagcaagagatatctgttcatatggttatgaaccttcattaggagtttttcatagcaatgagctaaatgcatttaatcttgcagatgatcttattgaaccttatcgtccttatgtagatttatgggtatctaaaaatatttcagaagatgagcgttatttcttacctaaacatcgaagatcgctagtgtcgttactttttacagaagtagaaatagacgacgagtatcgttcattgacaaacgctattcggaaaacagtttcttcgttctcaagctgttgccgagtgaattctacaaagtttttgaaattaccaaaactaataacattgaaacaacatgagtatgagtagatttatgagagtattagtcatgtttgatttaccagtagtaactaaaagagagcgaagaactgcgacaaaatttcggaaatatcttttaaatgaaggctatgttatgttgcaatattcaatttattatcgaatctgtaacggatatgatatggcaaagaaatttagttatcaaatagaaaatcatgtcccagaaaaaggttctgtacgcatgttaaccttgacagaaaaacaatttagtgaaatgagattacttgtaggagaccctttacccaatgaggagaaggtgaaatctgataatttgaccgttttttagacacaacaaataacccttaggcctatactgcttatgggttatttgttgtacctattttattttagccgattttgtaaggaacgtatagcaacttgtgctgaagttaatctcaatccgatattttattttagccgattttgtaaggaacgtatagcttacaggttatttagaattagctacttggaattttattttagccgattttgtaaggaacgtatagcaactgacgaaaaaatgatgttcaatcttaattttattttagccgattttgtaaggaacgtatagcttgagggaatgacattgaaagatatagccaattttattttagccgattttgtaaggaacgtatagcattcttctccctgttctgtagcagtcacgaattttattttagccgattttgtaaggaacgtatagcatgagttcgttaagcaccaagagaaagactattttattttagccgattttgtaaggaacgtatagcaaaccataatgtctttaacaatcttattttattttattttagccgattttgtaaggaacgtatagcagtttgctcctgttagtgtcccggtagtaaattttattttagccgattttgtaaggaacgtatagcctcaccatcttctttttcgataatggcgtaattttattttagccgattttgtaaggaacgtatagcaccaccagtgttcaatccttcaacaggcaaattttattttagccgattttgtaaggaacgtatagctacttctattgtttgtagctattttaataaattttattttagccgattttgtaaggaacgtatagcccatcgtgcagcgcataacttcggtaaggtattttattttagccgattttgtaaggaacgtatagcctccaacgccagcaccagctccagtgaagcattttattttagccgattttgtaaggaacgtatagctcctcgttcgaaatcacaagaacctgctatattttattttagccgattttgtaaggaacgtatagctggacaaccagaagcagattttctgcaatgattttattttagccgattttgtaaggaacgtatagctttaagtgagacaactgtcacttatagcagattttattttagccgattttgtaaggaacgtatagctgaatctaatgactccaatcttattgatgcattttattttagccgattttgtaaggaacgtatagctagaatagctgacaataaaacgtcagagttattttattttagccgattttgtaaggaacgtatagcttcttctacttcataatcatctgcaacaatattttattttagccgattttgtaaggaacgtatagccaaatggtgcaagcggaacacaatatattgattttattttagccgattttgtaaggaacgtatagcgacctctttatctcctagcaaaaccaatacattttattttagccgattttgtaaggaacgtatagctgattgaatgtcactaatagacattaaactattttattttagccgattttgtaaggaacgtatagctgctttgggagtgtacctgccggattcccaattttattttagccgattttgtaaggaacgtatagcacgaagcaatgaagcgcaaacactttgattattttattttagccgattttgtaaggaacgtatagcatgtttccaatagtattttccttctaacttattttattttagccgattttgtaaggaacgtatagctctggattggattccaagtagctacgaacaattttattttagccgattttgtaaggaacgtatagctaacaggactgataaaaaagaagaaaaaggattttattttagccgattttgtaaggaacgtatagctagaccattttgagtaaattccatttcaatattttattttagccgattttgtaaggaacgtatagccatagcgtggtcatgttccttaataggtttattttattttagccgattttgtaaggaacgtatagccactcaagagcaggcagcagagtttattgattttattttagccgattttgtaaggaacgtatagcaggaattactatcgctaaaacaaatggataattttattttagccgattttgtaaggaacgtatagctcttaatttatttataattgttctttcttcattttattttagccgattttgtaaggaacgtatagcggttgaagcgatgaaaaaaggtgcgtatgtattttattttagccgattttgtaaggaacgtatagccgaacgctcctgtgtcgcttttcatgcaggattttattttagccgattttgtaaggaacgtatagcccagaagcgtttgttgcgattcctgttgtaattttattttagccgattttgtaaggaacgtatagcgtaactgtataagtcatctatgctttcaatattttattttagccgattttgtaaggaacgtatagccgaaaagtcagatttaactttaactcccatattttattttagccgattttgtaaggaacgtatagcggtgttttggtgtctggtgagatgtcttctattttattttagccgattttgtaaggaacgtatagctgccagaccttacatgaaagcagtcaagtaattttattttagccgattttgtaaggaacgtatagcgataagaatatgaatacaaatacagcattaattttattttagccgattttgtaaggaacgtatagccgctgtctgaattggtagtattttttattaattttattttagccgattttgtaaggaacgtatagccaataaatcaaccagtgcggttcgtgatagattttattttagccgattttgtaaggaacgtatagccatggtgcatcacattaaagaagtgaaagaattttattttagccgattttgtaaggaacgtatagcggaggatgacgagtaatgaataacaataatattttattttagccgattttgtaaggaacgtatagccaacgaatagttactaatttaaaaggtgcgattttattttagccgattttgtaaggaacgtatagcgaaacggacgcttcattgctgataagtgttgattttattttagccgattttgtaaggaacgtatagctggttaacgtgatctatactactccagattattttattttagccgattttgtaaggaacgtatagcgccagcggaaactggtggtctttttttatattttattttagccgattttgtaaggaacgtatagcgatacaaacgtttgatttaaaaagaattatattttattttagccgattttgtaaggaacgtatagccgcaacgcaggaacgttgcaaagaaaaaagattttattttagccgattttgtaaggaacgtatagctcttgatagtcttcgcctgtcttcatccgttattttattttagccgattttgtaaggaacgtatagcttcgcaagaactaatatatataaaaggggaattttattttagccgattttgtaaggaacgtatagcaagaagaaactaatcgtaaaatcaggaaaaattttattttagctgattttgtaaggaacgtatagccgagctgttagaagtgacgcggttttggtgattttattttagccgattttgtaaggaacgtatagcaaatgttacgaattacatcacgactcctgaattttattttagccgattttgtaaggaacgtatagctttgattacttgcattggttttaatttcgtattttattttagccgattttgtaaggaacgtatagcgtgaacaaggcagtcaacagcaagggcaggattttattttagccgattttgtaaggaacgtatagctacgaaaacaaaagagataagacttatgtattttattttagctgattttgtaaggaacgtatagcaacaatcgcataatgaatgataatttgcttagttgtcatgtttgtaacggctcttatcatgggattaaacgtgaattgatcaattaattgatagagtgtaatccctgatcctatgataataaaaggaacggctgttttaataatggattttaaaatatcattagttgaaacagtactgttctttttactcatggcaaggttcctgtccatttaagatttttttctccaaatcacaaagagtaaatataaagcactaaatagtgccctaacaaaagcaccaaaagttgacgctgacacagcatcaacgacttctccattaatgactatccgaataatatagagaacacctactactcgcgataggatgctaccgcctgtcatccaagccgatccattaaccattttatcttgggaattcatttcatttattttagtgtttgtttcatcgtatacttgcatacctcactctcatacgtttatgtagtaaagttcagtttacttctttcttcgttctctcacaacactttactggtcgattaaatcgtattaataaaaaattaaactgtttaaagtgaagataatttctatcatctttctattttcaacgaattgaaagtatatacaaagcagatacttttctggtataatggataaaagaaaggaagggatattaatgattaaactaccagttaaacagtggggaaacagtcatgctatccgtttaccaaaaagcctattagaaacattggaagcagaaaaagatgatgatttaaatgtagagattattaatcattcgattatattaaccaaagccgaaaaagaggtcacgtttgaagaactttttaaagactacaataaagaaaaattcactacagaaatacaacgtttttctcctgtaggaaatgaaaaatggtaaaacaaggcgatattgttaagataaatttagatcctaaacaaggacatgaacaacaagggtacagaacttatatttgtttgagttatcatggtgtcagtgactatgctaatatagcagtctttgctccactatcaaacacagaacgcaactatcctttatacattcctttagaaggtacgaaatcttcaggaaaagttttattagatcaattagttaccattgattataacgcaagaaaatatagttacatcgaaactgttcctgagaaattaatagatgaattattaatgaaagtaaaagtaatctttcaaaaagatgaaaaaataaagcgataaaatagttgtaacagtgaaaattatcttttagcaacgaaggctattaacgtttaaaaggactctaccgcttaaaaagcagtagagtctttgttgcgatacatgaaatgacataaagtcatgtatctagaaccttgtcaaatcaaggttattttttcatcttaaaattaaaaatcagacacaaaatgtatctgatttcttttataaccattgtttaatctttaaaaatgtcatcaacgtttgtctcaagaactttagctaactcaaatgccaattttaaagttggatcatatcgatcattttcaatggcattaattgtttgtcgagtgacgctacacttttttgctaaaacctcttgtgtaagttttttatcttttcggagttcaaaaattttatttttcatagctactcattttacgactataaatccagtaatatataaaataactaacaatcgcaattaacaaataaaataactccggataattaaactctaccattgctaaacgctcatcattcaagttaaagaaattgaaaacaaagttaataatgaaaaacattattagtaataaccaactacttacaatcgctttatgtttaatcaactgtgaacgttcgtcgtcctttttacttgtaacaccgtattcattatttccagtcaaccaaccaataacaaaaaacataattaaaccaactgcaaaagtaactatccacctgattaacaatcaaatcacctcactaaaatgtcaaaaactctttccacttaactttacaataataacttcttaatgtcaaaaactctttacatgtaatgtttgtactatcttactaaattggcccggtttttgaatattgagtaaagtagaatatcatcggcgtaacttacactctagttgagttttacatattcatcatattttattagatacatgaaattatatacaatcgtgtatccagaattacttaacaatagggttctttttttgtgaccgtcttcaatacacgatatcattttaaccagcgttttaatcgtctattcttttttgttaaaatagacggttaaaaagcctttttttattgtctgtttgtttaattcggtaaactcaatcttctagagttggttgataactatttagttcttttaattttttaaaggaaaacgttactccttgagtaccttgttctcttaccctagaacaaatagcaaagaaccgatctatttctttagaagtaaaatttctaaaacctaacgtattcatttgattacttatgtttataatttcatgcataaattaatactcttctttactcagacaaaaagtactctttactagtttacaacactatatagggcgcgacaaaatttattttagttgattgtgcaagaaatatgcaaaaaacagaatagatttctttttttaacgtagtaaatttattcaaaaaagaaccaacatacatgaattcgtatgttggttctttttattgattagacgagtatttaacgtaaattctcatataaagcagtcatccataaatcaaagttctcttgttcttcgtattgcatgacatcatacatttcagaactaacaacttggaattgtgttttaaaagcttctaaatcaaattcttccatagttaagtctcttttaacacgactaaatattttagcgaaatctttactgctgtatccgatatctcttctctttaacacaagagggagaccttttcttgtaatacccattgctgttgcagcattgaaagcagcttctttaacagtaaacacgcgatcacctgatgcaagtttagttaagatataccgtgatttttgacaatcgtattttgctaactcatgaacagcagctaatctaagctcccaatcatcttttgtcatagcttgtatttttaactcttcaatatttgttggttctgcttgaataattttcataaatacgttgcctctttctgtttctttcttactacccatattatagggttcgatttactattacaaggttatttcgattaaatacaggatttctataatgttttatacacacataatccgcaggcacctaaagcgctgtttattggctgataaggtttgaaaattcgttttgtatatgcttacactttacttttaatcctactcctactctttaataaattagagagcagtaagactaacttttattcatcacttagtcaataggttaagctgatttcgcaacttttagtagccgcttcgatggtgctttttcataagaaaggttagaataaagacaatagaacagattaaaaggaaaaaaggaggagctgatttaatggattcagtcgttttagctaattacattaaagaaataagaacaatcaaaaaaagtgagtggacaaaagaagatgagtcattagaagtgaatcaattatcctatcctgaatatcctgctgtagtagaggaattatttaactatttaaaccgacagtcgttttacgatgtcaattatttagataatatggaaagaattgaagggaaagctatctctttatttacgaaagaggaggtaaaaagctatttgacctcgttaaaaagagaagaacgttatggtgatggagtaattgctgaagctattgagttaggcttatttttaaaagtgttattaagattagaagatatacttcaaaaagaaaaagcagataaaggggagaataataatgacaaaaaatgaggaaaaagaagtcacaattaaaagacgagaagaattgataacgatacttaaaaaacgttttgatgaaaataatagtcgtcatagcgatctcaaatgggaaaaaatagaaaaaagattaactaaaagcgggaaaaaactctggtcacttagccagatggaagaaaccggtggagaaccagatgttattggttacaatgaaaaagaagatgtttatatcttttgtgattgctcacaagaaagtccaaagggtcgtcgatcagtttgttatgacttagaaggattggattcgagaaaaaataatcagccagaaaaaaatgcggttggtatggcggcagaaatgggaatagaactgttatccgttgaacaataccaaacactacaagacatgagtgattttgatacgaaaacatctagttgggtaaaaacacctattgctattagaaaactaggtggagctcttttttgtgattaccgattcggacaagtttttctataccataatggagctgagtcctattataccggtcgaggattccggggagtactgagagtataatatcatttttaaaacggaggagacaggatgcaatgaagataaaacagggatatgaaacgataaagaaaagtatctggctttatccagtcgtatatagtgtattagctttattattagcagctattgtcgttttattagacaatggatatttgtttgatatgagaccctatctacctgatttattattaacgagcgcaagtttagctaagtctgttttgggcgtcgtttcaagtgccttcattacaatcacaacctttactttttcaacaacaatggtcgtcttgagtgtctatatgagtgagttttctccacgagtagttgaaaattttctagccgatgagcg

SEQ ID NO: 383 - DNA, 23306 bp, synthetic construct
  misc_feature 1..23306: note = Synthetic
  source 1..23306: mol_type = other DNA
aggttatttaatgaatttaaagatgatcattattatcgtgcttttcgcatggttgaaagatgagggatataagtggatggaaattaaacaattatttacaaaagatattacaagagaaattaaaggtgttataaaaatagggcaaagcgacaatgaaaacagattgcaagagttagaggaatacgttgttactagcgagttacaaaagcatatgcagcaattttttagtgcatattgtcatgcattaaatgaaccaacagatcgaatgggtgtttggatttcaggtttctttggttcaggaaaatcacattttttaaaaattttatcgtatttattagctaatgaacccttagataaagggcaacttccgattgaattttttgatgaaaaaatagaaaataaacatctttttcagaagattaaactagcttctgggcaaaaaaatcaagttgttctatttaatattgattctaaatcggaatcagataataaacaaaataaactagctgttgttcgtgtatttaataaagtattcaatgaaatgttaggctactcttcttcaattccatggttggctcatttggaagaaattttagtagaaaaaggggagtatgaaaaatttaaagcattttttgaagaagaaagtggattaacttgggaagaaggacgagatgaagtttattataatgaggatgaaatggtacattctcttgttaaggcaacaggcagaagcgaagaaagcgctcgccgttggattgaaaatggtgaagaaaattatgaactcagcgtggatagcttcacaaaaagagtgtctaaatatgtagcaaatcaagaagagagctatcgtttgatttttatggtagatgaaatgggacaatatatttcagataatacaaaattaatgttaaatttgcaaaccttagttgaagatttagggaaattaaccaatggaaaagtttgggttattgttactagccaacaagatattgaagcactaaaagaaggtgtcggatcaatgaatgatttttctaaaattcagagtcgttttcatttaaaattaagcttaagtagtgcaaatgccgatgaagttattaaaaaaagattgttggataaaaaagaggaagctagtcaattactgcaaaaaaactatactattattgaatcaagtcttaaaaataaattagtattctcagaaaaaacagtggatatgaaaatatataaagataaaaaagaatttgaagaagtctatccatttattccgtatcaatttcatttgttgcaaaaagtctttactagtattcgagaacacggatctgcggggaagcatttggccgacggggaacgtaatttgttggaagctattcaacaagcagccttacattatcagaatgagaacgttggattactggttcctttttatattttctatgaaagcattgatcaagcattagaacattcaattcgttcttcaattattaaagcaaaacaaagtgatgatttggaagaagaggatatctctgttttgaaattactatttttaattcgctatgttaaagaagtaccagcaacactggaaaatctagtgacattaatgatcactcgagtggatgaagacaaattgcttctttctcaaagaatcaaagcatcattagagcgtctagaaaaatctattttaattcagaaaaatagtgaagaatatgtatttttaacaaatgaagaacaagatattaatcgtgaaattgatcaagttcaagtttcaaataacaaagtgatccatcaaattgggaaaatgatttttgaagatatcctagagttaaaacgcttttcctatgaaccatttgagaatcgaaaaagtgttgtttatcattatgatattgcgacttggattgatgggcaagcagtcaataatagtgctgcgaacttaggtgtgcatatacttaccccatactttgaagaagctgattcattagaaaatatgattgctttatctgctaaaaatcagcaagttgtcatcatattaaatgagacaagtcgatattatgaagacatgttaaagaaaatgaaaatacaagaatatttacgtagtcatatgtcaggaaatttatccgaaataacgcgtcaaatcgttactcgtaaaactagtgaacatagtgaacttggaaaacaactgaaaattcaattacaccaagccctagaacaaggtatttgttatgttaatgggatggtcattaaagagaaagttcatactccaatcattaaaattaataagagtttaggtgtattaatcgagcatatgtattcaaaactatcctatatgacaaagcactatcaagttgatgagttagcaggattagttaaatatacgcaaggaaatatttttcaagataattcaacagatcccaatcatctggcaacggaagaattacttcaagatataaaactgcaaacagaacgacatagtaccattgtcttacgtgaaatgcttcaacaatttatgaaaaagccaactggctggcgtgaagtcgatataatagcaagtttcatttatttgttaaaagatgaaaagatattttttaaaaaagatggtataaattatccctatacagattcccaatttgtacgaaccgtaactaggaaaaattatcaagaaaaaatcgtaattggacaaagaaaactaattcctgaaaagcatattagtatctcaatttcattagtaaaagatacaactggtaagcaattggatcgtctaaaggaagacttattggcacaacaaattagggaggtctatcaaaaacaattgactgaacttgaacagtatctaatgaattaccaccatcagttttatccaggaaaagaattgattgatgaagggattaagcaagtaaaattaattattaataaacagaatacagaggatttactgcgttatttatttgataaagaagaggaaattttaagttgctacgacgaactatacattgtgaaaagcttttttgaaaatcatatgccaatttatgataaatcaactacccttaaagagcgttatgagaaagattttaatttactagtgaatgaaaaagtgagagaagcgggaagtcagatttgtcagattttaaagcaaagtcatccctatcatttgttgaaagaactgcctgctttaaatgaagaatttattagacacatggtggaagaattggagattgctagtgaaccaatcttaagtcatttaaaaacgagtaaagaagcattactcgaaaatattgcgacgtatccgaaagcaaaaaaagaattagaacgtagtattttagatgggtttaatcgtttaaaggacaaaatagaacatgctgaaaccttaagtactctaaatggatataaatttgaaattgaaaatttaacagataagtatttgcaacaagtacaacgaattatagatgcagaaaataggcatgagaaagctcaacaaaagcaagtttcaataaaaaaagaatcagaatcaattagtactattcctgtagtggaacagaaaataaataaggaaccacaaaaaaagatctttcagaaaaaggatatcttaccaattaaaagcattgatattcaaacggaaaatgaactgcgtaattatttaagtgagattgaatctaaactattagctgctttaaatgctggacaaatcattcgtattttatagcagtaaagaaaggaatgtttttttgaataaagcagcattaaaaaaatttgcaacacaaacaagaacacaattgatgacgggtgtacgtatccgagcaagtgcattcggttgtacatcagaaggcctaaaagaggtcactaaagtagcagatcaaatggtaataaatggtgtacctatggataaggaagaacggaaattgtatcaaaagttagttgtgaaaatgcaaaagtatcaaaaaagtagtacgtatgaatctgcttatgaacgtttaattgaagaggtggcttatacatggtttaatcggattattgcgcttcgttacatggaatttcatgattacttaccaatcagaatgctgctattatcatccagaaatccactaaaaaaagaaccagatgccctaactcatgctatggaattagtcgatgtattgcatcttgattctaatttggtttggcaattaaaatcagaacaaaaaacggataaactgtttaagtatttattgatacaacaaagtaaacaattaggtgacattttgcctagcgcattttctacagtagatgatgttgaagaattattattaccagactatttattaaatgaacatcagatcattgacaatttaatgaatgaaacagataaggaagattgggaaaacgttgagatcattggctggctgtatcagtattaccatgcagaagtaaaagaacaagttggcggatcaaaaaatagtcaggttgccaagcaacatttgccagttgttacacaagtatttacaccaaaatggattgttcagtatatgttacaaaactcattaggtcgttattatcatcaattatatccgacaagtaaactttttgatcagtgggaattttatcttaatgaacctcaacaaaatggtttttctcctgaagcaacgagactagaagacattcgactaattgatccagcatgtggatcaggtcatattttaattgaggcctttgatttattttatacaatgtatgaagagcaaggttacctcgcaaaagaaattcctgatttaattatcaagaataatctatttggcttagaagtagacaaacggtcttatcaagtcagtcatgttgctctattacttaaaatacttgcacgacaacctagattattaagacaaaacaattcgtttcaattccatatcaccgtgtttaaggatgtcactcaaccaatttcgattgaagccttggaatggctttttaattcagaggaaattgatgaaattcgagagttggaaggaaaatttgaaaacgcaacgcaatttggttcattgttaaaaatgggaacaatctcaataaacccattatatacgaaacttgaaaagttaaaggaacgacaagaactagatttgtatgaacaagcattagcagaagaattagtaagcaatttagccccaattttaaaaacagcccaactattaatacagagttatacaattgttgtcacaaatccaccgtaccataataaatacaattctgatttaaaaaaatttatgaaaataaattatcctgaaacaaaagctgatttatattcagcctttattgaagtttgtttttttatgacagaaaatagtggatatacagctatgatgacaccttatacatggatgtttatttcttcccatgaaaagttgcgtcattttattttggaaaatggtggaatagcgaatttagttcagttagaatatggagcttttgaggatgcagctgtgacaatttgtacttttgttttacagaaaaagcagagaaataaaaaaggaacctatattcgtttatttgattttaaaggaagtgaaaatcaacctttgaaggtgagagaagccattattaatccatctgtatcctatcgttatgaaaaaaacacggatgtcttttatcggattcccggtgcaccaatcgcttattgggttagcgaaaatttatatcagttattttcagaaaagaattataagtcattgggtgaactgtacgaggttaaatctggaattatgacaggagatgacaaaaaacacttaagaagatggtatgaaattgataaaacaaagttaagtttattgaatagtacaagtaattttgaagaaaatacattcatgaaaaaatggtttccaattaataaaggtggcggtcagcggttatattttggaaatcatgattatgtaattgatttatataaagaaggcgaaaatattcgttactcgaaaaaaaattaccgattaagagcaaaaaaatattattttaataaaggaattacatggtcaagaatctcctcttcttatttttcttttagaatgcaagatcagcgaacgttatttggagatgcttctccactaatcgttaatggtgatctattgttgctgggatttttgaattctaaagtaacagcatatttattaaaagtattaaatccaactgttaataccttcgtcagcgatattgaaaaattgccaatcttatttaataaatccatagaaatagaaaaattagttaaagcaaatatccagctagccaaagaggattgggatgattttgaaacatcatgggaatttaagcaacatccatttttatcctatcaacagaatgagaaaaatttaagtcgtatttttgaaaattggcaacaaataacaactgctaggattcaacaattaacgaccaatcaaaaattaatcaatcagtattttattcaagagtaccagttaacgaaagaattatcaccgaaagttattgatgaggaattaacattatatagaagcaataaagcgaatgatgttcgctcctttttgtcttatttgattggaataacattcggtcgttatactttggatgagttaggcttattttttgcaggtgggaaatttgattcaaatgcatatcaagaatttcagccagatcgcactaatattatcccaattacgagtagtggatattttgaagatgatatagtgaagcaaattgagaaattagtgagttatttattcggagagtccatgttagaggtcaacctacaatttattggagaaggactcggtttaaaaaaggatgaagaagctagagagcgaattagaagttattttatgaaagaattttataaagatcatcttaaaatctatcaaaaaagaccgatttattggctatttaatagtggtaagaaagaagcttttaagggattaatctatgtacatcgttacgataaacaactcacagcgagattgagaaccgattatttattgcaattgattactactttaggacgtttggaagaatatacgaatcaaattattgaaattaatgaaactcctcgagccgtggtgaaagctaggaaagaccgagagaaatataatcaccaactggttgaactaagaaattaccatctttttgtagagtattttgctaatcaagaaatggagatagacttagatgaggggattattatgaatcatcaaaaatttggattgcctcaatttttattaacaaatcgaaaagataaaaaaatgaatcacttatttgaaaaaatagactaaaggagaagaaaatggtttatgaagtcgaagaaaaagtaaaaaaattatttcaacaagagcaagatatgcgaaaaattgttttttggtatgatggagaacaaaggtttagtcaggaaattgctaattatcaattagaatcaattcaattgattcacgtcaatcaacaaggttattttttgactaaatatataatagaaaaacagaatcccaaaatgaattatttactttatttcagtagtaatcgacctgagaataaagaaaatccattattggatatgcttctctatagtgaagagttccaagttgatggacttgctcaattagttgaaaaactagcaattaaatctgaagcagctaggataagtattgaacagcatcgttccttttttttaacgccttcttacttaaataaatttgaattatttaatcatgaaaaacaaatagaaagtgaatctgaactattgctggcactattatgtagtttaacgaataccaaagaaatgaccttacttgcagtattgattcagttattttatggacaagtgacccagcaacttcgattgtggaaagaggtagaaaagtatgacatggattcttttttttggtcgcaaatgcagtattattttgggtatatagggccacaagatatggatatattgatgcagagtatctttaaaacaaaaacagctcaagaatttgatggtaagataccaaaaagttgggaacaagatttgttaaataagccgcataatagtgtgattttcatcaatcattggatgaatcaaaaagacgaaatcgattcttatcaaattgtcagcgaaaaaatggcagaatctttaaaaattacgcaatttattaaaaaaaagtctgttgaattcttagccaaaggagatacctttaaattttatgataaacaaatcattattctcttggcacttcatttggttgatggaaccttacactacgatttttatgaaaaaatcctaattgatcgcagatatacgtattggtttcagcaatttgaatctatttatcaaactttaattgaaggaacccgattgttacgtttagtgcataaattttctgaacaaaaacagttggatacaaaagaaaacatgtggcattggtacgaacaagaagggtatgaaattgacgctcattatcgacgtttctattatgaattaggaaaaaatgaaattgaattgatggaaatttacttattaaaagaggaaattgaaaaacgctataaacaagtgtttttgataccatttagtgagaaatggacccatttttttgagtctgattcactatttcaagtagcagaaacacttcctcaaaggcagttttatcaagaatacgtagcttcacatatagaaaataatcatcgggtatttgtgattatttcagatgcttttcgctatgatattgcacatgaattgatgcaaattataaatatggattatcgattaactgcatcaatcgaaagtatgcgtggggtatttccttcaacgacagaatttggcatggcggcactattaccaaacaataaacttggcataactacaaaaggtgtggttcaagtgaacgataaacgcgtagattctttggaagcacgtttgaaaattctaaaatcaaaaactgaaaatgaaatgcaggcaacagcgtatcatggaaaagatatcttagctaaaaatcgcatgaatttgcgccaaatatacaatggatcgctgttaaattatatttatcataatacaattgatagtattggtgatcaggcttcaagtgaaaatcagatatttaatgcaattcagattgctatggaggaacttacaagactgattaaaaaattagtgacagatgttaacgcctcaaaaattatcatcacagctgatcatggatttatttacactgtttcacctttaaaaaagtttgaaaaaacaacaaaagtaaaaggcgatatcttgtctcaaaatagacgctatatgctcaatttacttgcagaaaaaagagcggaaaccttgatgtttcaattagatgtagtaggaaatcatgagatagttgggtacactccacatggtgtccatcgatttgctattcaaggaggaggcagtaactatgttcatggtggtattttgccacaagaaacgttaattccagttttacaggtgaagactgaacgtggaaaagagcctaagaaagaagttcaagttcagtttattggagaacaaaatcgaattacaaatgaggttacttacttggattttttccaaattcaacctgtcagtcatagccatagtcctaaaagagttcatgtttatttagaagataacgatggacgtagaatttcaaatgaatttattttattggctgattcctatagtgaagaatcagaagaacgattgatgcgggaaaaattaatattatttaaccaaaagtatgaactaacggaagcttattttttaattattcaaaatgaaagtacacctgatgaacaagagcgtatcagatttgtaattgatttgatacctaatcaatattatataaaataaaaatcagaaaagtattgcttttttgattcatctccgttaaaatgtagttaagagttatagctgactctgtaaggaaattatagtaaagagcacgtctaacgtgcgtctgtaaagcactgaccccctactttttataaagtagggggtcatctttttttatagaataaatatgatataataaagataaatatattgtttaggagtggagatatggggtatagaattggactagatattgggattacatcaattggatatgcaattttaaaaacagataacacaggaaatccttacaaaatagaacagatgaattcaattatttttcccgcagctgaacatccaaaaacaggtaaatcattagctttaccaagaagggaacagcgcggtgctagaagacggaatcgtcgtagaaagtttaggaaatatcgtacgaaaatgctttttattaaacatcatttattaactaaaaatcaaatggaaatgatttatacagacagtagaattttaacagacatttatgagttgcgaaaaaaagccttagatgaacgaattagtaatgaagaattgtatcaaatcttatacttttttgcagggcatcgaggatttaagtcaaaccgcaaatctgaattaactgaaaaagatatgggaacaatgttaactgcgattaaagggattgaagaggttcttaggaatggcacctatcgtacattaggtgagtatatgtacatggatgcaaagtatcaagaacataaacgaaataaagaaggcttagatcgctatctaggaacagccaaacgagctttagtagaagatgaaattaaacaaattctgacgaaacaatttgaattgggaaatttggatttaaccaaggagtttgaagaggcttttattggagatgaagagaaaactggtatttttaatgatcaacgagattttgaagatggtccaggtaaacagagtccctatgctggtaatcaagttgaaaaaatgattggcgattgtacctttgaaaaggatgaaaaacgtgctcctaaagcaagttttacttttcagtattttgatttactcagcaaaatcaatcaattgcgttatcgtgaacgaataggtagtgactatcaagagctaacttctgagcaaagagaattactaaaagaaaaagttttgactactcaaaaagttacgtttgctggagtcaagaaactattaggtttatcaccttatacacaatttaatttattaaattatggaacaaaaacaactcaagaggaaacggaaagtaaaacgaacttctattcactactgaattatcataaattaaaaaaaacattaccagaaactttttttaagtcgttatctgttgatcaaattgatgtaattgcttatgtgttaaccgtttattcaagtgatcatcgtcgtcgagatgagttttatggcaggttagctttaccagaagaaattgtagatttactattgccgcttaatttcagcaagtttggtaatttatcattaacagctatgaaaaaaattattccttatttagaaacaggaaaagtttactcagaagcagctggtttggctggctatgattttcgatataagcagatagatgaggaatatattgagaaaaatgttaataatccagttgtaaaacgggcggttaaacaagccattaaactagtgaaaaatattgaaagacaatatggctatccacctgatgcactcaatattgaattagctagggaaatgggtaaaacatttgcagatcgtcgaaaagtgatgaagtttcaagaagaagggcgaagaagaaatgaacaacttgctgagagaatccgtgacttaggtcagtcagttaatggagaaaatattactagacttaagctatatgaagagcaaaatggatttgatccatatactggtaacacaattccttgtaatcaaattttttcagatgtttatgatgtagaccatattattccttatagtaaaacattagatgatagctttggtaataaagttttagttagttcagctgcaaataaagaaaagggcaatcgaatcccaatggactatattggaggcaatccagagcgccgaaagaaattagaaactattgcaaattcaattaaaaatcctaaaaaacgtgaaaagctattaaaagaagagttaacaaaagaagatatggaaggttggaaagcacgaaatttaaatgatactcgctatatttctaagttactctatgattactttagacaaactattcagttcccagaattagcagtagaaaaaaagaaacgtgtttttgcgattaatggttcggttactgcaaaactgagagcgagatggggatttaataaagttcgtgctaatggagatgaacatcatgccttagatgctttagttgtagcatgtgtgacagataagtatatccaagaagtaacaaaatatagtaaaagaaaagaagttagagaaaacagtgatttgtggagattagatgaaacaccagaggctattgaagcagatgttgttaaaactaagacagactataatcgaatatttaatcaagctttcccaactccatgggtaaattttagagaagaaaccagatgtcgtatgtcaggaaatccatcagaattaatgaagaactatacatgggaaacttatacagatgaagaaattgcagatttaaagccaatctttattgtacgtctccctaaaatgaaaacgaaaggtgctgcccatgaagaaactttgcgtagtggaaaactttatgagcaaggattgaatattagtcgagtttcagttagccgattgaaattagataaaaatggtgtgatcaaaagtggaaatgcagaattttatcaagcagatggcaatggttggaaacttgttcatgagaaattaacagaagcattattggctcatggaggagatggtagtaaggcttttccagagggattcttacagtatactcatgaaggtaaagagtatatggtaagaaaagttcgagtcgttgggaaatcatcgttacaagtacccttaaatactaaactagctgtagcagataatggttcaatgatccgaattgatatttttagaacagaaaatggtaaatatcaatttgttccaatttatgttagtgataaggtgaaagaaactcttcctaaccaagcttctgcaggtggtaagaattcaaaagattggccagttgttaagccagaggactttttattttcactttacccaaatgatttaattcgcattaagcataaaaaaggggtaaaacatacttcaaaagacggaaataaggaagtagaaattaaatcagatttttttgcgtactacaaaggagctaatatctcaaccgctagtatttctggaattaatcacaataacttttttgaatttgaaggtgtgggcttagctactttaatcagtctagagaaatatcgagtggattactttggtaattactataaagtgaatgaaaaaatacgtcaagaattccacaaaaaataaatttgccattaaatgaatgaaagacatctaaaaataagaataatttaaaattgtgtccattttttagccagcaaaaaagccgtagaaacgttgaggttctgcggctttttgctgagggtactacattatagctgattctgtaaggaaactatagctctgtttctatcttttttaaatttttagtaactacattatagctgattctgtaaggaaactatagcttgcgaagtacaagtttgatgaacttactgactacattatagctgattctgtaaggaaactatagctctttctttcactttcatttttctaattttactacattatagctgattctgtaaggaaactatagcaatgagtaatcaacaccttcaattttgtttactacattatagctgattctgtaaggaaactatagctgtagtgagtgttcaagtaaacgttaataaactacattatagctgattctgtaaggaaactatagctcatcaatgactgacaaaattaaagcaccaactacattatagctgattctgtaaggaaactatagcaccttgacgctaaagcagtctatcacacacactacattatagctgattctgtaaggaaactatagcctcgaaagtctattgatcagtccatttataactacattatagctgattctgtaaggaaactacagcaaaaaccaatcaacatatttaatttattttaacgctctacaatgattttcataggagaatcatatacatattttggtttttgttgacaaatttgataaacaatattaatgtatgtttagatgtctaagaggtgaagcgatggatttagggaaaagaacatttcaagaaatcaaacaaggatactttctagctgaggaaggttaccattgtcattattgtgaggaaaatttttcaatcaatcaagtttattctcttaacgataaaatctatatggcccagcaagctattcagcagcacattgagatagaacacagtgggaattttcaacaattagtgggaaatgaaagcaaatataatacgttaactgaaaagcagaagcagttattaattgaatttgaaagtggtgaatcagatgcagaaattgctaaaaatttgggtgtatctcattcgacaattcggcatcaaaaatttacttttcgtgaaaaggccaagcaagcaaaattttatttagccttgtatgaaaatacttttacttcaattgaaacaaccgaagatgccttgatttctattcataatgaggcacttatgatagatgatcgttatgtaaccactgaaaaagaacaaaaagatattttagaaaaaaacttttcaacatttggaccacttacactcgttcactggcctaaaaaagaaaagaaaaaaattgtaattatgaaacgaatcattgaagaattgaaaataaactatacctatacagaaaaagaattaacgaaaacgttagccaaaatatatcatgatccagtgacattgcgacgctatttatatgattacggctatcttaatcgcacgcctgatggtggtgcatattggttaactaaataaacgaaggagtaagaaaatggaaaaagatcgcaaaaaagcattagctcaagaatataaagaaatgaaaaaatattatggcgtcattcaaattaaaaatgaaaaaaatgggaaaatctttattgacacagttgcaaatactaaaaaccgttggattgtctaccaaatgagcttaaaatcaaaccgtttaattaataaagaattgcaaaaagagtggaatgaatttggggcagaagcatttacctatactattttatgggaaaaagatagctcacaaatcaaagatatgaaatatgaattaaaaaaattgaaaaaagagtggctcttgaaattagaaccctttgacgacaaaggctatcataaaccactttaaattttgaaaagactatcactaagtggatagtcttttgttatttgaagaccccatattcattgcttatttttcgattagcgatatacttaatttagttccataatcgtcaaaaataaaattagaggagtgttatttatgtattatagtaatggaaattatgaagcattcgcacgtcccaaaaaaccacaagatgttgatcaaaaatcagcatatttcgttggctctggtttggcttcgttagcagcagcagtatttttgatacgagatggtcaaatgaaaggtaagcggattcatattttagaagaactgccaattactggtggtagtttagatggaatccataatccaacaaaaggttttattatccgtggtggtcgagaaatggaaaatcattttgaatgtttatgggatttatttcgttccattccctcattagaaatagaaaatgcatcggttttagatgaattctactggctaaacaaagaagatccgaattcttctaagatgcgggcaacagaaaatcaaggacaagatgctcatacagatggaaaatttacattaacagacaaagcttctgaagaaattgtaaaactttttttggcctcagaagaagaactaaatgataaaaaaatatcagatgtctttacacaagatttctttgattctaatttttggttgtattggcggacgatgtttgcctttgaagaatggcatagtgctatggaaatgaagcgttacatcacacgatttattcatcatattggtggattaccagatttatccgcgttaaaatttactaaatacaatcaatatgaatctctcgttttaccacttgtaagctatttagaagagcaagaggttcaatttcaatatgatacgactgtgacgaatgtccttgttgatcgggagaatggcaaaaaagttgccaagaaattaatttatcaagaagctggaaatgaaaaaattcttgatttaacggaagatgattttgtctttgtgacaaatggtagtattacagaaagttcaacatatggagaccaagaacatcctgctatcttaaattcagcttctggtggtagctggacactgtggaaaaatattgctgcacaagatccgagttttggtcgaccagagaaattctgttctaatattgccgcaaccagcttcgtttcagctacgctaacgacattagataatcgtattcctccttatattgaaaaaattagtcaacgtgatccatttgcaggaaaagtagtgactggtggaattgtaacggcgaaggactcaaattggttaatgagctatacgttgaatcgtcaaccgcattttaaatctcaaccaaaagatcaactagtagtctggatttatggcttatttttagatagaccaggaaactatgtaaaaaaagcgatgcgagattgtactggaattgaactagcggaagaatggctatatcatttaggcgttccagaagctgagattcatgaaatggctgtaaattcagccaatacaattccatgtatgatgccgtatgtgatgtcttattttatgcctcgtgcgattggagatcgtccgaatgttgttccagaagggtcaattaatttagcttttattggtaattttgctgaaactccgagagatacagtttttacaacagagtattctgttagaacggcaatggaatcagtgtatcaattattagcaatcgatcgaggagtacctgaagtatttgcttctgcatttgatattcgagtattattaaattcttctagtcgaatgatggacggcaaaaaactttatgatttgaagatgccatttttgttaaaacatctagaaaaaagaggtgttgaaaaatcaaaaggaacaattatttacgatatgttaaaggattcagggctgatttaagtctagtttgcaaatgaacgtactgaaaaagatagcatcagtttatatcgatgctatctttttttaatagaataaataaaaaacaaatctattgacatatgagtatgtattcatgtattatatagatagcaaatgaatatatactcatgtgaataaaattaactaaatttaaaattgaattttactttggagaggaagattacgatggaaacagttgaaaaaaaagcacacaaccatgaagaaaaacatgaccacaatcacgaaaaaggtcataaacatgaccacagtcaaaatcataatcatgatggacacaatcatggcgatagtaaatcgcctgtcattttattttttattggtttggcggcttttgggctagcgctattaataaaagaaaaaaatgtcatgcaaagtgcattatttgttggagctatggtttcgtcaggctatcatattattggtgaaggtataggggatacaattaaaaatacaataaaaaataaacgattttcacctaatgtccatcttttaatgactttagcagctataggtgcagctattattgggaattttgaagaaggggcattactaattattatttttgctggggcacatttcttagaggaatatgctgaaggacgtagcaaacgtgaaattacaaacttattaaaaatgaatccaactgaagcgcgtttgattcaaccagatggaagtacaaaaacagtggatgtatctacgctaaaaattggagacaaactacaagttttaaatggtgatcaaattgccacggatggtgtgattttatctggaatgacgtccatcgatgaatcttcaatcaatggagaaagtattccaagagaaaaaacagttggtgataatgtgtttggtagtacgattaatggcagtggtgtgattacaatggaagtaacgaaggatagtagtgacacagtttttgctaaaattatccaacttgttaatcaatcacaatctaacttatcaaaaactgctactaaaattcaacgaattgaaccttactatgtaactcttgttcttgttttagtaccaatctttattatcctagcaccaacattgtttaactggacatggaatcaaagcttttaccgtggaatggtgttcttgatttcagcttccccatgtgcgctggcagcaagtgcaattccagcaacattgtccgcaatttctaacttggcaaaacgtggtgttttatttaaaggtggttcttatttatctaacttggctgaaattaaagccgttgcatttgataaaacgggaacactaacaaaagggaaaccttctgtaactgatttttactttgaaatggctgaagcaacagattctgaacaaggatacatggatatcattgttgcaatggaaaaaacagctaatcacccattagcgaatgctattttaggcaaatttaacgctgaaaatatgttgaacatcgaagttgaaaataaaattggaacaggcttaattgctgaatatgaaggtgcaacttaccaaattggtaaacctgaaatatttgaaaatgtcgatcaatctattcaacaacacaatcaagagtatagcaatgaagggaaaacagttgtttattttgctaaaaataaacaagtattaggactcattgcaatgatggatgtgcctaatgaaaatgcaatcgaagtaatccgttatttgaaatcacaaaatattcatacaacaatgattactggtgatgctgaattaactggacaagcagtgggacgtataatcggaattgatgaagttgtaggaaatgtgcttccagaaaataaaacacagattgtaaaagaacaacaatctcgttatggaatgactgcaatgttaggagatggagtcaacgatgcaccagctttagttacagcagatattggtgtggcaatgggcgatggaacagatatcgcaattgatgtagcagatgctgttctaatgaaaaatgatttgacaaaattcagttatgctcataagactgctaaacgtttagatcaagttgtttggcaaaatattattttctcaatgttaattgtagcaacattagtctttttaaacagtattggcaaaatggatattacgctaggtgttttaatccatgaaggtagtacactattagttattttgaatggtttaagattattgattccaactaaaaaatagaaactagactagaagaatcgaaacaaaacttatttttagttttgtttcgatttttttttaacaaaattcttgtaactgttaagagaacatgatatagtaaaaaaagcaaaacgtaataatttcgatttataaagtgtgaggaggaaaaacatggcaaaaaaatcaaaaatagctcaagcaaaaagacaagttctaatgattgaaaaatatgctgatttacgtgcagaattaaaggcgagaggtgacgtgaaggccttagcaaaattaccaaaagcttctcatccgaatcgcttgagaaatcgggatctattagatggtcgtccaagaggttatatgaaaaaatttggattatcccgaattaattttagaaatttggctcatagcggacacttacctggtgtaaaaaaagcgagttggtaataaggggcagtaaacttaatgtatggaggtgataaaaatggaaaagatagattcttcaagtgcgcgtaggcgattaaaaagcagaaatatcaaaacgcgaaaacgtgcattaaaacttattaagcaagctaaaactgagaaaaaaaagaagatggttggttcgccagtgtgaacgcttgctagcttggaaatttaaaggcattcctaaaaatagaataaggtatgaaagaggctgaattgtagcgtattctaaacaatgaaaagttcataataatcatcctttttcctagactttttgcgtgaaataacttaggataaataaatacgcttttggagttacatgctaggaggaataattttgattaactatctattaaatcgttttgaacgcaattataagggaacacgagaaggacttaggacaggactagggattttagccggaaaaataggcttactttctaatctagttctttttttaatcaaattaatgattggattgctttctggaagtgtctcaattatggcagatgcgattaataatttgtcagatacaatttcgtctattttgactttaatcggtttctatatctctggtaagccagcagatgcagaacatccatatggacatgagcgttttgaatatatcagcggaatgctcgtatcagtattgatcacctttgttggttttcagtttttgattacttctgttaaaagaatcatgaatccacaaagtgttaaagtaacgggacttgtattagttattttaattttttcaatcggcattaaaacttggcaaagtttcttttatcaaaaaacagctaaaaagattgattctaatacattagttgcatcagcaaaagatagcattaatgatgttttcacaacattaacggtattattatcagccattgtagaagggataaccggtttacgaattgatggatatgttgggttattgattgctatttatattatctatagtggttttaaaatgattctggagtttattgatgcattgatgggaacaagaccgccacaggctgaaatcgatgctatgaaagaacatttatctttagtaaaggatattgttggttaccatgatctattgattcataattatggacctaataaagtttttgcatcggttcatattgaaattgacgatacgtgggatttgagaaaagcccatgataccattgacttgattgaaagagaatttaaacacggattaggtgtagacttagtctgtcatatggatcctgtaagcctacatgatcaagaacaaaacagaatttatctattattgaaagaaattattcattcactagacaataatttaaaaatgcatgacttacaaattgagcaaaaagacggagaaacttcaactatttactttgatattgcgattcctaaggattttaacttaactgataatgaattagaagagcgaattcaatatgcagttgaacaaaaaattggtgaatttcaagtggaaattaccttcgatcatatttatctgttgatttaaatgaacaaaaaattgtacccaataaaatagttgaactttttaaatgtttttatttaaaaagttcaactatttttttgcaaaattaaagagggtaatgataatattttttctgaaaatatagaaaaaataaaaaaagatttacggttgttatttttcaaggaaattagtaaagatatagatagaaaactccgtctatataggaataagaaaagttagatatattttggaattataagaaaaattatttaaatttaagaaatagacgtttttttttgaaaaagtgcttaaaaaagtgtctaaaattaaatgaaataattttttttttttagataattagtaaagttaaaaaatattagctatagatttaatggtaaaatgtataagatgtttagcagattttgagaggagaattcaatttgatagtatttttaattttattatttgtctttaacggaacattactaattacaggaagatggtttttatacaaacaaaaagataaattttcaacgatttttttaaaaagtattcaatggttaatgaatggcatctttttgatagtaaattcagaattgttattgtcgacaatgtatcccaatacataccatccagtcatttttgaaattggagtgtcgaactttatacttacgcttattattcaaattcctttttacttacttatttatggcttccttggtttttatatagggaatgctttattgaccgttttaacctttatattaggtgtttcaaattacgtgaagtttacattacaaggtttgcccctatttatttgggattttttatcatctaaaatggttacagatgtgctttttaatatggtattgaaagaacaattactgattacaattctttcacttattctattaactgctatgatttggggcttgaagaaactattttattcttggcattttcccactgaaaattggaaattacgaggaactttagccgcaattggctgtattagtatggtgtttttcttttttaattttgaacagatttactcgaagtttaacattcaagcggcagagtataacaaaccgattcaaaaaagttatcaagaaaatggatttgttctatcgtttcttgggaattctaatcaacatggaatggttatgcctgcgaactattcaaaagaaacagttgcagaggctgtcactgaaattaaaaataaaatggatgcgattaataagccaaaagttgagctaattaaagaacaacgaccaaatattatctttattttaagcgaagcattttgggatccaactacaattaaagaagcggaatggacacaagatccaattccaactatccatggtttaatggaaacgtctggtgggtacctattttcaccagagtttggtggtagcactgcgaatgtagaatggaatgttttaactggtttttcttctaattttactattgatggttatattcaatacaatcgaacaactcaactaaaacaggcaccaagtattgttgaacctttgaaaagtcaggggtatcaagcgattgccttacatgattatcaaaaagagtattattatcggacagaagtttacaaaaagtttggtttttcagaattcatttctgaaacagaaatgacgcatcacgatacgaataatattggtacgtacattagtgacgcatctatttttaaagaagcagttgaattgatagataaaaaaggaaaagataatcctatgttgctacatatgattactatgcaaaatcattatccttatacatcaaactctaaatttggccaaatagattatgtgaagaataaagaggcattagttgatggtgaccaatttaatttatatataaatgggttagcagatacagacaaggcagttaaagaattattaaccagtcttgaaaaagttaaacgtccaacctatgttgtcttttatggtgatcatttgccatctttaaataatgaattctatgagcatgcaacctttaatacaaatcaaaaccaagtcgttgcca

SEQ ID NO: 384 - DNA, 19107 bp, synthetic construct
  misc_feature 1..19107: note = Synthetic
  source 1..19107: mol_type = other DNA
cgttcgacaaagcatcttatcgagttaagtgagcatttttctgaaataggagttgatttcatttcaattcaagatagcattgatacttcaactgctatgggaaaattcttctttcgcacaatggcgagcatcgctgaactagaacgtgacattattagcgatcgaacaaaggctggattagaagctgctagatcacgaggaagaaaaggtggaagaccaagaaaaagtttaaataaagtagaaatggctttaaaaatgtataagagtaaagaatatagtattaaacaaattactgaagcaacaggtattagtaagacaactctttatcgttatattgattgtagaaccaaataaccaaaaaaactcttccctgaacgaaaggaagagtttttttggttattaagataaattgtacagtgtaatttttttatgtaacggaatgacacgcatttattgtatacaattataatacacattaacaatgttaatatatcccaataataacaactgctaatttatctagtgaaatatacgatatttagtatattattaatatattttcatagtattatatacatttttttacatattatactaataatcccatttgtattatattttaattgtatacaaaataaatttaattcatgttaacatattttagtattctaataatgagataaggtgaaaaacagattttaaatagcgaggtcagtatagtttttttggaggaaatatatgcgattgattttacccgatagtataaataaatttttttggactctctttccttttgttcttgtacctaaagcgatttataacattttttatgattggcaacttcaatttcatagatttaatgagttagaacatttaggtctgcttttatatgtgattgtaataagcgcatgtgagagtgctttatttattatctttatatggatgattatcgatttaataaagaaggcgtttaagtcaaaataagctcgttagttgaacaacccttgaaaacgagtgatattgtgaattaaaaacaatttgggtagaaaggtatcgcgatcataagttaataaagcttcttatacaaaaccacttaaagtacaaacttatccaataacgttaaaggttgaaaaatatgaaaaaaatacccttgaaaaattacgtatttactattttaatgaatctgcattatatagtttttcacattataggttcaatttataaattgcctacaatactattgttattactattcttaatttcaatgatagtcactactactgttgcagaatatttattaaaaaagaataaaattgatagaaaaatttataaggaactatcataattcactacatttttattgttgtagatgaactcccttccagatacagatacaagatacttaaatagtccttttgatgtaaaggtatttgcaagattcaggttggaacgtataacaaattttaaaacaattaagagatttgaagatgtatataaagttcaggtcttctcttattgactttggtgattcagtgggaattggaggtaacatgaagatcgtaattaatattattaagatttttagtttttgctctttggttgtattaggtgcagtaaatttacatttaagagttattatttcatgtatatttggattaatgattattgtgcaatcgatagtattgaataatagtttaaagtgggaaagagttattaatataatcgtgggggtatcattaattattttaccactaattagtaaaatgcattacgttaagtttgtttttttcggagcaactataatataccttttcatagacgcggataaaacctttaggagtaaaaaaaatcttaattaactgataatagcagtaaaatagattcggatgaaaaatcaataatttgcgtttgattacacgccaataagataaagcaaagtatgattcttgttaactatttaattaagaaaggggatactagattggataaagttaaattaaattatggtaaatatgctattcctagaatgttggacgatatcattaacctccaagaagagttaaataaagaaggattattacaatttggtgaaataggaggactatatttttcatattatgaaatagatactagatatttaaacacacctcttgatgtaattgcatttgccgggtctgggtcggatggaattcattttggatttttaacagattttggacaggtcagagatttagaagatgcatatattgttcgtgtttctcctatggactttgatgatcctgtgcaaatagttgctagaaatatacatgatttcctaagattagtttgttttacaccaagcgcagtacattgtgtagatataacaaccagtgaagcgtttattaatgaaaatcccgatttatctgatagtcagttgtttgaatggaatgatattctcgttagactaaaacttagacaaaaattttcacttaaacctattaattgtttattcgcttttatgcaggaagtgaaaatgcaacgagaatctaaaattttcttacatacaaaagatgggattggtgttataagcaatgattgtgaaataaaaggaattggtgtgaatcaagatttatttgatttgaactgtgattatattgaccaagaagaagttgaagcattttttgcaagagcaccttttgaaggtaaattagtatttttacgtgatgcacaatcacaagggttgatctttgacgatgaagaattaataaagttccttaaagaacagttaaaattaatgagtttagaggatgaagtaagaagactcgaagagatggagctggaattcagtgaccaagtgacgggagaaggtacattagatacaacaaacttagaaaagattgaacccataggtagttttacagaagaagatgcaaagtacattcctttaaattataaagcaaattctcttgaagatgggcttgcagcactaccgtttaagattctatttcctcaggaatttccatttaaagtaaatcctattgaaccacctatgatttgtgataagaatcaagatggtaggaaactaagagttagttttcaaatttcacatcatagtaattcggaattgatagttatgtatatttttgttcaaaactacaaagttgagttgggatactataagaaaagttatctattaaaagacggtgtagtgggttatttttcgggacattcgaacgacatgggagttatggtttggagtgaagactcagataaattcagtaataaaattgaggatgagcttaaatttgaaaaagatggtatcaattatagtattcagtatgttgcatataatgttcctaggggaactgtacaaaaatatattattaatattgcaaatcaaatgttgtagctactatgctaaagaaaactggcacactaatgttagagtttaagaacgatcattgaagaacaaaatagtaggttaggcggtatagtctatgggtaaaatttggtttgtctaactagagaggaaaaccacaacatatcgtactaacaggtgactatgcttggtatttaaagcgtagagacagtgttgaatcattgcgaccattacgaaaaaagtagtgtgaaaatcactgcttacttaacgtacaatttttttgtcgtctgacttatcttagattaatgtaaaatacttttatttcaggtgtagttccattgccatcaagctaggttaaacaatgttagtttcagtagaaatttattagtattaacacaaaaaggtttaacattcttattgcaacagtaatcattatagtagcaactgcaactttgttttcctcaggagacaacatggttgtttagggaaactttgcaagttatttaaaattatattttttagggagtttgaaatgaacaaacacaaaaaattacgtggtaaaaaaagaatttttcgaaacatttggaaatccgttaatacttttaaaatagaaattgataataattcttggattgatttttatcattgtcatttagatatggctggaataggtaatcgaagttggaaaataagacatgaaattattagagctcatctggaattatataactcattaatagcacaacttgatgaatttggaaaaccgtttcaatggggtgtgtattaaattagatcatgcaggttacgatgcggtgtatctgcattcagagaacccaaatagtcataactttccatatcagtttgatgaaattgattgtaaaaataaatggttgatacgccataaaaaaacgactattctctttagtagattagttgtttttttatttttatattaataattacgtttccagatatgcacatctctattaaaatttttctgcaaattccttattaatataagcaatgttatgtaataacttcattaaaaattccattttttcagctgtttcttcaatatcatttagaagttgcaaaaggcaataaactactaccaaaaatttatgatattctgataaatccatttttccaataaatgcaactttatctttctcatgaaaattataatgtccttctaagtgtttttcattaagtaaatatgaatccgcatagatttctccagaactttctgaaccaggctctaattgatcgtcaattaatgaaattaagtcttgttcggataatttggaataaatcttaattaatttccttacttcaacggcaggagcaccagctcgcacacctaaccaattaatagctaaatatttataatccatttttacaccttctttttttaaataattaatattgtagattgattgtacataaattgcataaaataaatacaaatcattatattttttgcattgtatcctatttactaacaaacaataaacttcgtacaaaaaaaaccacctaagtttggtcgcccttaggtgggttttttaagctttaaaattcacattttgtaaatttcttttacgtactgtaaagatattatcgcgatattgcataaatcaacataaaaaaagaagatcacgttaattctgtttcaacagcagaatttaaagtaaaatcaacccaattgacaatattttagaaaagaaaaaacccttaaataagttgaactttaaagtttttttcaattgattattaaattataactgactttgtaaggaaactataacgttagtacaagatttatatgagttgaataaattaaattataattgactttgtaaggaaactatagccagctatttattttagatgtttatcatctgattaaattataactgactttgtaaggaaaagatagcctataaatacatgaagtagaatcatataaaattataatatataacatccgcgtaaataaaatctcctatattagggctttttattttgaaattcattagcaattatggatacgattgaggtcaaaactaaagaaagaattgaataatctttaggtaaatctaaaataaaaattagacaaatatagataattacaactataaatatagcaatacgattaaaccatcttttttttcttttaatatcaacattcacaaaatctaactcctatcttcatctaatcaatttccattttatctatcaaacgaccattataattctcttttctattacacaataacattaaattgtgaaaatacagaaacagttgaacgttttgtgtattaattgtatactatttattgtaaggattcataattgattttgtaaggaaactatagtaaagggcatgtattacatgcgcctgtaaagctctatccccactcttgtaatggagtggggatatctttttatattttataaatttaacaaggacgtgaactcgatgggttatcgaattgtcttagatataggaattgcttctgttggctatgcagttttaaaaactgatgagaagggtaatccctataaaattgagaatttcaatacggttagattccctatctcagaaaaagagggaaaattactaaatataattagaagagaaaaaagaagtgcgcaccgcaggaatagacgaataaaatttcggaaatatagaacaaaacaattatttattagacataaactactaacaaaaaatgaaatacaacagatttttacaaaacttgtgaaagatatatatatgttacgtgtaaaagcacttgaggaattaatctcacatgaagaattatttcgtattttttatttttttgcaggtcatagaggatttaagtctaatagaacatctgaacttaaagaaaaggatatgggtccaatacttcaagcgattcaacaaattgatagggaaattgaacaaaaggggtatagaacaataggagaatatctatacaaagaagataggtattctgaacataaacgtaataaagatcgtattgatggtggttatttaggaactgttaaacgagaattaattgaaaaagaaattaaaatgataatagatatgcagagaggatttggaaatacagcgttatctttaaaatttgaaatagagtttataggtaatgaagaacagagtggcatttttaatgctcaacgtagttttgatgaaggacctggcgagggaccatattccggtaatcaaattgaaaaaatgattggaatttgtacctttgataaagaggaaaaacgggcaccgaaagcctcgtttacttatcagtattttagtttattatgtaaagtaaataatttgaaatataaagaaacgttaggttccaatctaattgaattcaatgaaactgatagaaagaaaatcatagaaaaagccttacaacaaaaaaaagttacctttattactgttaaaaatctcacgaaaatacctaaagaatcgagatttaatcttcttaattatagtagtgaagaaagtctatcagaaacagaaaaaagtgttttttatgaaatgaaggcataccacgaattaaaatctgcatttgtagacagtgagtttaaagaattttctactgatgaattagataagataggatatgcattaacagtctataaaggtgataaagctcgtattgaatatttaaaaaacgagttaaacttaccaattgatacgatagaattattattaccttttaaatttagtggatttggacatctatcaatcaagacaatgcaaaagattattccgtttcttgaggaaggattaacatacgataaggcatgccaaaaagctggatatgactttcaatataataaaattacacgcgaatatatttatacgagcgtagtgaatcctgttgttaaaagagcagtaacaaaagcaataaaagttgttgatactcttattaaagagtatggagaaccagatgctatccatattgagttgtctcgtgaaataggaaaaagtgcagaagaaagacaaaaaatcataaaaaaacaagcttctaatcaaaaaaataaccaaaagattataaagaaactacaagaaaataatatatctattaatggtgagaatattacacgattaaagttgtgggaagaacaaaaaaatcatgatctttatgaagacaaagtaataccatttgaaaaagttttctcgagtgaatatgaagtggatcatattatcccatatagtatcagttttgatgatagttttaataataagatacttgttagtaagaaggccaaccaggaaaaaggaaatcgcttaccaaagagttatctaggaaagaacaataataagtttgaagagttggtaagtatgattaaaaacccccaaaaaagagaaaaattgttgaaaatagaattaactgatgaagaaaaaagagctttaaaaacaaggagtttaaatgatacacgtcatattacaacgcttatgcatagttatttgcttcacaatatccaatactcaaataaaattgaaaaaaaacaaagagtagtggcggttaatggagcgattacagccaaattacgtgcaagatggggatttaataaactaagagaaaatagtgataaacaccacgccttagatgctcttgttgttgcttgtattacttcaaaatacattaaagaagttactaattatagcaaaataaacgagttacgctacaataccagtttgtggaagaataaagacataatagaagtattagagcaagaaattattcactcaaaaattgattacaatcgtatttttaatcaaaagtttcctgtaccttggtttaattttagaaaagaagttttagctagattatctgataatccgaaagaaaagatgaaaaatttaaaatgggacaactatacagatgaagaaatagaacaattaaaacctatgtttgtggtacgagtacctaatcgtaaaataaaaaaagctgcacataaagaatcgatatatagtgggaaattgtataaggaacaaaataatattataaaaagatgtcctatacaaaaacttaccctaaatcataacggagaaattgtacgtaaaaatgagaaattttattgttcggaagatcgtgggtggctaactttatataatgcaattaaagaaaaacttcaggagtatggagggaacggagaagaggcgtttccaaacggtgaactagaatataaacaaggagaacatatttttaaagttcgtaaagtaaaaatggtttcaaatagtacaataggagtagcattaaatgaaggtaaatctatagcgaaaaatgacaatatgattaggattgatgtatataaaacttctaaaaagtacgtatatatcccaatatatgcgaatgatgtagtaaaagtagaattaccagttaaagcttgtgtagcaggaaaaaattatgataaatggttaaacgttaatgatgatgaatttttattttctttgtatccaggagatttgattaatttgaaatcaaaatcaggtattacactaaattataatggcgagataaatggtccaactagagttaatgaattactttgttattatgtaggcgctgatataagtaatgcgaatattagcatcgaagcacatgacagatcatttaaagcaagaactggtatagcgagattacttactttggaaaaatatcaaattgattatctaggaaattactataaggtacatgaaaaaaaacggcaatcttttactaaataaagaagtgtttgcagttctgttagatttttttacttcaaagtaaaatcaacccaattgacaatgttttagacaagaaaaaacccttaaataagttaaaatttaagggttttttcaattgattattaaattataactgactttgtgaggaaattatagctttgaatttaacactaataatcgtgcttattaaattataactatagcgatatttatgattaaaaaatattgctgtgaattaaattataactaactttgtaaggaaactatagctaataaactgtaaatttttttaaaattttattatattataactgattttgtaaggaaactatagtctgaattgaaaaaaatacttactaattgttagcaaaggttttttctgcgtttgagtacgacaaaccgtattaatacgcatgagctgttttctgttttcagtagtaaacttgtaaaaattataaagatattggagcttttttattatttaaaggtaaatgaacacctggttatgacattagagataaggattagagggttaatctgaatgcaacgagttatatttattattttatttgtagtattttcaattttaggaattggagcacaagtaatggcgggttttataaatgttatttttccacttggtgcccccttttattacgtaaatgttattacaaaaacttcttggattatttatatatttttatttatttgttggtagtatcatactggaaatcaaaaatttcttactctaattataactcaaaagatagtgtaattaaaaacgcaaaagtaggtggtattgttcaatggagagatgctaagactggcgaaatttttcacgcaacaattgtaactgaaaaaacgaatagtactattaagttaactttcattcaaatgacaatattaatctggattttaagtcatcaaaaataagtgatgcaacaattaattggatattatttagatttactaattagtatctagaaaggtttgggaaaaaatgaaaaaaaaaattataatattatgcttcattggtttaattatcttaacctgtgtttcctcgactcttgcaattagaacatatatgatcacacaagcacatccaatagctgcactcacaaagttagaatatcttggtagtaattctaaaaatggtaagtgctactactcagatggttggtcagataaagaaacgggtaatggatttcatacgttttgtgctaaaagaacctttttggggatattttggataagtgcaggaggttaatagcaaagataaaaagaaggtcttcaaagatcttctttttattatttatttttgtttttgtcgtgcattaaattttgtaacagaatgtaggattttgaaatttataaaatatcagctaaaaatagggaaatggattgtaatcgaaatgttgcaaaatctacatctttgcagcgcaacataaacccgtgtttattctaatttttattagttgcatatatcgtgttgcaaaaaaaagttgtgaaaatgtgaaatttacgttgcaaaataaatttatgcaatgtttaaagaacaaaatcaataaagacaggtgtcattacagcactacttctaagtcgacctctatttcgtaatttgcatatgcgtgtattctattaaaaagaaatatgataaagtaaaaacttaaaataatataaaaatactaggagtataagtatgaaagagaaattagcaattccgattaattatgataatttttgctttccaggtcgttggataagcgggattacaatgattttaggtccaattttcttaatgataggtgtagttcttcgaagtaaatatcacttcttttttcctgaccaactgactgcatataaaaatcatcccacactaatctttttctcttatagcttttttattggtggtaatattttaatgtggccgggtgtaaacacactttcaagaatgattggtgtaaagaaaccagcgtgggcattatggggtggtacttttgcgatgttgggactatttgctagaacttttcatgcaggagtcgatcatttagcatttcaaatgactcgtatccaaggcgttgatacagcaataaaggttgttcaggattcatatggtgcatatcatatttttcatacgtttgcgccattaattatgtttggatggataattcttgcaattggtgcatacatttcgaaaacattaggactattccgttccatttcattagctctaatgagtggattacctttaggtgttttgaaaggtactactacattttcaataattgctatactaggactaggtataacatttatatcccttggatttaaattaataaatgaaaaacctaaaccttccttaaaacaagtattaggttggacattgggtataattttattaattgtttttctatacatatttggtgaattaggataagtaataattaatctgaatttgcataaatttaacaaattttatgtaacaaacgttaagtatcatgtagctttactaaatgttttaacacgttatggcttccaaactagacaaaaaactctcttccgatatcaaaagggaaagagttttttgtttttacatacttggcaaaatactacaataagggattattgtataaccatgtgctacatcaactagaataactaaattatatacaattgaatactattgtctaggtgttatttatgcaggattatatacagaaattctccaataaactacatgtgaaatcctccacaaaccagttaactagctgtatagtttattcacacaaaaaaaccaaaaaagaccaacgtccgcatggaggtaggtcttttttgggttgtgtaattagcgaatcgacaaaaaacatttattacaaatacataataacatacaaatcttaaatttgtatactaattacatacaattaatgttatagtctaataaaattaaccagaagaggcgtgtgttatgattctatttcatttttatttactaattaatatttttttaatttgttcgggtatctatattgtaaatatgcgaaacagaaaaattggataagttcaataataggaaatgtatttatatttatgggtttactagggacagcatattatgtatttttagtattttttgattctgtctttttatgaataaagtacatttaattatgggaacctattacttatttttattaaaaaataatgataaggatattagtgagaatttgtaataagggggcaaagccctcatattttgtttgaatttctggtctttaaagaataaattcaataaagacaggtgtcattacagtgtaacttttaaattcaaattaaaaagtattttaatttgaaaatagtagaataataagtaaataaacttattctttaacctacaaactttatgtataaatttgtaaggagaaaaggaagatgacaacacgaaggaaaaataagaacccattgcattttatatttatcgcaaacattatcattacacttactttttcaagtttctatttaatgccatttactagaattgctgaactttcaaatatagatagtttatttatttcaacaaatgctgtaagtgtgactggtttaaccacagtaaatctcgtttaaaccctatactttttattcagcaagcatggaacggaatgaaggtgagtatatggaattaatagataaacattaaaataaaaagattttcataattgaaataccttgatggagaacatatctacgctataagtgggaaacaaattttgcatctatccttagagtatttgataaaagtattgtgtatttagatttttttgtgttggcatatgtttagaaattttattaatgaagggatagatatgtagtagataaggagagtttactttgacaacaagaatcataaaattgtttaatttatattagacgtccagagcaattaacaagtcaaaatgaatgactttccagttttcattgtaaagtcatacgttttttggttctggtgcaaaaaaatgtaatcacagtgccatgagattgtattttttggctaactgtattcctaaatctgggaaaaatacattctatattaatggttgaaagagtctagtataaatgaacaattttgctgattattattgaacactttcttctcccaaaatagtcttcttgtattcaaacgataaatttcgccatttaaatgaacaatttctgctggaaatatgcaaacttaagtgttcatgtgtataatttttagatatggatcattattcattgggaaaagtatataaaatgactaaaaaaagaataaaaaactggaaaaactggttaaaaattactttaaatatacaaataagggtctaatgactcttaataatttctacttttgtagataattgaaggtgtattttctagattcttgtcaaatgatcaatattaatttctactgttgtagattaggaatagcgtatgttctcgccatactgtcaaatgattttaattaatttctactattgtagattgcttggagaagctaataatatttgaaatctaataacctataataatttctactgttgtagatcctcatatacagacaaagaaaatcaaaaatccctttctagttatggaaagggatttttgatttgtactttagtaagttagacgaagtaattttctaaaaaatgtaacacaacaaatacaatattttgtatattcaaaatattgtatactaattatatccaatatgttattgtttataacaatatttattcttaataatataagtcaaaagatgaaaggaatgattaataatgaataataatatgtttaaagattttattaataaatacagtgttccaaaaacgcttaaatttgaactaattcctattggaaatacaagtgaaaatataaaaaaatataagataattgagacagatagagaattagaaaaaggttacgaaaaggtaaaacttttaattgatgaatatcatagaagctttatttctagagttttaaacaatattgaatttggagaatccttactaaagtatgaggagttttactctcataacactgatttaaagagagaaaaatttgaaattcataaaaaggagatgagaaagaaaattagtaaagcttttaaagatgcaggcgcagctgaactttttaaaaacacattaattacgaagttattacccggattgtatgagggaaaagatgaggtattaaatgtactaaatttatttaaaaaattcactacttactttaaaaattttcatgaaaatagaaagaatatctattcatcggaagaaaagtcaactgccatatcttacaggattataaatgaaaacttaccaatatttatacataacattaagacatatgaaagaatttgttctttaattgactttgatacagcgttggaagattcatttttaaaccaaataaagaaagagcttaactgccaatttttttctgagttcttcaatatacatacattcaatcgagtattatcacaagaaggaataaatagttacaacttacttcttggaggaaagagtgaagaagatggaacaaaaattaaaggagttaatgaattattaaatttattttgccaagaaacgaaggaaaagttaccaaaatttaaatttctcaaaaagcaaatacttagtgatatggattcaaaatcatttgtattagatgcatttaattcagattccgatgtgttagaggcgataagtagttatcacgaatatctcatggaaaatattgaaggtagtgagataactttaaaagaatttattggtcaaatgaaaaatgaaaatttagatacaatttacattaaggataaacagtcattaaaaagtatatcgcaaaaggtatttggtagttggagtacgataacagaagcgatttactcgtttgaatacgatgagaaaaatggaggaaaaggttcaactaatagtgtgaaatacaatgaaaagaagaaaaatgaatttaataaatattacgaacaaatggctaaatcgaatacaaaattgaagaagatttactcattatcctatataaacaagtgtataaaatactttggaaaatcagaagacatttgtgattactttattggaatgggacagtacggggtcaaagaagaagtaccaggtgaaaatctaattgaggccatcactagtaattattcagccattaaatttaatttcattgataaaatactatctgaaaatgaattattgattgaaaaagtcaaaaggtatttagactctatcaaagaattacaaatgttcctcaaaccattaaacaaagaaggcgataaaaatccattgttttatggagaatttgatagattctatggtgcattagagtcggtgacgcctctttataatatggtgcgaaactatgtaactaaaaagccatattctaaggataaattgaaattaaatttttcaaatgctcagttgttgaatggttgggataaagataaggaatcagattatctatcactactttttaagaaaggttcaaaatattatttaggtgttttaaataacaaaattcccaaagtagggaaatgttttgattgtcagttcgaagtagatagtgaagattactatgaaaaaatggagtataagcaactttcaaacgttgttgccaatatacctcgtatagctttttcggattcgaataagagcctattctcaccatccaatgaaatacttaaaattcaagaaaggggttcatatttaaagagtagtatagatttcgacataaaggatttacatcaaatgattgatttttttaagaatgggttgaaaaaaaaatatagtgaatacgatttcaacttttcgaacacgagtagttactcaaatatttcagatttttatcaagaggtaattaaggcaacatataaagttaaattccgtaaagtaccttctaaatttattgatgaccttgtagatgttggaaagttatttttgtttcaattacataataaagattattcaataaaatctaaaggcaagaagaacttacatactatttattgggaatcgctttttagtgaagcgaatttaaaaaatccagttcataaactaaacggtgaagctgaaatatttttcaggaagtctagtatccaaagacacattactcatccaaaaggacaattaattgagagtaaaagagaaaaagggaaatttaataaattttcatacgatcttattaaggataaaaggtatacggaggataaattttttctacatgttccaatcacattgaatcgctctgcaaatgataaaggtacaaattttaatacagaagtttgtaatgtactgtccaaattcccagaaccacacataatcggagttgatcgtggggagagacatttaatttatctatcagttattgattcacgagggaagattatacatcaagaaagtctaaatacgataaccaatagttatatcgatggatcaggaaaagaacaagtaacggaaataaactatcattcgaaattggataagagtgaagaagaaagaagccaatccagaaaaaattggaaaaaaatcgaaaatattaaagaattaaaacaaggctatttaagtcatgtcgtacatagaattacatcactaatgtttaaatataatggaattgttatacttgaagatttgaattttggatttaaacgaggaagatttcatgtggagaagcaagtatatcaaaaatttgaaaaagcactgattgacaaattaaatcttattgtcagtaaaaatgtaaatgagaatgaactaggtggaattagaaaaccgtatcaattgactagtaagtttactagttttaaagagctaggaaaacagacaggatttcttttttatgttaatccaaactatacgagtaaactagatccgactacaggattttcaaatcaattattgattaaatatgagagtataaataaaacaaaagagtttttggagaaatttgatgaaattaaatttaataaagaagaaaactactttgagtttcatgttgatttttctaaatttactcaaaaaaaagtagggaaaactaaatgggttatttgtacaaagggtgatagaatatccaattttaatcgtaagcaagtatatttaaccaacgaattaaaagagttatttaataaatatgagattgattacaaaaatgacatccaagagcagtttcgtcaattagaattaagtaaagcgttttatgaaagttttcttggatatttgcgattaactttgcaaatgagaaacaatgatcccaataaaaaggatgagaatggaaatgagatagattatattatttcgcctgtgaaaaatgataataatcgattttttgacagtagagatgtaaaaaacgaacatggactccctgtaaatggagatgcaaatggagcttataacatagctttaaagggactaatgttgttaaatgaaattaaagaggctactaaagaagggagaagacctaatttggccataaaaaatgaagactggtttaaatttgttcaaaataaagaatataatggataacgcaattccgatttcgtttattaatgacttcatcttttgccctgtttcgatctactttcataacttatatagtggtagagcagaagagttttatcaaagtagaccacaaataatgggaaaacaagcccataaaacaattgatgagaacacttactctataaaaaaagatatattagtagtaatagatgtcttttgtgaagaatttcgtatagttggaaaaattgacattttcgattgtgcaaaagagggttaaattgaaagaaaaaataaggtgattaaactgtatgatggacatatttttcaactgtattgacagtactattcattaaaagatatgggataatttattgataaaatgaaaatctactgcaaaatagataataaaacgtatcggattaatcttccaatttatatatttagatggattgtaagttaagagagacaataaagtctttgagacagtttgatttagattcttttgttccagataatatagaaaaatgtaaaaattgtatttatagtacgttgtgtgatcgaagtttagctaattaaaatttctttgagggtgggattcatgttagaaagaacagatttttctatgaaaaaaatactatttttgtttgcgaatgaaggagaaaactttcgataaggaatgataatttaattattaaagataaagagggacaggtaaagtctcaaacaacttgttataaagtaaaatatttgcaaacctcagtgttaatgtgtttaattattaaatatggatcattattcaataagaaaagtgtataaaatgactagtaaaagaataaaaaagttaaaaagtgttaaatattgctttaaatatacaaataagtgtctaatgatccataatttctacttttgtagatagaagtactgtattcatgattttgaagtgtctgatgattcttattaatttctactgttgtagattcataatagcccaatgtatggatcgttatgtctaatgacttaattctactcttcatagtaaaaaatggtagaatgtttggtgattaattgaccacaaaatatagaaaatatattcatagaattaaaggtcttattagcgatgtaaaccacaagcaaaagcaagaaaataatgctataaacgaatttgaatctgcatttcccgatataatcattagtggttgcagatataaaaacacgactatacttattaaagataggtcgtgtttttatgttgcaaaattgtaaattagaaattttcacctttgagtaagtattaattcattgtgttaactaaaatattaaggaggattgaactcttcttaattccctaatatctcttgctaataagtgtttagaaataaaagagtctttaggtataataagctctggatttgttgcaatatgcataataatcgcattcgtatgagaaaatttcagtattt

SEQ ID NO: 385 - DNA, 14552 bp, synthetic construct
  source 1..14552: mol_type = other DNA
  misc_feature 1..14552: note = Synthetic
agcggatagcaaacaaaataagttagcaattgttaaagtatttaataaggttttcaatgaactgttggggtactctccttcaataccatggttagcccaattagaagaaattttaaatagcaaagggcagtatgaagaatttaagaaactatttgaaatagagagtggtctaagttggattgatgggcgagatgagatttattacaatgaagatgcgatgattttagcactcagtaaagcaactgaaatgagcgttgaaagtgccagaaaatggataacaaatggagaagaaaattatgaaatcagtgtcgaatcctttgctatcagattagctaaatttgtgagtcagcaaaatgaagattatcggctcatttttttagcagatgaaatggggcaatatatttctgaaaatacacaattgatgttgaacttacaaacacttgtggaagatattggtaaactgacaaatgggaaagtctggattattgttaccagtcaacaagatattgatacactgaaacacggtgtaagttcaatgaatgatttttctaagatacaaagtagatttcatttaagactaagcttaagtagtgcaaatgctgacgaagttatcaaaaaaaggttattggataagacggatgttgcaaaggaaacattaaaaataacctatcaagaaattgaagcaggcttaaaaaataaattatcatttagtgagcatactgttgatatgaaaacatttaaggatgctgaagattttgcatcagtctatccatttgttccttatcagtttcatttgttacaaaaagtatttacgggtattcgagaacatggttcagctgggaagcatttagcagatggcgaacggaatttattagaagctattcaacaagcagcaatatcttatcaagacaaagaaattggtgtcttggttccttttcaaaacttttatgagagtatagatcaggcattagaacattctgttcgctcaaccattataaaagctcaacaaagtgagacattagaagtatttgatatctcagttttaaaattactttttttaattcgctatgtgaaagaaatgcctgctaatatagataatttgactactttaatggtccaacatgtggatgatgataaagtctcactaatgaatgcaattaatgattctcttaaaagactagaacaacatatattgatacaaagaaaaggagaagaatacgtatttttaacaaatgaagagcaagatgtgaatagagaaattgatcaaattcaaatatcaaatgcaaaagttattactcagattggacaaacgatttttcaagatattttggatatcaagcgatttaattattgtccatttgaaaatagaaaaggtattaattattcttttgatgttgcttcttggatagatggacatgctttaagtaatggtattgcgagtctaggtgttcgattgctcacaccatattttgatgaagctgattctgttgaaagtattgttgcattatctgctaaagagcaacaagttattgtggttttaggagaaaatagcacttattatgaagatatgttgaaaaaaattaaaatccaagaatatattcgtagtcactctacacaaaatgaatcggaattaattaagaatattttaaataaaaaagtgagtgaatctaatgagttgagtaaaagtattaaagttcaacttattcatgccttagaagaagcagcttgttatgtgaatggtgtagagttaaaaatatctactaacttaccaaacgctaaaattgcgaacggattagacttgcttatagaaagtatctatcccaaattatcttatgtagtgaaacaatttcaggtagagcaattgaatgaactcattaaatatactcaaggaaatatatttggtgatcaatcagaagatgtaaattttcttgcaacgaatgaattgattgaacatattgacaatcatacagaacatcatgcaattgtcatattaggagaactactacaaaagttctcaaaaaaacctataggttggagagaaactgatattttagctagtttaatttatctattaaaggatgaaaaagtgatatttaaacttgataatcgaaaaatgagtctaaaagatgcccaatttgttcggacaattactaaacgtcactttcaagaaaaaattattttaagtaaaaggaaagtgattgaggaaagtcatttgagaacagcattattattagtaaaagatacggttggtttacaaattgaccatgataaagaagatatcttagcacaaaaaattcgtcaaatctataaacaacaactagatgaattggagaaaataaaattaaattatcaataccgtttctatccaggagaaaatgttgttgataatgggattaaagaaataaaacgaatatatgctaaagaagatacaagagaattgtttcagtatctttttgaagcagaaaacgatatcttagctttttttgaagatttcattccaataagaaatttttttgaacaccatacggctatatatgatacagcgatgaaactaaaggagcgatacagaaaggatgtcaatttattaacctcaagtgcaggaaaagaagcaggtaaacggcttgaaagtattatgaaaaatagtgaaccttattctatgattaaggaattgccttcattaaatgaacaatttagaatggcgctgacagatgaacttgagcaagcttctgaaccagtaatcaagacgattcaaaataacaaaaatattttaattgaagatgttcgcaactctgaaaaagcaaaagaaaagttagaaaaatctatttcccatggtttttcacatcttaaaaaaagggcagaggaagcacaaaccttaagtgaattaaatgccttgaaatttgaaattgaagatttaacaaaaaaatatttagatcaaatccaaggaataaaagaagaagaacaacaaatacgtgaaatggttcatgtatcgaaaaaagaaatactagatagtagtgtagtagaaaaacatgtgaaaccattaaaaaaagagcttagtcaacgaatctttcaaagacaagatattattcctagagaaaatattgaaattaaaaattacgcagaattggatgactatcttagtaagattaaaagtaaaattgaaacagaattaaaattaggaaaaattgttaaaattttataagcaagttactggagagaggaagagctatgtggataaaggtgccttaaaaagatttgcaacaagtgcacgaaaaaagttgatagaaggtgtaaaaatacgtgctttaagatttggtatatcagaaaaagagattaaaagtggcaaccaatttgatggtttactgttaatcaatggagaaccattagaaaaaaaacatgtagatcagtatcaaaagcttgtggaacgtatcaagttataccagttacataaagactataaagaagcttatgaaatggtaattgaagaagtagcttatacttggtttaatcgaataattgcaattaggtatatggaaatacatgattatttaccaattcgaatgctattactatcttcaagtattgctggaaaaaaagagccagatgcagtaacttttcataaagaaattgtgaatattttacatttagatccatttatattatgggatttagctgaaaagcaacaaacagaagagttattcaaatatattttaatccagcaaagtagacaattaggacaaattttaccaagtgctttttctgaagtagatgcggtagaagagtttttattacctgacggattattagcaaaccatgggatgatacgtgaaatgattgattgtggaaatgagtcagattggcaacaagttgaaataattggatggttatatcaatattatcattcagaagtcaaagaaaaagttggcgggttgaaaaataatcaagtaccaaaacgttttttgccaacagttacacagatctttacacctaaatggattgttcaatatatgttacaaaactcattaggaaaattatatgatgaaatgtttccaaataatcaactttctaaaacatggtcttactatctaaaaaagaatataatcaatcaaattgtaccgtctaatgtcacatcattagaagatattaaattaatagatcctgcttgtggttcaggtcatattttaattgaggcatttagtttgttttatgatatgtatttagaacagggatatatgtccaaagaaattcccaatcttattataaaaaataatttacatgggttagaaattgataggcgttcctatcaaatcagtcatgtcgcattattattaaaaatactatcatatcaacctagattgctacaaacaagaaaatcattcgattaccatattgaaacatttaaggatactgaacatccaatttctgaggaagctttattgctgatttatcctgctgaagaaatagaagctattagagatttagaaaagaaatttggaaatgcagaacaatttggctcattaattaacacaaacacaattcaagttaaaccacttattcttaaaataaaagagtttttggcaatagaaacggaagagctatacatccaagcacttcaatttgaattacaagataaattactgccgctattaaaaatagcagaacaattagcgcagtcctatacaattgttgtgacgaatccgccatatcataataaatataatgcagatttaaagttatttatgaagaagaattatcctactacaaaagcagatctatatacagcatttatagaaagatgttttgatatgactgttgagaatggctatacagcaatgatgacgccttggacctggatgtttttatcttcatatgaattactaagaagaaaattattaaaagaaggaacaattgctagtttagttcaattggaacgttcagcctttgaagatgcaacagtttctatttgtacatttgttttacataagcaaaaaaaagatattctaggcgaatatgttcaattagaacaatttaaaggaagtgaattacaacccattaaactgagggaagcagcaaaaaacctgaagctaagttatcgattatcaaaagcttcggatatgtttgagcagattcctggaattccaatttgttattgggtaaacaatcaatttaaatctttattttcatctaatcaatttcaaaaaattgaagataaatatgaagtgaaatcaggtatcatgactgggaatgattccacttttttaaggttatggtttgaggtttcatatcctgatatttgtttcaatgctacaaatgaatattttgttgaacaatctcaaatgcaaaaatggtttccaattagtaaaggtggaaattatcgtttatattttggcaataatgaatatgtgattgatttgtataaaaacggtatgcatataaagaattctgatggtaattatcgacttagagatagtcaatattattttaaatctggaattacttggtctcgtatttcttcagcctattttgcttttaggatacaaaatgaatatatgttgtttggtgatgctagtcccttaattgttcaaggcgatgttgagcttttagcatttttaaattcaaaagttgcttgttatatactaaaagccttaaatccaactattaatatttttgtgagtgatattcaaaaattaccaataagcatcgagtcttatcctaaaatacaagagttggttactgatattatcattcttgaacaaggggattggaatgattttgaaacatcttgggattttaagcagcatccttttatcacctataagagtcatgaaaaagaattagcaaaaatttatcaaatttggatgcaacaaacagaacaacgatttgagcaagtaaaaagaaaacaagaggaattaaacagaattttcattgaattatacgatttagaagaagagttagaacctgatattttagacagtgaagttacaatcaaaaaagcagatttagcgaaagatgtacgtagctttttgtcctatttagttggtgttatttttggaagatattcattagatcaaaccaatattgtttatggaggaggagaatttcagcatggcaagtatcaaactgttcaacctgatgaaaataatattgttccaattacaaaagaacattattttcaagatgatttagtgaataaaatagaaagtcttgttacctacttgtttggagaagagcaccttgaagaaaatcttcaatttattgcgaaaggacttcatgcaaaaaaaagtgaattatcgagagagtgtattcgacgttattttacaaaggaattctatcaagatcatttgaaaatatatcaaaaacgtccaatttattggcaatttacgagtggaaaaaaaggaacattcaaagggttaatgtatatccatcgttatgataaacatactcttgcaagagttcgaacagattatgtattagctcttacaaagacattgaatagattgatttatcttgcagagcttaccatttcagaaaatagttcacaaagagtagttggaaaagcaatgaaagaaaaagaaagctatttacagcaattagaagagctaagaacttatgatatgttattagagtatatggcaggtaaggaaatagaattaaatttagacgatgggattaaagctaactatcaaaaattccaacaaattcatcttgcaattggttttggaaataaagaagtaaatttaaatgtttttgaaaaaattatttaaaaaggtggaattatgacaacagaagtagaagtaaaactaattgaaaaatttagtgaacgaaaagtaagaggagagctaagaaaggttatcttttggtatgatgcagaaagtacttttagcaaagccatttctgaatacaagttagatcaagtgatgatattgagagttgatgattttagttattttcagattaaatatttacttgaaatagtttatacgcaaaaaaatattctcctttattttaatacagcaaagcctaagggaattgataatcctttattagatattttattgtatagtgaagagtttgaaatggattctatcgtaagcttaatgaatttgttagctattgaagagccagagataaaacaaatatttgaaacatatcgctctttttttcttcaagaaaaattagctggtgttttttctagcatgatacagttaaaaagtaaagtagaacaaaatgatatagaattaggaattttatgtgttttaacaaatacgaaagaactaagattttcaaccgtacttattcacctttttattgaggagataacaaaaaaatcagcttattggcgtcagattgaaaaatatcaattagccccctttttttggaaacaagtaacttcttttttggggtatgaaggagaacaaaatattagagatttgatttgtgctatttttaaaacgaaggcatttattgattttgaagagcaggtaccgcgaaattggcaaaatcaacgattgcaccaaagtaataattgtattgtatttcttagtcaatggatgaaccgtaaagatttaaataaaggctatcaaaaatgttcaatagaaattgcaaagaatcttagaattccttcctttattaagaaaaaagcgattgaatttttagctaagagtgactcttttattgactatgatgatgccattatttctcaggttgctgagcaactatcttttggtacacttcattatgatcgatatgagaaaattttaatagatcgacgaaatacatattggtttcaggaaagatctcatgaataccagttattaattgaagggattcggttattaaggaatattcaaaactggcaaaataaagtggatttaaaaacaaaagaagcgatttggcagtggtatcaagcagaaggttatgagattgatgcttgctatcgacgattttgtacagaatatcaaaaaattacaatagaagttcctgaaattaacacattaagaaatatgattgaagccatttataaaaatgaatttctaatgttatttggtgaatactggtctcaattttttgaaaaggaagagtcttttcaaattttagcaacttctacacagaaagatttttatgaagaatatgtagcatcttttgaaaaaagtggacatcgtatttttgttattatttcagatgcatttagatatgaatgtgcatctgagttaacaacgcaattaaatatggaacatcgttttaaagtttctcttaatggcatacaaggaatatttccgtcttttacagaacttggaatggctgctttattaccacatcaaaaaatgatgttaatggataggtatattgagttggacggtaagcgaacaacagggattgagtctcgaagaaaaatcttagaagataagatagggaaaggtaaagcaacagcttattctggaaaagatttgttgaatctaagtagaatggagttgagggagctttatagtggaacaagtatcaattatatttatcataatacgattgatagtattggtgatcatgcttcaagtgaaaaccaagtgtttactgcagtagaaatggcgttatcagaattaactagattgatacaaaaattaactgtaaatgtgaatgcatctagattaattattacagcagatcatggttttatttattcagaatcaccgttgaaaaaaatagacaaaatcccgatacaggataaagaagtacttgttagaaataggcgctttatcttgaataaagtgaataaaaaccaagggaatacacacacttttttgattccagaatttgataaccaagtaatctatgggcatacaccaatcggaagtaagcgcttttctatacaaggaggtggtgctaattttgtccatggtggtatgatgcctcaagaaattatgataccagttttggaaattaagacagaaaggggaaaagaaagctataaacaagtacaggttcaactcttaagtgaaaggaataaaatcaataatattgtaacttatttagattttttacaaatccaaccagttagaaataatctttatcaaaagcgagttcatgtatatttagaagatgaagataacgtacgcatctcaaatgaattattattattagcagattcgtatagtgaagacgcagaagaacgaattatgagggaaaaattagtacttttcagtcaaacctatcatgtgaatgctaactattatttagttatggttaatgaacaagacaaatcagatattcataaaattcgtttttctatagatttgacatcagatagtgatatgtaattgtaaaaaaataatgataatattcatagctgtttgtaaggaaaaaatagttttcacttattttactgattagatcaattcatgtaatcagtaaagtaatgaattaattgtagctggataatttttttcaaccctttttcagtaagttgatatgaatttttattaaaggttaaataattgtcagaaatcaatttccgtaaattatttgttaaattatttacaccaattctcccttgatcgaggtagatttttttgaagaagttgcgattgaagttaatttgtccttttccaacttgtaattgggtacttagtaggatgaattcatattcaaaaagtttagtcatgttatcacctcctttgtttaaaatgtatacccatctattgatagatactgaaaaatatacagaaaaaaagaatagaaaaaatttttttattttaatagaattaaatataaaacatttataaataggtcttgcattcttttgaggattagactataattgtgtgtagagttatagctgactctgtaaggaaattatagtaaagaatgtgctaatgcacatttctgtaaagctctaaccccacacctattttaggtgtggggttatctttttttatcattgaataaacacctattttattaaataatctatgctataatgaagtcaaatgaaaaagtcaggagtgacagtatggggtatagaataggattagatattgggattacatcagtaggttatgctgttttgaggacagatgaaaaaggtgaaccaatcagaattgaacatttaaattcagttatttttccaattgctgaacatccaaaagatgggaaatcgttagctttaccaaggagagagagtagaggggctagaagaaggactcgtcgcacaaaatttagaaaatatcgtacaaaaatgttgtttattcgtcatggcttactaacaaagaatcaaattgaaaaaatttataaccaaaatttgggtggacagtcagtttatgaattacgagctaaaggattagatcaggcattaaccaatgaagaattatttagaattttttattttttttctggtcaccgtggcttcaagtcaaatagaaagtcagaacttactgaaaaagatatgggaccagttctttcagcaattaaagaaatagaagacaagttagaggatggcaaccatcgcacattaggtgaatacatgtgtaaggatgaaaaatacaaggaacgcaagcgtaataaagaagggaaagagcgttatttaggcactgcaaatagagccatgatagaaatagaaattaagaaaatcatagagacacaacgtttgcttggaaataccgatttatcgtcagaatttgagatagaatatattggagatggctctaaaacaggtatatttaatgatcaaagagattttgaagatggcccaggatctggaccttatgcaggaaatcaaattgaaaaaatgattggtttttgtactcatgagccagatgaaaaacgtgcacctaaggcaagttatacattccaatattttgatttactatccaaattaaataatttaaaatatcaagaacatattggagaaaaatatcaagagcttacactagagcaaaaaaatcttattaaagaaaaagtacttagtagtaaagaagtaaaattttcagcgattaaaaaattattaggtttatcctcacatgcccggttcaatttagtaacatatggttctaaagcaacgattgaagaaactgagaaaaaaacgaaattttacagcatgtcttcttattataagttaaaaaattcattaccagaagcattttttaatcaattaacagcagaacaattagatgaaattggttatattttaaccgtttattcgagtgatcatagaagaaaagatgaattttatgggcgactggcatttcctgaacaaatagtagaatctctattaccaattaatttcagcaagtttggtaacttgtcattaaaagcaatgaagaaaattatgccttttttagagatgggatttaattattatgatgcaagtgcacaagctggttatgatgcaacctataaaaagattgatgctaagacaattcatgaagatgtaaataatcctgtggtaaagcgtgcggtgagtcaaacaattaaaatagtgaatcatattatctcaaaatatggcaagccggacgctattagtattgaattggcaagagaacttggaaaacctcatgatattcgtaaaaaaattagtaaatctcaagaaacaaatcgtatagtaaacgaaagaatcgctgataagttaagagaactcggaattattgtaaatggagaaaatattattcggttaaaattatgggaagagcaaggtgggatggacccttatacaggtttagcgattccctatgctcatgtattttctgatagatatgaaattgatcatattattccgtatagtttaacgttagatgatagctatggaaataaagtactagtaagtggtgcagcaaatcgagaaaaaggaaataaaattcctttggattatttagctggtgatattgaccgaatccacaaattagaagccattgcaggggatattaaaaatccacgtaaacgtgaaaaattattaaaaaaacaactaacaaaagaagatattgaaggatggaaaacaagaaatcttaatgatacacggtatatttccgtattgttgcacaactacttcaaacaaaatatttcatttgccaaattagaaacagagaagaaacaacgtgtcttcgcagttaatgggacaattactgcaaaattaagagcgcgatggggtttcaataaaattagagaaaatggagaccagcatcatgcactagatgcattaattgttgcatgtgtgacacctaagtatgtgaaagaagtgacaaatttcagcaaaagaaaagaagttagaggaaatagtcaactatgggaaagaaaagaatatttacaagaaattgaaaatgaagttgtgacaaataaagaagattatgacaggatatttaaccaagctttcccttatccttggccaaagtttagagatgaagttatctgccgaatgtcagagaatccatctgaattaatgcagaactatcaatggaaaacttataccgatgaggagatttctacattaaaaccaattttcattgtaagaagaccaaataagaaagtaacgggtcctgcacatcaagagacaattagaagtgcaaagctcaaagaacaaggaaaaaatattagtcgtgtgtctattagtaaattaaaattgaataaaaatggtgaaattgtttcagggaatggtactttctataaaacggaagataacggctggcaattactatatgaaaaattaaaaaatgaactagaaaaaaatggaggaaatggagaattagcatttcccacaggagcatttacttatcagcatttagagaagtcccatactgttagaaaagtcaaaattgaagcgaaaacaacattacaggctgttttaaacgaaggcaaagctgttgctgataatggttcaatggtgagaattgatgtgtttaggacaaatgggaaatatttatttgtgcctatttatgtgaaagatactgtagagaaggacttgccgaataaagcttgtgtagctcataaacagcatctagagtggcctattgtaaatgaggcagattttcaattttcactttattcgggagatttaattcgtattcaacataaaacaggagtgaaacttgtatctaaggatgggttaaaagaaaccaaaatagagcctgattttattggatattatgttggtgcaaacatctcaactgcgagtatatcaggagataatcataataactattatcggtttgaaagccttggaatagcaacattggtgaatttagaaaaataccaaattgattattttggaaactattataaagtcaaagaaaaacaacgtcagaaatttcatgaaaactaggatgtgaagtatatggcttttcgaaatatctatattgaaaatcccgcaaaattaagtattaagaatcagcaattagtgattaaacaggatgaagagtaccaaatacctgttgacgatattcaaagtgtgatgattgagcatcaacaatgtagtattacaattcctactatttcttatttagcagaaaatcaagtggctttatttacttgtgatgagcgacatttaccttgttcagttttattaccattgggaaatcattctagaaaattacaaatattaagttatcaatttggcttacaaaaaagaacaaaaaacagaatttggaaaaaaattattcaacagaaaattatcaatcaagggaaatgcttggcttttaataagaaagacgagtctgaggttttattttccttagccaatagagtagaagaaggtgatcgaactttttgtgaatcacaagcagctcaaatttattttttagcattatttggagaagggtttaatcggcgtcatgatcatatacaaaatgctgcattgaattatggctattctatattaagaggtgttcttgcaagagatatttgtgcttatggtttagaaccatctattggtgtttttcacagaaatgaattaaatccttttaatttagcagatgatttgattgaaccttttagaccatatattgatttatgggttgcaaagaatgtttatgaagaggatttaatgctgacttcaaaaatgaaacgagagcttttttctttattgtttaccaaggttcctattgacgagggacatcattcattagcaaatgcgttaaaaaaaatgacctcttctttcactgcttgctgtagaaataatagcgcagcactattaaaagttcctgaactaatgaaactacaagcacacgagtatgaatagatttatgagaatgcttgtgatgtttgacttaccagtaggaacaaaaaaagaaagaagagaagcaacacgatttagaaaatatttgttaagtgaagggtatgttatgatgcagttttctgtttattatagaatttgtagtggttatgatatggttagaaaatatgaaagaaagctcgagaatcatttgcctaaaaaagggtcagtaagaatggtctgcttgacagaaaagcaattttcaaatatgaggttattagttggagatgagatagtgaatgaaaaaaaggtaaatgcttcaagtttgtccattttttagccaaaggaaaccccgtagtatcgttgt

SEQ ID NO: 386 - DNA, 14183 bp, synthetic construct
  source 1..14183: mol_type = other DNA
  misc_feature 1..14183: note = Synthetic
cacaaaatagtgtggtggcgatagcaagaaggatacacctgttcccatgtcgaacacagtagttaagcttcttagcgccgatagtagttggtgggaaactacctgcgaggataggacgttgccacgcaaattaaaaaggttggacctcagggttcaaccttttttgttgtctattttagaataattaaatgattgttattagtaaatattcttggtataatgttgttgaacaagtggggtcgctctctacttattcttcatcttaaccgagtgtttgaaggacacaatagtaattggaccctgtatagggtgccagtaaagctctagcccctaatcatttatgattaggggctatctttttgtatataatgttagcgttttaaagcgttttaaaatgtgatttttagggtatttttattgatttgatacatagtggtaatagttgcttgtaatagatataatgacagggaaaggtggtgagaaaatgactgattttacaataattaccggtgatggaaaagagaaagtcttatcatacgggacacatagattaaggcaacatgtaaatacaattatcagtaaagaaccagttatgataagtattgaatatgggaagcatgatatattcatccaagccgtacctaaaaaatgatattaaaattgattagtgcagtaagttattttaatattcttatctctctatattgggataaggatttccagaatataagtatgggaaaatagttgtaaataggaataattaaaataacctattgtttcctttaattattattagttaagatgaaaataggttttgacctttagcgaagagcaatataatttttttagaaaaggagtggatttaatgggttacaaaattgggttggatttggggattgcttcaattggctattcagttttagcgaccgatgagaacggtgttcccttcaagattttacaaatgaactccgttatattcccaagagcagaacaacctaaaacaggggcttcattagcggcgccacggcgtgataaacggggattacgtcgacgtaatcgacggactaattttagaaagcatcggacgaaacggttatttattaatgaaggaatattgtccgagaaacagattgaaaatttatataaagatcctaaatttgaacggtcaatttatgaattaagagtggccgggttagatcggctattaacaaatgaagagctgtttcgggtgctttattatttcgttacgcatcgtgggtttaaatcaaatcgcaagtttgaattagatccgagtgatccggctgataaaaagcagatggggttattactgaattcaattgaagaaatcaaaaaggacctagctgaaaataattatcgaacggtgggtgaactttatctaaatgacgccaaatatgctgagcataaacggaataaagcgtatgttgatggttatttgggaacgccgagtcgtgatctattatatgctgaaattgaaaagttatttgcagctcaaaaatcattgggcaattcagtaattacggctcaatttgaacaggtttatttatctggctatacagataaaaacggacaagaacacgccggtatttttatggcacaacgggacttcgatgaaggccctggtgcaggtccttatgctggtgatcaaattttaaaaatgattgggcgctgtacgtttgaaccaaatgaaaatcgagcggccaaagcaactgtcacttttgagtactttaatttattgcaaaaagtaaatagtttacagtgtcgagaaatggttggtggcgactttaaaccactaactggtgagcaacgggatctgttaatccaagcagcttatcagagacaagcacttaaatacacgcaagttcgtaaattattgaagttaaatgatgaagctagttttaacttgttaacatacagcgctaaagaggataaggttaagactgaaggcaccaagtttattgcaatgagtgcttatcataaacttgccaaagtattaccagaggaattgatggcaaatacggccctgttggatcatatcgggtttgcgctaactgcctattcaagtgataaacgacgacgtcgatattttgaagaagaattaaaattaccagaagccattagtgaaaaattattagggttaaacttctccaaatttggtcatttatctctaaaagcaatgcaaaatattattccatacttagaaatgggtcaagtgtatagcgaagcagctgaaaatgcgggttatgattttaagtcaaaacaaattaattttgatgaagatatcacgaatccagttgttcgacgcactgtttataaaacaattaaagtcgtgaaacaaattattagacgctatggtaaacctgacagcataaatattgaattagcacgcgaacttggaaagactttagaaaaacgaaaagagatcacgaagcaacaagaagaaggtcggcaacgtaatgaaaaagttgctgagaaacttcgagaattaggacttaatgttaatggtgaaaatattattcgctacaagttatttgaggaacaaaatgaattcgatccctatacgggccaaaaaatcaagttaacgcaggcttttacgggtagctatgatattgaccacattattccatatagtattagttttgatgatagttatgggaataaggttttaacgagttcagccgccaatcgtgaaaagggcaaccggattccgcttgactatctagcagatcaaccggatcgcattgctaagttagaagcgattgcgactaattcgattcacaatccgcgtaaacgggataagttattgaagcgtcaattgagtaaggatgaagtgtcggggtggaagaagcgcaatattaatgatacacggtatatttcaaaagtactctacaattacttccgtaatgaaatagaattctccgagacgctagataagaagcaacgtgtattggccttaaatggcgaggtgacttctaagattcgtggccgttggggaattcggaaggtccgtgaaaatggtgatgtacatcatgcggttgatgcggttgtcattggcgctatctcacctacatttatccgtaaagtaactcattatagttataaccaagaagtgaagtataataaggcgctttggcatacagaggaactaaacgataatgagtatgccaaagaaagtcaaaaattaaacgcgaaattgtttagtaaaattttcaacgactttccattgccctgggatcaattccgggatgagttagaaatgcggactgcttccgatcctgccgaatttagtaggaatcatacttggcaacattatacggccgaagaattagcggcattgaaaccaatatttgtcgtacgaacacctaatcgaaaggtgacggggccagcccatcttgatacgattcgaagtggtaaattgttaaaagaaggcaaggttatttcgcgcaccgcgattacgaacctaaaaatcaacaaaaaaggtgtactaggaaccggtgatggtccgtactatagtgataatggtggcggatcggttgttgaaaaagctttaattgaagctttaaatgcacatgataatgatggcaaaaaagcatttcctaatggttatttggagtatatggatcacgggaccaagaagttggtccgtaaagtgaagtttgttaaaaagacgacaatttcaaccgttttggatcaaggaaaatcggccgctgacaatggttcaatggttcggatagatgttttcaaaacaccaaagaaatatgtctttgttccgatttacgtgaaggatacggtggaaaaggaactacctaatctagctgttgttgcgaataaaggatatggtgcttggagtaaaattgaatcaaatgatgaattcttattctcactatatcaaggtgatatgattcatattaagtcaaaaaaagggtttaaaccgaagtacaataaagaaaaactagattccgatccagaaacggtagcagatttttatggttattttgacggtgcaaacatagctacagcaagtattcaagtaaaggctcacgataatagttattctaaagatagtattggaattgctagtttgctaatcttcgaaaaatatcaagtcgattatttcggtgaatatcatcaagttaaagagagaaaacgattaacttttaaataaaagagatggtttaatgggctttcgtaatatttatattcaaaaaccgactcgcttaagcattcggcggcaacagttggtgattcagcaagaggaagattatacaataccggtcgatgatattaatagtattatgatcgaccatccacaatgtacaattacaacacctgccttatcggtattagcagaggctgaagtggcggtctttacttgtgatcaaaagcatctcccttgtgcaattattttaccggttggtcaatattttaagaaatttgaagcattgacgattcaaatgcatgttcgttcaaaactaaaagaccgactttggcagaaagtaatgaaacaaaaaattgctaatcaagctaagtgtttagcgctgaatgggcgaccgtctgttgagcttgaagtaatgggcaaacaagtgattgaaggtgatcgaagtcatcaagaatcgcaggcagcacgactttattttaggttattattcaatgatcaatttacccgtcggacagatgatgttttaaacggtgcattgaattacggttatgctattatccgtggcgcagttgcgcgtgatatctgtgcatacggttttgaaccagcactaggattattccatcataacgaattaaatccgtttaacttagccgatgatttaatggaaccatttagaccatttgtcgatctgtgggttagtcaaaatattgcacaattggaaaaggtattaacttcggaaaataaacaagcactgtttgcactattatttacagaagtattgattgatggtgagtatcatacgctaaataatgccattcataaagtagtttcctcgtatacgatgtgttgtcgaaatgattcagctgcaggactaaaattgccggaattagtcttattgcgagctcacgagtatgagtaaatatatgcgtttattagtgatgtttgatttaccggtggttaaggcagaagatcggcgggcggccagtaaattccggcagtatttactgggcgaaggttatgtaatgatgcaatattccgtctattatcggattgtgaatggctatgatatgtcaaaaaaatatgagtatcgattaaatgataatttgcccgaaaaggggtcagtacgattattgattgtaatagagaaacagtttgacgaaatgcggttacttgtaggggaacggctacctaatgaggaaaaagttgacggtaaccagttgtctacattttgaccatcaaaaaaggctcgatatcgttatgatatcgggcttttttagtgaaggtatttcatcttaaccgaatgttgaaggaaacaatagcggcaccgacatgaataacgatcaagtcgctatttcatcttaaccgaatgttgaaggaaacaatagcattgccacagcgaaagacttaaaggcattaatttcatcttaaccgaatgttgaaggaaacactggtcagaatctatccggttcgtgtatttcgaataaagtagaagaaagtcttccgggaacatactagaatcttgtgtcctttataaaaagtatgattgggtgttctgttctacaatggtattataacctataagataatgcagcaaatgaccatattaagtgaggttttcatcatgggtgttaaaatgatcgttgttgatatggatgggacttttttggaccagaataatcaatataatcaggcgcggtttgcgcgagtttttcaggcgttacaagcacgccaagttaagtttgtagtcgctagtggatcgcaatatcaacggctgcaaaatcaatttgatccgtatcgtcagtcggtagatttcatttctcaaaatggagcgattgtgcatcatggcaatgatttactgcgagtagacgcactggctgatgatgatttacaagcgttgttagcgttaattgcgaagggctttccgacggggccaattgttcaaaaaacaatttctgggttggctcaaacgtatgtgccgcgacaggcttcacccgaaacactagcaatcattaaacagtattatcatgcggtgacgttggtcgatcattttgatcagttgacggggcactcagttaatgatcaaattaccaaagtcggaatcacgtttgggccggatgttgattattcagaggcggtccagcagttacggggctccttaccggcaggtttgatgagtcagaattcggggtttcaaacggagttgattggtaatgttggtgtggataaagtgagcggtctacgtcaattacagacgcgttaccaaattgccgatgatgaattgatgacttttggggataatgaaaatgatttggggatgctgacgatgacgccttggggctttgcgatgcctaatgcctatgagtcgataaaaaaacaatccgctaacattgcgttagcggatcataatcacgatggtgtcttgacgacgattgagcattacttaaaagaaggtgtcatcggatgacggcgcaccaacaaaaacggctgatactggcagtaagtatcatcttactagcgctgattgttttattgattggttggcgccatcagaggacggtcattgcttttttagcgcagtggcaggattatcggcaatatgtgttggatattcgtcatctgggaccgtatgcgttcttggtgtttggcttagtgatggtcgtgatgacagtgattcctggcgcgccgacttcagcggttgcgatgctcgtcggggtttgcctggggcattggggcggttttgtcgttaatgcgattggtttaacgctcgggaatttactgcaagtgcagttattgaccagagtgcgggatcgccgccacaaaaagccggattcacgcgtttatcgtgcgctagttaaaatgcggcatccggcagtgggcgtcttgattggttatgcagtaccaatgattccaactgcttttgtgaatctagccgccggtgatacgcatttaacggctaaagcacaaagctgggcttgtttagccggttcgacgatcgttgcttttatttacgcttttgctggggatctattaatcttgaaacaagattggaagagtctcctcattctgttgacgattgcggttgtaattggcttggcggaatacgggattcgtatgcggcgcgatgctgtggtgcgagggaccgactagatagtgaaaacgaggcgttcattgccagggaggtgccagccagcttcaacatctgataatggtagtgtccgagttgtaaaagtaaaaggttgttctttttcagcggttaaaatggcgttcaatgatttcatcatattgataggcgcaactgaaccctgaccagagccgattaagcgcaaagcgacggcgcggaaggcagcccctggaataggtacggtttggccggcagatgagccgatttcaacccgttgcaaaagttgttcggcattttgacggtgggggatgatggcggtcatggcgtttgctgcaacgtcgccccaaagataatcaaggacgatatcaacgtcactgccggctttagcgagttgagcattgcgttgtgcgggttctgcagagagatcgaccagttgtgtagcgcctaagtcggtcagtgtcttgagtttctctgtattgcgggcgacggcgataatttctgaagcggctaagcgtttggcaatctgaacggccatcataccggcgttaccggtagcgcccaggatcatgactttttgaccggcactaaaattggcacggtagtttagggccatccaggaagaaagggcgggattcatcatgcccgctaatttaatcgcatcaaggccatcgggaactgttacccagtggccttttttgacggcgacttgttcagcaaaagtaccttcgctggcgaaataaacttgttcaccggttggtaaagtgccaatgccatcgacaccgggaatcattggtagttggtccgtcgatgtgtagtggctgccggctgcaccggagcgcgcccgattggaaagggatgaggcaatcacgttaatgaggacttcatctgggttaggaattggtgttggaaattggttatcaaatttaggatcttgtttaaaatctgttacgactgctgctttcatattaaaaacctcttttttataggattaattaccggtaattgattggggtgaaaatgacccggttaattgtaaaaaatgaaagattcttgttttttaattacctgtaatgtaaaattagtatagatcctaaaataatgaaagtcaacagatatattacaggtaattaaaaatgtctaaattagcaaagctccaagaaatgatcgccaaattacatgcagaaaatgatcaagatcctgaacgggattggttgttacagcatttacaggccaacaaaacgccggagatgatggcccaagccaagaaactaacgcattcggaattggcaattttgacgcaactggcacaggcgggcgaagcaattcccttcaagcaactacaggcgcaatctgaattgtcgcaaggaatgttatcgcgctatattcagcgcctcgctaagaatcggttggtcgaaaaatttcacacgccggaaaatcaaaaagctgtcgtactgagaattacggctcgcgggcaagaaatcggtgagcttcaccaacaattacatcaacggcaacgccaaaactatgaagctgttttagccaactactccgaagccgaagttgagactattgcgcaatttatcgaacagatgatagcggcgcgcgaaaatctttaacccgaaatctcaaaaacggttcgaagtgacatattgtgtcgcaatcattttttataattatcatagaaagtgagcgtgatgctaaatgacaaaatatacagccgttgatagttggttatactggtcaattccaagcgacctgactgacgcaacgccggaagaagccattttaccgttattcaaagaaaattatgaaccaggttttccgaatgacattgataaagcagccttagatcaaaaattgagtgcggtgcaatacgtctttatcggattgaacccaggcgatgcgggcccactaccagaattattcgggaacttccacggtgatcgcaaaagttgtgattatcgactagcagccattacttacggtactgatgcatggggtggtttcatcacggatttagaagggtcactagaaagtgactctagcaaggttaaggtgggccaggccaatgtaacagccttactcaatcacttgaaggaccttggcattccacaatcagcgaccttaattgctttaggcagcaaggtttataaggccctagaaggcaatttaccaacaggctatcatctcagccaattaatgcactattctgggatgaacggtcactggcgctttgaaaaggaacggaaaaaggtgcggcaaataattgaagcccacacggcattgtagccgattgaaaaaggactctgaaagggggccttttttgtttgtcttcaagtcaacttgaaggtgtatgataataaaagtggttgagcggctgaaggaaggtcgttaattgagataacttatactataataagtaaaaacagaaaatacggagtaagttgatagtgaataagaagaatacacttttagtaacactggcattattattatcaaatatgatggcggggcttgatgggacaatcatcaatacggccttgccggcaatcattagtgatttgcacggaattcaatacatgggctggattgtcgcggttttcttgttggggatggcggtggccacgcccttatggagtaagttgggtgaacacatcggcaatcgacgggcctaccaattggccacgttgctgtttgcagtcagttcgatttttcaggcggtttctgggaacatcgttttcttcctgattgctagaaccgtcatggggattggcgctggtgggatgaacaccttgccattcatcatttatgctgatttataccaagatttgcgcaagcgggcgcaagttatcgggtacgcgaccgcgagttatagcgcggcttcgattgtcgggccactgattggtgggtggattgttgatacctttagttggcactgggtcttttacatcaacgtgccaatcgcattggtatccattctctgcgtacgttatttcttcaaagaacaacctaagacacatctaagtggtagcgtcgattacttgggcgccggcattatgattaccagtttggtgacgttattgaccgggattcaaatgattggaaccggctcattgaccttgattattgggttaatcgtcgcaggtttggccttgttagttgtcttataccgagtggaagatcgcgcggccgatccaatcgtaccgaaccggttgtttaaaaatccgcaattggtgactgatttcatcttattcgtcgttttatggggcgcatttatcgcgtttaacatctatattccaatgtgggcgcaagggttattaggcttgagtgcgttactcggcggaatgacgcaaattccaggcgcggtcactaacttgattggttcgctggctgggccggcagttcaaccgcgcttagggaaacaccgcgtggtgacattagggacggtcgcttttttaatcgcctttagtggaatgttaatgatgggcgatcgggcaccattttggtttttattattgatgggcgcttttgaagggttcggacttgggatgagttttaacgtcttgcaaattagtgtccaagaagacgctgaggcgcgcgatgtgccaattgcgacctcctttgcctatctcttacggattctgagtcaaacgttcatgtcgtcaatttacggcgtgattttgaaccatgctttaacgcaagggattgccaaatcacacgggaaaatcacgatggcgatgatgaacaagttgagcaacctccaacgcgtgcatgaattgccagcgcacctcttaccggcaatgcgcgcgattatgtaccaaggcttacacaatattatgttgattgcgacagtgctcttagtgattgtgctcgcctttaatctgtggttacaaggaaaagcgaaaaaagaaaacattaaaatagactaaatgttaaaaaggactagctgttattttaatagctagtcctttttgttgtacagtgataataattgattaaaaaaatagtttgttagtggacttgcataaattggtgcaaaatatggtctgttataatacagaggtactggtaatatgtagtgtaaggaagggagtagacacatgatgagatcgtatatgattctaaaagcattgtttaatactaaggattatttaccgattacatttttcatggaacagttggaagtgtctaagcggactgttcaaagcgaatttgcatatttaaaaaaagtaagtgataaacatgggtatttaattcacattgcttatggaaaaggatattttattgaagttattgataaagtagcctttacacaatttttagatagtttaaccccagatgatattgtaacaagtggtgaacaacttatttctgacgtgcttagtatattgttaacaagtacaactgagtatgtggttgtaagtgagttatctgagtcattagggatcaggcgaagtttattgtattcggaaatgaaaacgatttctaattatttaaattcctataatttaaagttaatccgaaaaagtcactatggtatctgtattaaaggggaagcacgctatgttagacaattgatgttggatctctatctgaggggtgataatcaatttaaagaactaactgatgaaaaagtaggtcaatttgaggaatatgaacgattagttgaagactgtattcgcaataataatttaagaattggttattatgaatttcaagttttaataggatggctaaaaatttttattattttttctgccaatagacaattctcaacctcggagaataatggggtgataaaccctgaatcagataaggttttgcgacattttgacataatcttattacaactacaagaacgctttaaagttattgtaacgatgcaggatattgatgaattcaattattttatccagaaaagcgtgcagaagaataatcgaattgataatcatcttagtcaaaaagtatttaaaaacgaattgcttgagttttttagcgcagtggatgttaaaaatagaacagattatagcaaggatcacgagtttttagagcaaattacaacgcacttactatttctaattgataggatagatcaaaaaattacgtataagaatccattgttgctggagctatgtattaggtatccgatggtatttgatatagttttaaaattttcaacatttttgaaaacaaaatttgggtacgatatttccaatgacgaacttggttttattgctgttcactttttaaatcatacagagaaggaaaaaaataaacgtattaatcagtatgagcgaatagccgtaatttgtacaactggtggtggtgtaagtaatcttgttagaactcaaatcatggaaatattccctagagctgttgtaaaagctttttcattctgggaagagcaagatctagcaacttttaaaccggatttaattttttccgtagtccctcttaaaagagcaccaaaggtaccaaccatttatattaaagagttactgtcaaacagagatatcaaaaatattaaacaagttctatttttggataatccacctagaagtgataatacacaaattgactactcacaagactatcttagcttattaaagccaaacctattctcagttgagacgattcaaaactatgatgtcttaattaaaaaaatggcagagaagatgatgtcgaaaggttatgcggatgataattttcaaaaaaatgtcgttttgagagaacaatacatgagtacggtctataacaatggcattgtaatgccacatcctattgaaatgaaagggaagcaaagtgcaatagcggtatcagttgtaaagccggaattaagagtaggaaagcgagtagtacgattagtctttatggtttgcttggcgaaagaagattttcatttttacagcaatatttcaaatggtttatttcagttaatgcaagataatcataagatcagcgatatttatcataaacccgatctgcaaaggattataaatatttttaaggaaatggaggggtagttatggaatttcaattattaaataaattgtcaaatgcagatagtattgcttctaatgaagatgaagttagaacgctgttaaagaaacagttaaaaggctacgaagaaacgtttcaatttgatggtatcggaagtttgatggtgactaaaagagcgactcataaagatgcgccaacaattatgtttgcagcccatatggatgaagttggttttatgattcggtacatctctgatattgggatggcgcacgttgtcacaatcggaaatgttgaagtacgggctgagtcaatgcagttagttagagcaactactaataatggcgagaagatagaagggcttttgaatgtaaattatgatgctacaggtcatattaatcagatgtatgtggattttgggtttgattcacgtgaagaattattagaggcaggattagatgttggcaatatggtttgttttgcatcgcattgccatgaacttaaaccacaagatattattgcgggaaaagcaatggatgatcgcgcaagttgttttgcattagttgaagcgatgaatcaattagttgatgttgacctagatgtaaatgttgtggcagcctttacgagcagtgaggaggttggtacacgaggtgggcgattaacagcgcagattgtaaatccagatattttctttgcggttgacgtggctaagaaccctgaacttgaccgtggttttatgaacactcgtaagttaggaaagggaccaatgattgaattttatgataaaacaatggttccgaatgccaagttgttacggatcgtatgtgaaattgctgactctgcaggcctcccatatcaaaaagacatgtttaagggtggtggaacgga

SEQ ID NO: 387 - DNA, 13534 bp, synthetic construct
  misc_feature 1..13534: note = Synthetic
  source 1..13534: mol_type = other DNA
acagctttaaagaaatttgcagttagtgcccgacacaaaataacaactggtgtccgcaatcgtgcggcccagtttggtatcactgcacaagggattgcgcctatacaatcccttgctgacggttttatcgtaaatggacacatttttgataacaagacgcaaacgcaatatgaacatctgcgcagaagagtagagattgatggctacaaagcagttatggagacggcaagctacacttggttcaatcgtctgatcgctttgcgtttcatggaagtccatgattacttgccgatccgaacacgcattttatcgtctttgaaggcgaataaagtggagccggatgcggttacggaagtcctacagctggtagatgaattgtcgcttgataaggaactgatctatcacttacaagacacgcacaatacgaatgaattatttaaatacattatcgaaaaacaagggatgcaactggaaaaaatgctgccgaatgttttttcgccagtggaaggagacttctatctgctgctaccgaatgatttgttgcaggacaacggcatcatcagggacttgattacgcttatccctgaagaagcatgggatgatatcgaaatcgttgggtggttgtatcaattctatgtttccgaagaaaaagaccagatcttttcggacttgaagaagaacaaaaaaatcggcaaacaatcgataggacctgctacgcaattattcacgcctaaatggattgttgagtacctggtcgataattctttggggcgcctgtggctagagaataatgcactcagcaatctgaaggataaactgcattattatttggatgcagctgaacaaacgccggaagtaatggaacaattagcagcattaaaatatgagaatctgaaaccggaagacatcaaagtgatggatcccgccatgggttcgggccatatgctgctgcatgcctttgatgttcttcgtgaaatctatctggaacgaggatacaacccaagagaaattccacaattgattgtggagaacaacctatacggaatggatatcgacaaacggcccgcacaactggcgtccttcgctatcgcaatgaaagcccgtttctacgacagacgtttctttagccgagaagtccgattccattttatcggctttgaggaaagcaacggcttagagttgtttcataacacctccttgccgaatgaaacagctgtcaatgcagaactggagaacctgtatgctcaattctttgatgcgaaaatatacggttccattctgaaagttgaatctgttgatgtgaatctaatcgaggaagccattcgccatttacgaactagccgctacgaggacatcatctcacaaggctacctgaattttgaggttccgcttatcgaagaactgcttgaacagcacaaactgctgacgctgaaatacgatatcgttgtaacgaatccgccatatatgggtgggaaaggaatggatcctaaactgttggactttgtgaagagtaactatccagatagcaaaaatgacctgtttgcggtctttatagaagaatgtggggagttactgaaatccaccggctatcaggctatgattacgcaacacgcatggatgttcttatccagctacaagcgcttacgtaataagctgatacatcatgacatcgtcaatatggcacaccttggatccagagcgttcgaggaaattggtggtgaagtcgttcaaacaactgctttcatattggcgaaacgcagtgtaaaagactatatggctacgtatgttcgtttggtgaattataacagtcaagatgctaaaaaagaagcgttcttgtcaaagagcaaccgtcacacagccacaatggctaatttcaaaaaagtaccggggttacgctatgcctattggctggatactgaatcgatattcaccagtagactaattcaggattgctttgaatctggcggtcgtaacaaaactcataacaatgagaagtatgtccgcttgtggtgggaatgcgataaagccgaggataagtgggttttgtattcaaatggcggttattatcgcaagtggtacggaaacataaccgatgtagtaaattggtctgatgttgcgaaagctgagtatgcttcgcatggaggtatgttgccccaaaagagctttgagagcactggcataacttggaacgggattgctgggaacaactatgctttcagaattaagttgaaaaatatccctttttcatcgagtgctcctacaatcattacccttaacgatggtgagttatacgctacccttgcttttatgaacacaaaagtcagtagaatgctgcttgatgtgttaaacccaacgttacagctaaatgtaggtgaaggattgcaacttccattaaagaaacttaatagtctatcgggatatgtagaagaattatcaaaaagcaacatcgccctttcccgcgctgactgggactcttttgaaatctcgttggattttaaagtacatccattgttagaactgaaagaagatgctggcgatggcacagatatgagcaaatggatccacacaataaaatatgcatttaaaaattgggaaaccttcagcaatgatcgcttcaccaaattgaaagctaatgaagaggaacttaaccgcatattcatcgacatctatggtctacaagatgtactaactccagaagtggaagataaagatgtaactgttcgtaaagcggatgtagaacgtgatatacgtagtttcttgtcttatttagttggagtcatcttcggtcgttaccgtctggataaaccaggtcttgcctttgcgggtggtgaattcaaccttgatgactttggttcgtacaaacccgataaggacaacatcatcccgatcactgttgaacattattttgaagacgatatcgtttcgaagatcactgaattggttggaatcatttatggtaaggatacattgaatgaaaatctgcagttcatcgcaacccatttgggaatgaaggaatcagaatcagctgaagacacgatccgccgctacttcatgaaagatttctacaaggaccatctgaagatataccaaaaacgtccaatctattggcagttcagcagcgggaagaagggcgccttcaaaggtttgatgtacttgcaccgctatgataaatatacgttggcgcgcatccgcaccgactatgtcttgaaactgacgacgaccttgaaccaactgatcgaacatgcgcaggtcatcatcgacggaaatgtttccgccaaagaagtggcgcgtgcgcgtaaggaaagagaagcttatgaagcgcaactgcaggagttacgtgaatacgatctgatcctgaaacagttggccgatcaggaaatcgaattggatctggatgatggtgtgaaggttaattatgccaagttccaggagatcccatttaagaaagacaatggtcgatcggagaaaatgaacttgttcgaaaaaatctaaagttgaaaaagttgccaagatggaagaaagtttccattttggcaacttttttacgtttgttatctggaggatgtgacattttggtaacaatagaattgtggttcgttcccgtttgctttaagataaagggagagatttttgttgaggggataatagacatgtatgaagcagaaaaaaggctgcaggaagtttttcagcagccacttaaggattatcagaaacgccgcatcatcttctggtatgataaatcccaatcattttcggatgaactgaaggaatatcagctagatgatgtgttggtgttgcgctgcgatgaccagcattattttgaaacgaagtatttggtggaacatgtgcatcccgaacagaacgtgctcatctattttgagcaggaacggccggagaacgaaaaaaatccgttgttggatatgtatttttacagccaagaattcaagatggatccgatggagaacctgaaggatgaattgggcatcacgattgaaaccagtgatgtgttcttcaaatcctatcaattgtttttcaataataaacaacgccgcaaacaatttgtgaacgtgttggcggataaacatgagatcaccgaaatggatttggaacttgcgatactgtgtgtgttgaccaagacaaaggaattgcatcctttcggcgtctttcgctcactcttcacggagtacggaagcggccaggacagtctgtggcaacaagtggtcaagttcggcagaccggccgctttttggcaattggctaaattatccttcggttatgtgcaggaaacgccaagcatcgccactttatgccaagctgtgttccaaacgaagttgcatacagagttcgaagggaaaatcccggcgaattgggagaagcagttgctgagacaagcgaataattgcgtcgtattcctgaaccgctggatgaatcagcgcgacgaacaggacagctacaaccgactgtcggataacgttttcgaagaattgcagatcgtaaaatggatgaagaacaagccggctaagtggttggcgcaatcggatacgttccaagcttttgataagcaactgatagaaggcatcgctgtgcaattggcggaaggtgctatcctatttgatgaattcgagaacatcatcatgaatcgcagatcatcttattggtttgaagtttttgccaatgaatatgaaaccgtgttggcggccagtcgtttgttgaagcaagtccatctgattgaaaaagaaggttttccatatcagaaagaggcattctggaaaaaatatgaggaacactactatctattggacagctattatcgccaattctacgttgcctttgacaagggaatcgcgttatccgatgcctttgcatccctacggataacagtagagaactattacaaaaatggctttctcgctaagatggctgagacctggatgacattcttcaatgatgcagctgctttttcggttgaaaacacattgaagcaggaacgtttttacaaagactgggtcagcacctatgccataaaggagaaccggatctttgtgatcatctcagatgctttgcgctacgaagtggccgtcgagttgggacaacaacttgaggccaacacgcactataatgtgacaacgcatgctctacagggagtcgttccgtcctacaccgaactgggcatggcaagtctcctgccgcatcatcagttaagcctgtccgcgactggcgaggttgttgccgatgacttgggcacaaaaggcctgcaccaacggaatgccgtcttggaagccaagttgggtgtagacagagcaaaggctgtcaatgccaaagaggtgttgaacagttccagaagcgaactgcgggaaatgtttaaaggcagcaactcgatctactacatctatcacaatacgattgatgcaatcggggatcatgccgccagcgaaagccacgtttttgaggctgtcgaacttgcgcagcaagaactgattcggctgatcgacaaactgttcaatggtgtcagtgccgtccgcttcatcgtgacggctgatcacggcttcctttacacgcgggatgccttgcgtacgttggataaagtgaatgccgacagaacagatgtcatcgcatcgaaccgccgtttcttcacgaatcgggaagccgacagccaaaatccagctttgctggatttcaaagtggatgcattggcggatgaagatgtttatgtgcatatcccaaggggtgccgctcgattggccattcaaggcggcggatcaaactttgtccatggaggcatcttgcctcaggaagtgatgatacctgtcttggaaatttcaacggagcgcggcaaagaaatgcataaatcagtggatgtgcagttgatcagcaacaccgaccgcatcacaaacatcgtcacttaccttgatttcttacaagtacaagctgtttcagcggaacgaagggcaaggaaagtgaaactgtacttcgtagatgaccaagacaccattatttccaatgaagtcacactcttggcagattcgcccaatgaacaggccagtgatcggatggtccgcgagaaatttgttttgctgagccaatcctatgatctgctcagcgagtaccaattcatcatgattgatctggaaacaggagaagaaatcaaccgcaagaaatttgtgattgatttgccggatgcaggattattttaataacactgtttaaattttcggataataaagtttaagaaagtgtttgcatttcattaaatagtaggttatagtttgtttataaagttttagccgactttataaggaaattatagtaagagctcccttcggggactctcgcaaagctctaaccccagtttcttcggaagctggggttatcttttacacttttttttggaggctatcatgtcgaaagaaggaacatcaaagttacctattatgataccgaacgaacatgcgcttgttatctacaaactgttggctgaggtcaactataagattggatatgcaagcggtcagtacaatcggtctttcatgaagaaatatattgagaatttgttctatttgaaggaatctatacattcaaccagaattgaaggaacacaagtcacctttacggatattgtagaagaaagaggcgagaaaaatccgagctgggaaaggatagaggtactcaattatcaggaagccttgcggcaaggggcttcctccatcaaaactggctatcccatcagcacacgtttaatcaaagaattgcaccggactttgatgggaaatgcgcgaggttccaacgcatccggcggtgaattcagaaaaatacagaatttcataggtcccagcaacaggatagaggatgctgtgtatattccgattgcggcaaatgaaatcgatgaatacatggagaatttaaatttttacatgaatggcgttcctaacagtagtttccgtaaattcaacaaaacggacggattcgtatttgatgaagagtgcgatccgatcattaaagcggctgtcatgcatgtccaatttgagtcgattcatccgtttttggatgggaacggcaggttgggaagaattctgattgctcttatcgctattaaagaagatctggtggatgtcccggtattctttgtgagcgaagagttggaaaaagaacgtgctcgctattatgccatgctgaacggggtaagaggagacaaccctgattggtattcttggatcaagttttttatcaccgcatgcggacggatggcggattctttgttgggcaaattaaaagcagtcgaagaactcgcctcgaatggattaaaaaaatgttcgttagaatccgagaaaaatatttggctgtatactttttccgacccctacacaactgcaactcgcgtagcagaaaacttgcatcttgctcctggcaccgccagaaagggattaaaagccttatccgatgcaggtcttttgtatacagacgagactgcaatcagaaacaggaagtaccgcaattacgacctaatgagaatattaaactgattgagctttctgtcagacaatccaggcctcttcggaggtctatttttatattgtaaaaagcgttttcttttggtacgataatattaaaatattgacatgatccagaaatcaggaggactacatatgggaatcaagattgggttggatgtgggaatcacatcggttggatatgctgtgttgcgtactgatgatgaaggtgtcccttataaaatagaaacacttaattctgttatttttccggctgcggaaaatccaaaatcgggtgattcattggcagctccgcgtagaggcaacagaggctcccgcagaaggacacgccgtaccaagttccgtaaatatcggacgaagcgcttgtttattcggcatggtttattgactgccgaggaaattgaggatattttcaatcaaaaattagggcacaaaacaatttatgaactgcggacagaagctttggatcggaagcttacaaacgaagagttattccggattctgtacttctttgcaggacatcgcggcttcaaatcgaaccgtaaggcagaaattgtaaatgcggatgctgagacagggatggtgttgtcagcaatcaatgagatcaaagcagcattggaagatggcacttaccgaactttgggcgaatatatgcatgcgcacccgaaatacgaggagcataaacgcaataaagatggcaaagaccgttatttagggacagcccagcgcgattttatcattgatgaaatcaaacagatcttaaatgctcaacgcggattcgacaataaatctttgacggatgcgttcgaacaagccttcatcggtaatggtgaaggcgaagcagcaggcatctttactgcccaacgtgactttgatgagggcccaggtaagggaagtccttacggcggcgatcaaatcgagaagatgatcggctggtgtacctttgagaaagaagagcaccgtgcggcaaaaggtacgtatactttccaatattttgagctgttgagtaaactcaataatctcaaaatccaggagtttgctggggatgattggaaggaattgaaccctgatcaaaggcaattgatcatcgataaagccttcagcaaggacaaactgcaatatgccgaaatcaagaaactgttgaagctggaaccggaagcgaaattcaatttgttgtcgtatggcagtaagactgaacaggacaaaaccgaaaagacgaacttcgtcgccctgcggagctatgacaaagtacgcaaggcgctcggcaaggaagtatacgaagcactgcctagcagcctaaaggatgaaatcggaacaatcttgacgacttattccagcgacaagagccggcgcagagtgtttgctgacaggttgagtttgacggccgaacaggttgaggcactcttaccgcttacgatgacgcaatacgggcatctatccttgaaagcaatgcgaaacctcatcccctatttagagatgggactgacctatgataaggcagcagaggctgctggatacgattttaaacataacgctatagacagagccttcatccatgaaaatgtgtccaatccagtcgtaaaacgcgccgtcagtcaatgtattaaagtcgtaaaccagttgacccgcgagtatggcaaacctgatgcgatcaacatcgagttttctcgtgaacttggaaagaactttgacgaacgccgtaaaatcgagaagggccaaaaagagaatatggcgcgcaatgaaagtattgccaatgaattacgcgaaaacggcatagcagttaacggagagaatattacccggttgaaattatggagagaacagggcaatatggacccctataccggtcaatacattccctatgaggaagtattctatgggaattatgatgtcgaccatattattccttacagcatttctttcgatgacagctttggcaataaagtgctcgtgagctctgcagctaaccgtgaaaagggcaaccgtatcccgatggaatatttggcgaatgatccgattcgtattcagagcctggaaaatattgcgggaactatccgtaattataataaacgggaaaaattgttgaagaaaaaattgagcaaagaagatgtggaaggctggaaatcacggaatatcaatgatacgcgctacattgccagactattgcgtaactacttcaaacaaaatatcgaattctccgataaggaaaacatcaaagagaaagttgccgttaataacggtactgtaactgccagaatgcgtgcacgttggggactcgggcctaaacataggaataatgaccggcatcatgcgatggatgcagtcgtagttgcttgtatgactccagcatttgtcagaagggtcacagtctacagtaagcgccaagaagtgcgcttcaacaaatccttgtggaatgagggtaccttggaatcagatttagcccacatgagtttggagaggcgtgaagaatacgaaaaaatgttcagtaaagctttccctcagccttgggaagggttccgggacgaattgaatgcgcgattatcggataacccgaaagaactgatcaagaacatcaagaatacattgggcacctataccgatgaagaaatcgataaacttaagccgatgtttgtcgtgcgaagaccgaataagaaaattaccggaccggcgcatttggaaacaatccgcagcggcaaattgttgaatgaagggaaatccctgagtcgcgtcagcatcagcaaactgaaactgaacaagaatggcgaaatcggaacgggaaatgctgagttttataagtctgaggataatggctggatgcctgtttataatgccttgaaagcagaaatggagaaaaatggcggaagcggtgagaaagccttccccgatggtgtgtttacttatacgcaagaaaatgggcaaacccatactgtccgaaaagtgaaagtcgttcaaaaatctacgctgcaagccgtactgaatgatggtaaagcaatggcagataatggatcaatggtgcgtattgatgtgttccggacgccgaagaagtatgtgtttgtaccggtgtatgtgaaggataccgtggcgaaagagctgccgaatagggcatgtgttgctcataaaaattatgaagattggtataaagtttcgaaagaagataacttcttattctcgctatatcagaatgatgttgtgtatttagagcacaagagtggtattccattaacatatatcggtgataatactggtgtaaaaaaagataataagcttgttggatattttaatggttcaaacattgcaaatggaacgattgtcgtaaaaggaccagatagttcgttttatgcagaaggagttgggatagcgacattgcttaaatttgaaaaaatgcaagtggattatttaggcaatctgagtaaagtcaaagaaaaaaccagacaaacgttttctaatattaagaggtgatagtgatggggtttcgaaatatctatattgaaaatccagctcgattaagcatcaagaatcgtcaattaattatttctcaggatcaggatatttcggtccccgttgatgatattgatagcattgtgattgattctttacaatgtacattaacagcaccaaccatttcttttttggcagaaaatcaggttgtcctttatacgtgcaataagcagcatatgccctgcgcagtcttgaatcctttgggaaatcactccagaaagttaagcattttacagaaccagatgggtgtgactaaacgattcaaagatagggcttggcaaaaaattatccggcaaaaagtgttgaatcaagctagatgcttggagttgacttcgtctcccaatgttgctgaattgaatcagttggccacacaagttttggaaggcgataaatctttcaaagaatcaagtgcagcagctctgtactttcgttcgctatttgatacaagttttaatcgcaggcacgaaacggttcataacgcagcactgaattacggttacgccatagtgcgcggagcgattgctagagatctgtgtgcatatggttttgagccagcattcgggatccatcaccacaatgaactgaatgcattcaatcttgcggacgatcttattgagcctttcaggccctatgtggatttatgggtggcacaaaatgttgatcccgaagagaaagttcttacttccacgtacaaacgtgatcttgtttccttattgtttacagaagtaaaaatcgataatgaattacattcccttaccaatgcaatccgaaaaacggtagcttcctacaccaattgttgcagaaataacacaacgaccaatttgaaattgcccgaattggttccgttgcgaccgcacgagtatgagtagccgctttatgagaatggtggttatgttcgacttacccgtggaaacgagagaacaaagaaaaattgcaacaaaatttaggaagtacctattggatgagggatatgtaatgatgcagttttcggtttattatcggatttgtaacggaaaagacatggtgaataaatatctgttgcgcttggaagataatgttccggaaaagggttctgtcaggttaattaccttgacagaaaagcaatttagtgaaatgaaagttttggtaggtggcgtttcacctatagaagagaagctggattccagcaatctgtccgtattttagacacgccaaacggcccctcatagttgatatgaagggctttttcgcgcgagatgttttattttagccgattttgtaaggaaactatagcacagtattggcattgaaatgtgcctgacttgttttattttagccgattttgtaaggaaactatagctcatctccattactgaaaatgttgggcacagttttattttagccgattttgtaaggaaactatagcaaaactagagaagaaagcaggcaacacacagttttattttagccgattttgtaaggaaactatagcgacttaaaaagcctctcactcttaatcggggttttattttagccgattttgtaaggaaactatagcaagggcagaaagtctacatcacagaagtaggttttattttagccgattttgtaaggaaactatagcttaacgcaagtggtagtaccgaaaccggacgttttattttagccgattttgtaaggaaactatagcccggcaagcgcatcaatcgacaaagaaacggttttattttagccgattttgtaaggaaactatagctgcgagagttgtcataaagagtaccataaggttttattttagccgattttgtaaggaaactatagcttaaatccatctgtgaatccggctgtctttgttttattttagccgattttgtaaggaaactatagcctgcctaattggaaacattctacttctaccgttttattttagccgattttgtaaggaaactatagctggcgacatggggcgcagtcgtcgcgtttatgttttattttagccgattttgtaaggaaactatagctgtgctactccgtttaatgtgattattactgttttattttagccgattttgtaaggaaactatagctatgatcagttcctcttctgtcagcggcgtgttttattttagccgattttgtaaggaaactatagctgccaatgtgaaatagcgtgagaatgcgttgttttattttagccgattttgtaaggaaactatagccggtctagtcttgtgccgccatcattgaaagttttattttagccgattttgtaaggaaactatagcgttgggaggcggttgtgtgagttacgcagtgttttattttagccgattttgtaaggaaactatagccatgggcaacacttggactactctcaatcggttttattttagccgattttgtaaggaaactatagcagtccgcgaaccttagcaaaacttagcatagttttattttagccgattttgtaaggaaactatagctcataacactcccacagttcgtttagcggagttttattttagccgattttgtaaggaaactatagc

SEQ ID NO: 388 - DNA, 23066 bp, synthetic construct
  source 1..23066: mol_type = other DNA
  misc_feature 1..23066: note = Synthetic
atccggtactcggttgccgcaatgccgctgccatcatctgaagcagtgagcgtgagcgtgcgtggcgacaccgtgtcatcaacttcagcggtgatcgttggcacggtggcgtcaatcttgaacgccaccgagtccgagacctcctcagcctcgggactcgatgcccgatagtgcacggtgtactcgccgtcgtcagacagcaccactggggcggtgtactccgaccagtcaccatcgttgaccttgacctcgcggtacacggagctctcaccaccaccagtggtgtccactgtgaccgtgacatcgtcggtgtaccactcgttggcgccctgcggcgtctccgggttcaccgtggcagagactgtcaatggttcaacagtgtcctcttcgactacgtggaagtagtcgaagcgtgcggtgcgggacaccgtgtcctgggcgggattgcccagagcgtagagccccacgctgccgtctgctgcagtcgcgttcgtcattgcgacatcaccaagagcagtccagtcttcaccgtcggtgctgtagtaaccggtgaaatcgtcaccgtcacgcgtcagtcgcaaccatgcctctgttgcaccttcaagaggcgcattcggctgcgggttctgtacggctgcgttgatctctgaacgcatctccacgttgcgagtcacgttctgtccagcgcggttcgtcgagatgacatcgatcttgacgtagttgtcgtcatcgaaccgggcgatgatgccgccctgctggtaacgacggtcgagggccgaggcatccaccttggtttccacagtccactcatctccttcgacgtcctgaacgatgaagttcggaacgtcgccagcagcgctggtgtagatgtcgtgggcggtggtgtcgatctcgaggtggccgtccgccacgcggtacagatccgtgtcctcgttgatgacattccaacggcaggtgtcgagctgtgaaccgtcgaactcatcattgggagtatccgcagtggcggtgtcgtccggtgtgatgtggaaccagtcgaagtgcgcgtcaatcaactcctctggcgcggccgcattcgcccacgccgcgacaccaatgcgcgggttctccatgcctgcgagggccttggtctccggcatcatcgtgaagtccacgccgtcagccgagtaccaagcgttcaggttctcgccatcactggtgaaccgcacaaagtaggtgtcggggaaatcgactcctagggttgccgtgttcgaggccgacggaatctcgttaggtgcgccgtcctcctctcgcacgaactggaagatgcgctccgccgcgctgttggcgccacgtccttgcagcaccatctttgcgtagttgtcgtcgtcaccgtagatcaacagaccggcctgctgataccggtcacgtgcctcgaacgtcaccttggcagtcgccgtccacgggcccgcagggaggtcctgcagtaccaggttctgcgcggtgttcgtgtcccggtagaggtcggtgcggctggccggaatcaccagatgaccgtcctcgatccgtgcaaactggtcgggacgaacgatgccgtcccagcgagtgtcattgaggtgctcatcggtgaagtcgtccgaacgtcccgagaagcacatcgtctgtgccggctcagtcacattgatggacacgtactcttcgccgtatgcgccagcctcgtccgtgccgcgcactttgagcaggtactggccgggctcggtgtagacgaactgctccgactcaccgccggcgacaaagccgccgccagtgccctgatcccaggtgagcgcgacatccgtgccctctggatcaatcgccgatgccgtggcgtcgaccacgagcgggggctgaccggagaccggcgtggcttccaactcgaccacgggaagcttattgccgtcgaggccgtcgccttcccacgagaagtaattgatgttcacgccgccagtctcgttcaccatgtacagcgtgcccgtgccagctggcaggttgggcaggtcaacggggacatcgacataggtttgccacgcaccggtgcgggcgtagtcaaacgaagcgaactcagcggactcatcgagcgagttccaccgcaaggagatggtgcctccagcagcgttgggtgaggccacgcgtgccgtcattcccgtgatgcccttgaagttcactggctcgtaggaccaccagtctccgtcgccaatgtgcgacaggttctggccgccgtctccgtcaccattgtcctcggtctggacgccaccggcgtcacctcccgtgagatcgaagtactcggcttcgaagtgcttggggttgaggatgttggtgccataggcagtcaacggaactccggcttcgccgccgtcatccgtgtagcgcacgtcgaccacccagaagatgttcgccgtgaggccgtggcccgagtcacgctgggtgacgattgtgccttcacagccgctgagggaatccatcgggtgctggtgagaatcgtgacccagagcggtcaaaacctcgacgttttcgcacaggatctcccctgaggcgtcggggtcgttgatgacaacttcgtagtcgacgccgtcgccccactcaaagaatccgccctgctcggggaagatgatgtccactgtgggcatctcattacccaccacgatcggcacagtcgccgtcgcactgcggtcatcggggtcgcgcacggtcagtgtcgcagtgaactccccgagctcggtgtaggtgtgagtcgggttggcctcgttggagacggccgaaccgtctccgaagttccattcgtaggtgaacggaagtgccgcggggtgacggctgccctctgacgagaactgcaccatcatgggcgcgtctgcgccgtgagtcacatcggccgatgccttggcgattggcgatgggttcgccgctacgtagtcgatgcggtacacgccggaggtggcgttgtttccgccgaaacctgcaccccagtcgatgacatagagcgagccgtcggggccccattcggcgtccatcacacggttgaagccagagtcctcaccaatgagtgaaggcagcatcggtgcaacattcaggatttctgtacccgggttgtcgccgtcacggttgagctggaatccgtatgcggaaccggcgttccagtctccgaagaaggccttgccgtcccagtactcgggccacttggtttcgacgtccaggtcggggtcgaactggtagacaggtccgcccatgggtgcaccggtgtagccaccgtcaccgacgatgggccaggggttgtcggtggcacgtcgttcaccgtggtattcaggttcgatgatgggcgggaggttggtcagtcccgtgttgttggggctgtcattgacgatgttgttgggatcaaactctgcaccggcactaccggccccgaagtcgtagtcgtgatagcactcgtctccggcgcagtacggccagccgtagttacccggctcgtccacaatgttccactcggtggtggcagccgggccacgtgaggcgttgtcgtttccggcatccgggccgtagtcagcgaccaagatggcgccactgatcgggtccaggccgatgcggaatgggttgcggaaacccatcgcgtagatctctgggcgagtgaggtcgccggtggcggcatcctcgtcgaacaggttgccctcagggatcgtgtaggtgccgtcgtcttgtggcgtgatgcgcagcaccttgccgcggagatcgttcgtgttgccagaggacttttgtgcgtcccacgcggagcgacctggctcctcgtcgatgggtgtgtacccgttggaagcgaaggggttggtgttgtctcctgttgccagcacaaggttgccttcgttgtcgaagatcatgtcaccaccggcgtggcagcactgtgtgcgttgcgtctcgacctcgagcaccacaatctcagagccgggatcgaaggtatgggtgctggggttataggtgaagcgtgagatttggttgtatcccattcccgcttcggtacctgcccgaacggtttcgggcgagtagtagatgtaggcccagttgttcgtggcgaagtcggggtcgaggaccatgccgagtagaccgtcctcttgccccagtgagacctcaagatcgaggcccgtggtggttccgggcgtgtcagcgtcgatcacccgcacgcgaccgtcacgttcgaggtagaacacggtgccgtcgtctgcgacgttgagcgacatgggatttccggtgtctgcgtcaagcgtcgcgagttcataggcaacgccgtcggtggcgttgcactgcgagtgcacggttccggatgcggtgcgaataccttcaaggaggtgctcgaggaagtctgcgtcggcgtaggactcattggtgtgtccgccgccggtgtaccaggaacgaccaccgtcgtagagctggcaccaagcgatggggtggtctccgcccatctgaactccgccgtaggtggactcgtccagagaagccaggacgtggacgtcgctgcgggggttgtccttgaagttgtaccactcgtcgtagcgggtccatacctcgtcgaggtgctctgtcgaggcgtgggagtggtcctcgacgatgacatctgctgtctgctgtgcggggtggctatcgaagtaggcacccacaaggtcgccgtaccactcccattcgtattcggtgtcggaggctgcgtggacgccggcgtatccgccgccgccctggatgtagtcctcgaaagcctcctgctgcgtcgcgtcgagcacgttgcccgtcgtggagacccacaccacgacgtcgtactgctcgaggttttcttcggtgaaggcgccggcgtcttcagttgcgtcgacgtggaagttattcgcgtctccgagatccctgatggcctggaccgcggtggggatcgaattgtgccggaatccggctgtcttcgagaatacgagcgccttgaaatcggcggtttctggctcgacctcggcggggaccaaggtggcggcggcattggctggaagagccgatgctgttgctgtggtggcggctacgcccacgagcggcacggacagcgccacactcgccagggcggcgacccatcgttgaggccgaagatgtacgtccttgtacaaggttttcctcctggtattcgcttcattgcgaagttatgtcgatacacacacggaagtcgcgagtgttctcacctaacgggagcaaaagtaatcgaccatatgttggaagtcaaaccaaattactgaaatgtttgatcacaaatcggacacaacacgggttcgcgccctccacgtcgcccgcgccgtcgccgatcgcggtgcgctcagctcccacgtcgagcagccccacgcggactgcatgcgcgcacgacgacaacgccccccatgcggggtcatcccaagggagaaaaccgtacctagcaggacctagccacggaaagactgagcacgcttctgcgtcgcccacgccacaatctgtgtccgtcgacgcaagcccatcttggcgagaatcgacgtcacgtggttcttgacagtcttctcagcgatgccaagatcgtcagcgatctcgcggttggccttgccctcccccacgagcttcagcacgcgacgctcggtaggagtcaggctcgacgtaatctcgtcctcgcccactgcgatgtgctggccgtgctcgcgtccagtggcgctatcaagcaccgccttgacgacctctgcggaaccagcagtctttgccacaaaggcatccgccccagcttggtgagcagccgtccgcgcctcttcgtcgtcataactggtcagcaccacaatgtgtgtgtcagggagcgtgccccgcacgtgggcaatgacgtccaggccggtgccgtcgggcaggcgaaggtctgagaggatcacgtccggccgcaccgcatcagcgcggcggatggcctgggctaccgaagccgcctcggccaccacttccactccgtcagcgcggtccaaaatgtcacagatgccgcgcctcacgacttcatggtcgtccagaacgagcactctcacgtctcccataccctgcatcgtagaggcactacccatgcatgacctagcgggcacgccctcagcgcgacttcacgccaaggcgcccgcgcgtcaacgagagacacgtctgggtgcccaccggcgctgacaccgggcacaccagtgggtcgcgcgcccgcccactgtcgcgcgacgcatggtcgagccgcaccgcgaacacgccaatcccccacgcccgtaggcctcgagaccgcgttcaaagtagcccgactcgccgttgacattcacatacagcgcatcaaagctcgtgccacctgccacgagcgcatcagacatcactgtgcgtgcagcatcgagcagtgctcgggactggggcgcactcaaggcgctggccggtcgctcaggatgaatacgcgcatgccacaacgcctcgtcggcgtagatgttgccgatgccggatgccaccgtctggtcgagaagcacctgtttgatcgcgcgctgaccccgccgccatccgcgcaggatcgtgggatcgtcgcacgccggatctaacggatctcgaccaatgtgggccacgctcgagggaaccgcagcgaggtcgcttccctgcccacccggggatgcatcggccgtcggaaccaagggctcgacgttgaggtatccaaaggtgcgttgatcgaggaagtcgagaacgtgaacacgcccctcgcggcgcagcgagaggcgtgcgcggcaatgcggatgcggcgctgggacctcgtccgccgcatggacacgaaattgtcccgacatgcccaaatgcgcggacaacgactccaccgcgagctccgggtgtggagggacgctcgggaacgccaccggcatccacaagaacttgccgcgcctgaccgcccccatgatggttgcgccaaggagtcgagactgaaactcctccggacctccggggagtaggcgcacgcaggagtcgcggaagacctcaacatcggccaccgtggcacccacgacgaaaggctcaagtcccgctcggaccgtctcgacttcggggagttcaggcatgggcgtgcagtaggggtagcggtctacgcctgtgcaacaacagcgcgatacgcctcggcggcagcagcttgctcggcatgcttcttcgcggatcccacaccggtacccaaggccacaccatcgacggtcacggtcgcggtgaacgtgcgggcatggtccggtccctcaccctcgcaggtgtagaccggagcgggcctgccatgctcggagcaggcctcttgcagcgacgtcttccaatcgagtgccacgccagaggtggcggccgccttgaggtgcccgtccaccaagcgcaacaccatgtcgcgcgcttcgtcaattccgtgggtcagatacaccgcgccaatgagcgcctcgacggcatcacacaggatggagtctttgtctgcgccacccgtggtgcgctcgcccttgcccaacaaaatgcagggtccaaggtcgatttcacgcgctatttcagatagcgccttctgagaaaccgtggcggcacgcatcttcgcgaggtcgccttccggcaaatcagggtgatcgcggtagaggcgatcggtgaccacgatgccgagcacggagtcacctaggaactcgaggcgctcattcgtgggaagcccacccgcctcgtaggcgaaagagcgatgagtaagcgcgaggacaagtagttcggggtcgatagtgacaccgaggcgcgccaccagggcatcggctgctgcctggcccggaatggtcaccttgtacttgtcctcgcgctgaaaactctttacagctcgttaacggtgcgcagcgcctcagcgtactggcgaccgttgtacgcaccgcatgacgggcatgcggtgtgagcgagcttgtccgccttgcaagacgggcacgtcgcgaggttcgcagcggtggtcttccactgtgagcggcgggcacgcgtgttgctgcgcgacatcttgcgcttgggaactgccacggctaactctctttctgttcagtcaaactctgcaatgtcgaccaccgggggtcgatcacctcgtgggcgtggtctgggtcatccacgagccgtgcaccacattggtcgcacaagcccgggcaatccggacggcacagcggagtgaacggtagttgtgtcactaccgcatcccgcaccacgtcctcaagatcaaggttttcaccatcaaactcaaagacgtcctcgggttcctcgtcgtcctcgccgacctcgatcttaccgactgtgaacaatccctggaccacggcatcgacatcctgccgcacctcgtccaaacaacgtccacactcgccgatcgcttcggcttgcacggttccggatacccagatgccttccgctacagactcgaggctcgcggtgagctccaactctgcaccttcaggcacactgatgacacttgtacccagggcctgcggcacgggaaacgactcctgaacctcgcggtgcgagcccggactccgcgcaatgtcccgtacgtggaacatcagcggagaggtgttgggtcggtgcgacatgttctgcgcctcccatcgtttccagtcccgcaggacctggtccacacatcatcagcaggaccgacgcactactttacgcgaaaaggggccgcatactcaacttcagcgggacagcgccgatgcgatcgccgcagatactccctgtggaacgtacgctgagacatccccaccatggcgcgccacgtcgcgtaccagggacgatgcgacgtgactgagggcgttgtctcccacaataaagacggtctcaatctcagacagtgacctgttcatcagggccatcggccgctcggcgtcgaagtcagcgccgccgcgcagtcccttcacgatggtgtccgcgccttcagcagcgcagaaatccaccagcagtccgtccgtttgcgtcacccggacattggccagatccgcagtcgcgtgagccgccaggtcgacccggacgcctgcatcgagcaggggcgtcttggtggagttatgggcgaccgcgatgatcagttcgtcaaaaaggcgcgaggcacggcgcgcaatgtcgacatgacccaccgtgatgggatcaaaggtgccggggagtaccgcgatggtcatagccctgacgctacctggcaggtgcgggtgcgtgcgactcgcaacgtcaagcgctcaactacgttcggcgtacatcagccgtgtctcgccgtaatccttagaagtcaggacctccaacgccgctggccactgcggcgcgcgagcgcgcgtggaaccttccaacaccaccatcgcctgcggcgcgagcagcgccggcagcacctccaggaatgcgtccacgtcatccgggttcaagtcgtaaggcggatcgatcacgaccagcgtgtagcccggtgcggtcgcggccgagcgggccacaaacggggcaaccttttcccgcaccacgcgggcctgcccctgcacgcccagctcgcgcacattcgcctggagaactcggacagctggggcgccagactccacgagagtgacgtcactggcgccacggctcaacgcctcaaaacccagcgcgccggaaccagcgaacaagtccagcaccttcgcccccgtcagcacaccagcatgatcgagccgcgagaacaacgcttcccgtacgcggtccgtcgtgggacgtgtgcccttggctggcacctgaagacgccggccgcccaactgtcccgcaatgattcgtgtcacggctccagagtaacgacatgcttcaggcaaaaagaaaacggccccacgagggagccgtctcatcttgtggagtcctgatccaacaagtttctccttgttagcggcagagcccatttcccagagcgataggttgtgatgacttttatacacgcagtgtcagagggtgtcaataccctcaagtttggcggattcacgccgataacacgaacatacattagggggagcattacatgactggcactgacgccacagcacactcgcacacgccgtaccgcctcgggctcgatgtagggacaggatctttgggttgggccgtcgttgaactcgataccgacggcaatcctgtccgcatcgtgcgcaccggctcgcggatctatgggagcgggcgcaaacccaaggacttttcatcgttagcggccgaccggcgtgccgcacgtcagatgcgcaagcaacgcgaccgctatcttcaacgccgcacgcgcctcatgcatgaactggtggccgccggtctgatgcccgaggccgaggtggagcggcagaagctcaaggatctcaacccctacctgctacgcgctcgtggggttaaagaggaactgaccgcccacgaacttggcagggctctctttcatctccagcagcgccgtggcttcaagtcaaatcgcaagacagaccgcaaggacgacgaccgcagcgcgatgaagagcgccatcgcatcgctccaatccgacttgggcgacgacacccttggcacgtacatgtggaagcggatccagaacggcgaatctgtgcggtcccgtccgcgaaaggtcgggtcaaagaacgagtacgacttttacgtgaaccgcgcgatggtcgaggatgagttcaatcagttgtgggactaccaaagccagtcccacggcgacctcctcacggacgaagcccgcatccgcgttcatgacgccatctttagccaacgtccgctcaagccggtggacccggggcgctgcacgttcgaaacagatcagcgacgcgcaccgaaggcactcccgagctctcaactgttccgcatctaccaagaacttaacgcgatcagagtgatcgatccgttctcatcagaccaagcagatcgacccctgacgcgtcaggagcgcgatgccggcgcatcgttcctcctgggcagggtgaaggccaccttccctcaactcaagaaggcgatgtttgggcccacaaagctccaactctcacttgagtacggagaacgcaagaacatcctgggtgacgtcgtaggaagcgagttgcgcaaagcgcagcacatcggcccagactgggagacgtatgacctcgccacccaggacctcatcgtgacgatcctgctcgaggcagacactgacgatgaagtgatcgagcggcttcaggctgagtcgtcgctatcgctcgatcaggtccacggcgcgcttgaggcaccactcccggacgactacctacggctgagccatcgtgcgattggcaagatcctgcctcatctcaaggatgaatggaatgaagagggcaatgcaccggtgatgtatgacgcggccgtccgtgccgcgggataccaatcgcactcagagttccacagcggtgttcttgaagacacgctcccctattacgggaaggtgctgaagcgatacacgcaagaggtctccgggagcagccaagctgctacgaaccctgacgaatgggagttcggcaagatcgccaatccgaccgtgcacatcggcctcaatcagatccgcaccgtcgtgaactcactgattgaccgctacggcctgcccacacagattcatgtcgaggtagcccgcgacttgggccagtcggctgagggaaggcgtgaagcagcgtccaaccgtgccaagaatgaacgagcaaacgaagcgctcaacgcccgcctgaccgaactgggacaacgcaccaactttgccaatcgggagcggctgcgcctctacgatgagatctcagtcctcaatcacaggtgtgtcctgacaggcatccccatcgagatgtcgcgactgttcaccaatgactatcaggttgaccacatcctgccgttctcccggaccctggacgactcgcgcggaaacaagattctggttcaccacacggccaatcagttcaagggcgcccggagccccttcgaggcatactcggagacggcagactgggatcacatccttcaacgcgcaagcgatgcctttggcgctacgagccccaagttcaagcgcttttctgccgacgccatggacaggtactcgaacggcgagcaagacttcatcgcccgccaactcaacgacaccagctacctggcacgagtgacacgcgagtatctagggagcatcgtggatcccgaccggatcctagccacaccgggcagacttacttcgctcttgcgccaccactgggggctcaatggcctgctatccgatgccgcggagaagaaccgctcagatcaccggcaccacgccatcgatgcccttgtcgttgcactcagtgagcgagtaactctaaaggccgtcaccgacgccaaccgtcgtgccggtgaccaaggcatcgaacgcttgctagtcgacctcccccagccgtgggagggctttgcggatcatgcccgtgagtctgttgatcgcattgtggtgtctcacaagccagatcacaatgagaaaggccagctccacgaagagaccgcctatggagtcctggaagggcccgacaaaaagggcaggttcctcacccgcaagcgcatcacggaccctgccaaaggtgtggtaggcagttgggagcaacccaagtggcgtgacgtcattccgctgtacaggcgcggcgaggggccagactcgacccttccctacaaggcttacattggcggctccaactactgcatcgagatcgtccgaactgccaaggggaaatgggctggggaggtagtctccacgcacaccgccaacacggccgagtatcgcgctttcatggcagagccgggcgcgtatcgcgcccagagttacgccggtggtgacctcgtcatgcggctcatcgccaatgacaccatcgcaatcgaagtcggcgatgcgggtcgccagatcatgaggctgtgccagttggagacggtcggagctatgtacttcgcaaatgtgcgtgaaggcaacgtcgcagcacgttcacgggctcgagacaacgacttttcgttgctcaagaaggcggcaagcacacttcagccactcaaggctcggagagtctttgttgatcccattggcagggtttttgaccctgatttcaaggagtaggcgatgatcgggcgagtagtcgaggtcgtcgaggctgaccgtcgcataacggtcgaatacgggaatctcatcatctgctcgtccaccttgaggattgggcaagtcgccttggatgacatccaatcggttgtcctcaatccccacggcgccacgatctcggcgggtgcgattgccgcgctcgccgagcgtggtgtgcccgtagtagtggtaggtaggaactttgcaccaatcgcaacagtcttgcctatgtttggccaccacgagatctcacgtcgcatcgagattcagtccgctatctctcaaccagcgaggaagcaggcatggaggcaaatcgtcagagccaagatcggaatgcaagcccttgccctcgaggcctacggcatcgactcggcgccagtgagaaacctagttgcacgggtgaggtcaggagatccggagaacctcgaggcccaagctgccaggctgtactggcggcggctcttcggtccggactttcgacgggatcacgacctacctggcgtgaacgccttgctgaactatggctacgcaatcatccgatctgcgacggcacgatcgatcgttgcggtcgggctgcatccgagtctgggcgttcatcatcggaacacaggcaacccgatgtgtttggttgatgatctgatggagccgttccgtcccctagtagatgtacgggtccgtgcaatcgtcgaagaggaccctgatgcgtgcgtggagccatcaaccaagaagatgctcgtggcgatcctcagcactgacgtttcgctggcgacagggtcctcccctgtctcccttgtgatccacaaggctgcacattcgttggtgcagtaccaccttggcgagtccaagcgactcgcgttcccggaccgtgcttgtgaagagactatgcaagcgctctctgaggcataccaatgagcgagctatcggggtacagactcatgtggctagttgcactgtttgatctaccggtcaggaccaaggctgagcgtcgtgaagcgactctctacaggaagcgcctactcgagcaaggattctcgatggcacagctctcggtatacatgaagttctgtcgcgacaaggagcagtcggagatcatcatcaggaaactctctcaagatgttcctgagggcgggcgggtcgacatactcatgatcactgacaggcagtacgctgggatcgtcacagtacgtgacaacgagcgagtcagacggaagaacccgtcgcaactctcgttgttctgacacctggaggacggttttgagcgctgagatggcggcgaacctcccgttctaccaggagtttcaccgccatctagcctatcgctctgggaaatgagctctggccgcaacttcatgcacgaagtcctccgccgcatgtccagcctatcgctctgggaaatgagctctggccgcaacagggactccatcgcatccaaagacctagagagcctatcgctctgggaaatgagctctggccgcaactgggagccgagaccccctggggtatggctaagcctatcgctctgggaaatgagctctggccgcaacgcaatggtggtcgtgtccttgaaagccaagagcctatcgctctgggaaatgagctctggccgcaacgcttcgcgctccagccgttcggcttcgtcagcctatcgctctgggaaatgagctctggccgcaacccgcattgcacgcggggcgtgaacgtctcgagcctatcgctctgggaaatgagctctggccgcaactccaacgcactgcgccgcatcgtcgtgtcaagcctatcgctctgggaaatgagctctggccgcaaccgagaatccctggtagcgcttctggtgaagagcctatcgctctgggaaatgagctctggccgcaacatccgtaacctcgtacagaccgcgagcgagagcctatcgctctgggaaatgagctctggccgcaactagccggtgccgttgggttcaatcgtgaaaagcctatcgctctgggaaatgagctctggccgcaacctcaaggaccactacgaaagccccgtgtagagcctatcgctctgggaaatgagctctggccgcaacgctatcgtggtcggcatcaagtggctgcgtagcctatcgctctgggaaatgagctctggccgcaacatcaacgagtccggctacaacgcaatggtcagcctatcgctctgggaaatgagctctggccgcaacgtgttggctcgaggcgtgcgcgggcctggagcctatcgctctgggaaatgagctctggccgcaacgttctcgagggacgctgggggtggcgtggagcctatcgctctgggaaatgagctctggccgcaaccggtcctttcacttccttgtggacctggtaagcctatcgctctgggaaatgagctctggccgcaaccaccaccgtgacctagcgcgaggtggagcaagcctatcgctctgggaaatgagctctggccgcaactgcagatagccacgcgaagatcacggtcatagcctatcgctctgggaaatgagctctggccgcaacctatgcgggcgttgccgattggaagccaaaagcctatcgctctgggaaatgagctctggccgcaacagcgcccactaggtgccattgccggttctcagcctatcgctctgggaaatgagctctggccgcaaccgatccatctccgctcgcacgtcggcgctaagcctatcgctctgggaaatgagctctggccgcaacgccggtccgcatgcgcagtcgtcgccttcgagcctatcgctctgggaaatgagctctggccgcaacaaggtgagtagcaagaagcgcccgattggaagcctatcgctctgggaaatgagctctggccgcaacacggtgacggttgccgtgttgaagtcgtcgagcctatcgctctgggaaatgagctctggccgcaacgaccgactcgcagcactcgaagttagcgccagcctatcgctctgggaaatgagctctggccgcaaccgtcccgccatcgaccttgccgccgcagtaagcctatcgctctgggaaatgagctctggccgcaactggagccacgcgcgcccacaatggagtgggagcctatcgctctgggaaatgagctctggccgcaaccgcggcggcatcagtcacggggatgacgtcagcctatcgctttgggaaatgagctctggccgcaacaaggccgcgaaggttgaggcgttgctgggtagcctatcgctctgggaaatgagctctggccgcaaccgcggcggcatcagtcacggggatgacgtcagcctatcgctctgggaaatgagctctggccgcaacttgattccagacacgggcatgcttccgtgaagcctatcgctctgggaaatgagctctggccgcaactgcgacgagcgtgttgagtagcgcgtccacagcctatcgctctgggaaatgagctctggccgcaacttagagtctgacgtgctcgatgatctggtgagcctagcgctctgggaaatgagccctagctacatccatcagctcagtcatgccggaggcgtcatcagtgagacggtttggaaagccgggaaggcggagtgccgcaaaccctgagatgattctggccactcccccagccgatggcccgctgaggggtgtgagtcagtcggtgcggtgcggatctccgtgtgtcattcgccacacgggctctaccaggcatacctgacaaccgtagggtggccttgcagcctgagaatccgaggggaacaccgttgagtgagagcgacacaaccgagtggtggcgacagccccgcgtcatcatccctggcgctgcaggagccgcgctgctgcttgtcgccggcgggtggtttcttggccgggtcatgaactcggagagcgacggagagacacgtgccgttgatgcgtctccaagtgccgccgtgagctcagagccaacgtcatcgccgacgctcgtgccggcctgtagcgcgaaggttgacgtgacggcggaatgggacggtggctaccaagctgacatcactgtgaaggccgaggggattgatattccggactgggaagtcgcgttcgaccttggggactcgtccgtcaccggagcgtggaacagcacgctgaaggtgggaaccaccggtacagccacggccgccaatgtgagctataacggcaccctcaccgctgatgagacgaccgtgttcgggttcacagcagacggcgagccgaccatcggcgatgccacatgcgcgtcatcggtccaagcagaggctgaaccgaacgatagcgccgacgcggcagcggacccagccgatgtctccgcccccgtcaatgccgccagtggcgacgattggctgagcgtcgacggcaactccctcgtcgacgcgcagggcaaccacgtctggctgaccggggcgaactggtttggtttcaatacctccgagcgggtgttgcatggcctgtggtcagtgaaccttgaggacacgatggctgcctatgcccagcacggcctgaacgtcatccgcattcctatctcgacagaggtgttgatggaatggcgggcggggaacgctgagaccaccaccaacgtcaacacgtccgccaaccctgaactcgagggcttcaccacccttgaggtcttcgacgagtttcttgcaatctcgaagaagtacggcgtgaaggtcatcctcgacgtgcactccgctgaggcagacaacgccgggcacattgcacctctatggcacaccgcttccgtctctgaagacgacttctttgtcgcgtgggagtgggttgccgagcgctatcgcaacgatgacacgatcatcgccttcgaccttcagaacgagccgcacggtaagccgccagaggccgaccgtgcgacgtggggcgacggcggagccaacgactggcgggccgtggcgactgaggctgctgaacgcatccacgcgatccacccggacattctgctgctggtcgagggcatcgaagccactccgtcgagcggatcatcgtggtcgagcaatgatcctggcgactatgacatcacttggtggggcgggaatctccgtctcgccggcgagcagcctgtcacaggcgcacccggcaagatcatgtactcgccccatgactacggaccgctggtgtacgaacagccgtggttccagggatcctttagcgctgcgagcctcgaaaaggacgtgtgggaccccacctggctgtacttgcacgatgaggaaatctctccgctcctcatcggtgagtggggtggacgcatgggtgatgacgaccgccaggaccgctggctagtcgctcttcgggacctcattgaagaccgcgaactccaccacaccttctggtcactgaaccccaactctggagataccggcgggctgttgcttgatgactggaccacgtgggacgccgacaagatggaccttcttgagccggtgctgtggcgcgatgcctcgggggcaggtgtcagcctcgatcaccagatcccactggggtcctcgggagtttctctgggcgagtactactcgtaaccgaagccttcgagcgctgatctagccgcgttccaggaacgcttcacgctcggggtccagccattcgctgacggccgatgccagggctgggtgtgcgctcagttcgggatccgcgtctatcaccgcaccggcggcaacgcgcgccgcatcaatgacatcggcgtcgcgcactgcacgcagcagacgcaacgacgagcgcccacccgactgcgccgcgccaagcacatcgccttcacggcgcagttcgaggtccttctcggccagaacaaagccgtccgcggtatccgcgagcgcctgcaatcgctcctgtgcaacagtgccgtcctcggcgcgcgtcaccagtaagcacaacgaagcaagatctgagcgtcccactcggccacgcaactggtggagttgcgagataccgaagcgttcggcatctagcacgaccatcatggtcgcctcgggaacgtcgacgccgacctcaatcaccgtggtcgagacgaggacaggtgtatcccctcgcgcaaaagccgacatcgcggcttccttgtcgtctgcggcaagtcgtccgtgcatggtcccgatgctgatgccttcgagttctggtcgttgtctcagcatctccacggtgccggtgacagaagccaacgggacatcaggctcgttcgcgaccaccgcatcggcgatgtccaaggtgatctcgccgtccacggaagtctcgacctccgcgtcatcggagaccacagcgtcatcggagaccacagcggcatcgtcatcgatgcgcgggcacaccacgtagaccctgcgaccagcctcgacctcttcccgcactcgctgccacgtgcgcgccatccacggggcattgtctgcaggcacaagatgcgtggtgatctcggcacgtcccgcagggcgctgagcaaggactgaggtttccagatcaccgaacacggtcatcgccaccgtgcgaggaatcggagtagccgtcataacgagggtgtgtggaggcttctccccgcgttctctcaaagcgtcccgctgctcgacgccaaaccggtgctgttcgtccaccacgacgagcccgagatccgcgtactgcacaccctccgacagcagcgcatgcgtgcccacgatgattccagcggcacctgaggcggcctcgccaagtgcttgacggcgcgccttggtccccaacgagccggtcaacaacgtgatgcgtgtcgcaccatccgctccgccgagcatgcctccgtctgccagtgagcccatcaggtgacgcaatgacctcacgtgctgcgcggcgaggacctcggtgggcgccaacaaagccgcctgtcccccggcatcaatcacctgggccatggcccgcaacgccaccaccgtttttcctgcgcccacatcaccttgtagcaaccggagcatcggccggtcgcgttcaaggtcagccgcgatttctttgcccaccgctacctgtgcgtccgtaagtggaaacggaagctgcgcatcgagggcggctgccaatccatcagagcgcgcagcacgtggggtggctcgcaactcggcgtgggatgcgcgacgccgggcaagcgcagtttgaagcacgaaggcttcctcaaacctcagacggtcacgaccacgcttccagtcatcgtccgtgtctggcacatgaaccaactgcagcgcctcgcgcaggccaggaaggttgcgctcggcgagcaaagcatccgggatcgggtcggcgacgtccgtggccgtcaaggggtcaagcactgtccgcacagaccggccgatgcgccacgtcggcaccgccgccgatgccggatagatcgggatcggacgtgaggcttcaagcacggcctcatcttcgctcgccgcatcgacgcccacgatcaagtagtccggatgggtgagctgacgtcgtccccgatactcgcccaccgtgccagtgaacaggccagtccgcccagcacggagcttgtcctcatgcatccgcagcacaccagcacgcttagcgaagaacgtcagttgcaacgtcgccgagccatccgtgacgatggcctccagcatcgccccgccgcgcgatcgcattgtgcgcacctgagacgaccgcacctgagccatcacggtgacgtgctcgcctacacgcagagcgccgatgtccgtcatctcgccgggagcgccatagcggcgagggtaatgccggacgagatcgccgacactctccaagccgagcttgcgtagcccacccgcagtccgcgcacccagcacagccttgagcggctccgctagccgaggcgagttcatgcagcgccttcggggccgctctccacaccgatcagcacccctgggaagtgatgcccgccgcgatacacatgcacatccgcaaagggagccacccccgccactgacgtgcgagccgagtccgtcaccgcctccgcgacaccgtccgccaagatcagcgacaccacttctgtctgggaggacaccagagaatcgatgtcctcatccagcgcgtcacccgtgctggaacccaccacagttcgctcgatcgcggcagccatttcttcctcaaggtcctggccaggggtcacaagagcggctgccgccactgcagacacgacatgagcctcatgctgcgcatcgagcaccgtgatgaacggcttcttgcggcgcttctgcgccagctcagcggcttcagcacggagtcgcgggtcgcccgcaacgatgatcgctgcagcacccgacgcatccttcaccgcgcgcttcaacgctcgccgactgatggactccggatccggcaccaccagcaccacagcacccgcgtcagccagcggctccgccaaccctgggcatgccgtcagcgccaccactcccgtcgatgcgcggtcagcgtcatgtcccatcgtgatgttgcgcacaatgatctgacgagcatgcgcctcgatgccccgcaccactgcatcatgcggcacatccgtgtgcacgtgtgcctgccacaactcgtgtgcaccggtaacggctaccgagtctccgatagtctcaagttcgcccgtcaaagcatcgcggatgtcatgctcgtcacgagcaacaaacatgacctcataggcgccaccgtgatgctcgcgcaggtcatcagccgacacggtgaggccctgatcgcgaacctcccaccgcacctcgtccactccagccaacgcatccgggcccgcaatcgtctcggcgagcatctccaactggagcaccaggccggccgcaccggcatcgacaaccccggcttcatgcgcactcggcaactgctcatgggtgcgcatgagcgcctctcgcgccgcctccacagccgccacgaccgtcctgtcgcgcgacgcaccccccgcagcctcggcacgggcatagttcgcagcgctacgtgccacggtcaggatggtgccctcaacagggctgccgaccgctccatacgccgagtctgcggctgcctccaaagcgtccgcaatgtgcgacgaagaggccttggccatccctccgcgtgcatcaatcttcgacaaaaaagtggtgaggtactgactcaaaatgacacccgagttgccccgtgcacccaagagcgcccctcgagtgaaagcggcaacgacttcgcggtgagtagccgttgcggggagcttcgctacagcacgattaccctcgcgtaccgtcaggtacagattggtgcccgtatcggcatctgccacgggaaatacattgatcgagtcgagccgatctcgcgcgcccttcatcgccgccgcaccggtggtcagccagtgtcgcaagtcggtagattcggccatcgctccccaagagttagtcgcgtcccctgcgtgacgcacatgaatctatggtgtcatggtgctctgacgaagtgcgctctcccacacggggtttgctgtgggtgggtcaagtcagatactctagtgcggttgcccgaacacccgggctcgtaaatgtggcgctccgcacaagacgtggacgcgcaagacaccaaggagaactatcgtggctgccaactgcgacgtctgcggcaagggaccttcgtttggtcactccatctcgcactcgcaccgccgcaccaagcgtcgttggaaccccaacatccagcgcgttcgtgcagtggttgccggaacccccaagcgggtcaacgtctgcacctcgtgcctcaaggccggtaaggtgcagcgcgccgtctaagacgcactgaacgagaacagcgggcgatccctcacgggacgcccgctttttcgttgccccgacgcgagtagcaaccgctatgacgagaaatggtcccatcctgcatcggctggcgcacgaccgtcaatcagcagctcgccatctccagcctccacagcaccgatgacggtccagcccgcagggaccgcagactcacgggtgaagcacgcaagcatgtggtgatcttcaccgccgccgatcgcccaggac

SEQ ID NO: 389 - DNA, 8010 bp, synthetic construct
  misc_feature 1..8010: note = Synthetic
  source 1..8010: mol_type = other DNA
agatcttccacgtggaggtagccgaaggtccgctggtccaggaagtcgagcgtcatctcgccgccacccgccgtcagccccagcctcacgcggcaatggggatgcggctccggcgcggcctccactgtagtctcgtggacgcggaactgtccggacatgcccaggtgagcgctcagcgccgtgccctcatcgaggggcatccacaggaatttgcctcgcctcgcggcgcccgtcacgcgcgcccccacgagccgtgcggagaactcccccagcccaccgggcgtgaggcggatcgcagagtcgcggaagaggtgaacagagcgcacagtggcgccggtgacgaagggttcgaggccctgccggacggtctcgacctcgggaagctcaggcatcggcgagcgtggggccgtcaggactcagcggcgtcagcggatccggccgcgtcgcgtgccgaaggatcacccggcgcggcgtcggcggtcacagaacggaatgcggcctcggcggcctcctgctcggcgtgcttcttggcggtgccggtgccgattccgcgcacctgcccgtcgatgacgacgcgagcggtgaacacgcgcgcgtggtcgggaccctcgccctcgacctcatacgagggagagcccagtcccgcgacggcgcaggcctcctgcagggaggtcttccagtcgagcgcgacgcccgccccggcggcctgcgagagggtggggcccacgaggcgcaggatcacgtcgcgcgagacctcgatgccgtgggccaggtagatggcgccgaacagcgcctcgagcgtgtcgcacaggatcgagtccttgtcggcgccgccggtcgtggtctcgccgcggcccaggaggatgaactgccccaggcccagctcgcgggcgatggccgcgagggagcgctgcgacacggtcgccgcgcggatcttcgcgagctcaccctcggcgaggtcggggtggtcgcggtagaggcggtcggtgacgacgatgccgagcaccgagtccccgaggaactcgaggcgctcgttggacggcagcccgccgttctcgtaggcgaatgaacggtgcgtgagcgcaagaacgagcaggtcggggtcgagatcgactccgagcctgctcgtcagtgcctcagccgccgctggagcactcggctgctgaaccgccacgctgtcgcggatcaggccccgtgctcagtgcgcagcgcctcgacgtactgacggccgttgtaggcgccgcacgtggggcacgcggtgtgctgcagcttctccgacttgcactgggggcaggtggtgaggttggcggcagtcgtcttccactgcgaccggcgcgagcgggtgttgctgcgcgacatcttgcgcttgggaacagccacggctaactctccttctcatcggaccgcacgatgcggtccttcacactctccaacgccgaccaccgggggtcgagcgcctcatgggcgtgtcccggatcgtccgcgagccgtgcgccgcactggtcgcacagcccggggcagtccgggcgacacagcggggtgaacggcatgctcgtcaccaccgcgtcgagaactggctgctccagatcgacggtctcgccgtcgaactcgaagacgctgtcctcaccctcgtcctcgccgagctcggcgcccgggtagaggaagaggccctcgaagctgacgtccaccggctggtggacggcgtcgaggcacctgctgcactctccgagagcctccgcgcggaaggatccggagacccagatcccgtccgtgaccacctcgaggctcgccgtgagctccgcagtggccccttcctggaccccgatcatgctggtgccaaggaccgcagggaccgcgaacgtgctggagacctcgcgctgagagccgggcttgcgcacgatgtcccgaacggacacgtggtacagcgtgggctcggcgccgggagagtgcttcacgacacgctcctccatcaccttccggtccgcgtggaccttgacccgtgccggaccggctgggccagcgcacaagtctacgtgatggccatgcggttcctcaacaacgccggccgcgctccagccgtccccgcgcctccggcgcattgccccgcacccttgcctatcgccccggcgcgtcgccctgggctcaccgatgccgagccgagcgggcaccggccgctcaggcctcccggcgcagcgcctcgtgcagcgcggcctcgacgccctcgggaacgtacgcgctgacgtctcccccgtggcgagcgacgtcgcgcaccagggaggaggcgatatgcgacagggcgtggtcgccggtgaggaagacggtctcgatgccgctgagcgagcggttcatgagcgccatgggccgctcgatgtcgtagtccgctccgccgcgcaggcccttgacgatcgcggtggcgcccacctcacggcagaactccacgagcaggccgttcgtcgagcgcacctccacgccgtccaggtgcgccacggcggccgatgcgagcctcacccgcgtctgcacgtccagcagggggcgcttggcggaattgtgcgcgaccgcgatgatcacgtggtcgaacagcgcgcgggcgcgcacggcgatgtcgacgtgaccgagcgtgacgggatcgaagctccccgggaagacgaccgtgcccatgtcccgacgctacctgaccctcgcatcgggcacacgctcgacgaagtgcaccaccgtctcgccgtactgcttggtcgcgacgagctcgagcccgcgcggccactcgggggtgcgcgtgcgacgggccgtctcgaccaccacggcggcatcaggagcgagcagcgggatgaggagctcgagcacctcgtgcaggtcgcccgcggcgatgtcgtacggcgggtccacgagcaccatgtcgaacggtcccgatgcccgcctgaggtgcgcggcgacgcgctccttggccacgtgcgcgcgggtgcccacgccgagagcgcggacgttgtcctcgatgacgcgcgcggcgggcagggacgactcgacgaaggtgacgtggctcgctcccctgctgagcgcctcgaagccgagcgcgccggagccggcgtagaggtcgaggacctgggcgccgcggatgccggcggagtgctccaagcgggagaacacggcctcgcggacgcgatccgtggtgggacgggtgccggtcttggggacggcgagcgtgcggccgccgaactcccccgcgatcacccgagtcatgggtggaagggtagtcgcctgccgagcacctcggcatacgcagcacagtgcacgcagagaaggggaaaaagcaacggcccccgcaaagggggccgtctcatcttgtggagtcctgcctaacagtctccttgttaacggcagggcccatttcccagagcgctaggctatgcgcccattgtgcccgcattgtcagagctcgtcaataccttgtccccattccgaaatccggtccatagtgtggctatcgacacgagaggggaagcaatgtctgcattggctgagggaacggcgccgctcaagtaccgtctgggcatcgacctgggatcgggatcgctcgggtgggcgttgctcgaactcgacgagcacgaccgtccatgcaggatcatcgatgccgggtctcgcatcttcgggacggggcgcgatccggagtcgctgtcgtcgctcgcggcgaacaggcggcaggcgcggcaggcgcggcgcaggcgtgaccgctccatccagcgccgcaaacggctcatgcacgaactggtgaacttcggtctgatgccggaggccgaggaggagcgccaggcgctcaagagcctgaatccgtacgagcttcggcatcggggcattcgcgagcgcctggagccgttcgagatcggccgcgcgctcttccatctgcagcagcggcgcggcttcaagagcaatcgcaaggccgatcgcaagaacgacgagaagtcggcgatgaaggccgctatccgcgagttggaggccgccgtcggcccggaggagacggtcggctcgttcctgtaccgccggctcaccacgcacggctccacgcgcatgcgaccgactcagcgaggcggccagaacacgtgggagttctacgtcggtcgcgagatgctcgtgcacgagttcgaccgcctgtgggagacgcagcgcgcctatcatcccgagctgctcaccgaggaggcccgccagcgcatccgcgaagccatcttccggcagcgtccgctcaagcctgtcgatccgggtcgctgcaccctggagcctgacgagaagcgcgcgccgatcatgctcgcgtcgagccagctcttccgcatcttccaggaagtcaatgcgctgcgcgtgatcgagggagacagcctcgacctgcgtccgcgcccactgacgcgcgaggagcgcgatgccgcgatcgagctgctgcggtccaagcccaaggtcacgttcgccgcgctcaagacgagggtgttcggcaagggagccgacgtccgcctcacgcacgaggagggcgagcgagcgcacctgctgggcgacgtggtgtcagccgagcttgcccgcgacggcgcgctcggctcgcgctggcacgacctgacgctcgacgagcaggacgagatcacccgcattcttcacgatgcggactccgacgaggacgtcgtcggcgccctcacgacgcgcttcgggttctctgagcacgaggcccgtggagcgtgcgaggccagcctgccggacggctactaccgcttcagccacaaggcgatccggaggatcctgccctacctcatcgactgggacgaggacgccgatgctgcccgcacgttcgacaaggcggtggcggctgccggctactcgtcgcattcggacatccattcgggcgagatcttcgaccagctgccctactacggccgggtgttgtaccgctacacacaggacctcgccaaccgctcagaggaccacgtcaaggaacgcacgaatcccgatgagtgggagttcggtcgcatcgccaacccgacggtgcacgtcggcctcaaccagcttcgcgtgatagtgaatgccatcgtcaagcggtacgggccgccgttccaggtgcatgtggagctcgcccgcgagctggggcagtcagccgtgaagcgcctcgaggcctctcggaagcgctccaagaacgaacgccgcaatgaggcgctcgcccaggacctgcaggcactcggacagatcaacaaccacgcgaatcgcgagcgccttcgcttgtatgaggagctggcaccgctcgaccagatgtgcgtcttgtgcggagagcgcatcgagcgctcgcgcctgttccagcccggcgtctacgaggtggaccacatcctgccgttctcccggacgctcgacgactcgttcagcaacaagcacctcatccacacccagtgcaatcgattcaagaagaaccgcagcccgtacgaggcttacggcgagctgcccgagtggccgcagatcctcgagcgcgccgaggccgcgtaccggaacaacaaggcgaagcttgcccgcttcgcgtccaccgcgatggagcgctatgagagcggcggacaggacttcatcgctcgccagctgacggacacgagctacctcgcccgggttgcgcgcgagtacctcacctacttgcgcctgtctggcgacgacggcttccaccccgagcgcatcgtcgcgatgccaggtcgcctgacgggactcctgcgcgccaagtgggggctgaacgacctcctctcgagcaccggcgccaaggagaggtcggatcaccgtcaccacgcgatcgacgccatcgtcatcgccctgagcgaccgcgccaccctgaaggccgtgactgacgccaaccgcagggcggcggacaagtacgccgcgtccaacgacgacggcttcaggaagcttctcgatgaccttcccgagccgtggacgggcttcacagaggacgctcgagcggcgatcgggcgcatcgtcgtctctcacaagcccgaccacaacgagaagggcgcgctccacaaggacacggcactgggagtccgcggcgggcccgacaaggagggccggttcctggtccggaagaagggcgaggatgagcgctggcggcgcgtggttcccgtctaccgacgcggagagggccctgactcctccctcccgtacaaggcctacgtcggcggctcgaactactgcatcgagatcgtgcgcacgtcgacgggcaagtgggagggcgaggtcatctcgacgttccaggccaatcagcgggactaccaggcattcatgcgagatcggcgccgattcctgcgcgagagcttctcaggacgccctctcgtgatgcgactcattgcgggggacaccgtcgcgatcgagcgggagcctggcaagcgggagatctggcggctgtacaagatgagcagcgccggtcaaatgtacttcgcgcccgtgaacgaagggaacgtggccgctcgtgtaagcgcgggcctgctcaaggcgttcacgccgcgcgccgaccccttgcggaaggtccgcgctcgcagagtgttcgtcgacccccttggccgagtccacgatccgggcttccgcgagtgagtcgtgatcggacgggtcatcgaggtcgtcgagaccgacaggcacctgtcgctcgagtacgggagcatgctcgtcagggactccactggagtgatcggcagggtcgcgctggacgacatcctcgcggtgatcgtcaacccacacggtgtgacgatgtcggcgggagttctcgctgccctcgccgagcgcggcacgccggtggtcatcgccggcaagaacttccggcccgtagcgcaggtgatgccgctcatcggccactatgcgatctctcagcgcatcggggctcaagtgggcgcaagcgccccgtcccgcaagcaggcatggaagcaagtggtgcgggccaaggtcgcgatgcaggccgtcgtgctcgaacaatggggcgtcgactgcgagcatctgtggagcctcgaaacacgcgtcaggtcaggggatcccgacaacgttgaggctcaggcagctcgcttctattggaggcgcgtgttcggcgacgacttccgtcgggatgctgatctgcccggggtgaatgcccttctcaactacggctacgcggtggtccgggcggcgactgcacgtgccatcgccgcggctgggcttcatcccagcatcgggatacaccacaagagtcctgtcgacacgatgcgcttggccgacgacctcatggagccattccggccgcttgtcgacactcgtgttcgcgcgatccttgacgcggaccacgagcctgacgtgacgccgcagaccaagaagatgctggtggccatcctctccacggacgtgcccacagaggccggcaccagccccgtctcactggcgatgcatcggacagcgcgctccctcgcggagtacttcctcggcgaaaggtccaagctcgagttgcccggagtgatgtatcgcgaagctgtggcctacctctccgaggcgttcgtgtgagcgagctgtccgggtaccggctgatgtgggtcgttgcgctcttcgatctgcctgtgaagaccaaggcgcagcgcaaagcagctgcggactaccgcaagcatcttctgtcgatgggttttcagatggtgcagctgtcggtgtacttcaagttctgtcgtgacaaggaacaagtgaaggtcatcgctcgtgaccttgaacggaaggtgccaacaggcgggagggtcgaccttctgtcgatcaccgacaagcagtactctcagatcgtgacgatccgacgcggcgcgcgggtacaacgagagaatccgtcgcagttgacgctcttctgaggttggagggccagttttcgtgaggtcgatccgggcgaactccctggtaaggccgggagttcgcccggatcgagcctagcgctctgggaaatgagccctggccgcaacgccgaactgcgccgcatgttccctgacgccagcctagcgctctgggaaatgagccctggccgca

SEQ ID NO: 390 - DNA, 5398 bp, synthetic construct
  misc_feature 1..5398: note = Synthetic
  source 1..5398: mol_type = other DNA
ggctgccgcccgtggtccgtgccgcacggccacatagagaatgggcaggtagtacaggtgcgccagggtggtgggggcgcccccggcaaggacgaccagcaccgtcacgaccagggtcagtccggagaacaggagcccgctgacgatcggcctggcctcgttctccctgcgcacgcgatgaaggtgagtaagcgacggggccccgctgctgtgcgcacgccgacgaagcagaaggacgagcgtcgacaacttcgccctcatgcttaccccctctcgcgcttgaagcaacgcctgactctcggcctatcggcggccttgcgagaattgtgagagtttccacgggtgcgccctccgttgcgtagccgtggtgatgacatcggggcccgcgcgcaacatcggtgagaatgtgcaccaacaagaaaacggcccccgaaggagccgcctcatcttgtggagtcctgagctaacagggttctccttgttagcgaccagggcccatttcccagagcgatagccaatgcgtccattgtcagttgcatgtcagccgctgtcaataccttgtggaatatcgacaacgtgccgatatccggcacaacgaaggggaacgcgatgacgagacctgatgagggattgagataccgcctgggtttggacttgggcaccggctcactgggatgggcggtgctggagttggatgcacacggcaagccgtgccgcatcgtgcggatgggctcgcgcatcttcggttcgggccgggagccaaagacgctcacatcgctcgccgccgaccgacgccaagcacgccagatgcgcaggcgccgggatcgctacatccagcgccgcacgcggctgatgcatgaactcgtcgcagctgggcttatgccaacggacgaggttgagcgcgcggctctcaagacactggacccgtttgaactgcgggcgcgaggtctcgacgaacagctcgaaccccatgaactcggccgcgcgctctatcacctccagcaacggcgcggcttcaagtcgaatcgcaaagctgaccggggcaacgtggagaagagcgccatgaagcaggcgattcgggatctggacgccgccatgggcgacgacgagacggtcggctcacacatgtggcgccgcatccaggacgggaagcgggcgcgcatagttccggagaagatcggttctaagaactcgtatgagttctacgtggatcgagcgatgatcgaacgcgagtttgatcgcctgtgggagacgcaacgcaagttccactccgacattctcactgatgcgaacaaggccaagatttcgcacgcgatctttgaccagaggccgctcaagcccgtcgaccctgggcgctgcactctggaacccggccagaagcgcgctcctgtggcactcgtttccacccaactcttccggatctatcaggagctgaatgcgctacgagtccaagatcagaccagtgtgaccctcgccaatcggccgcttactcgcgaggaacgagatgcgggagtcgcgttcctcggcaccaaggcaaaggtctccttgagtgcgctgaaaaaggagttgttcggtcgggaaccgatgacgttgagccttgaggcgggcgaacgcgctcacatcctcggcgacatcgtctcggctgaactgtccaaagcctcggcgatcggtgcccggtggtgggggctcgcgctcgcaaagcaagacgcgattgccgcagtcctccacgatgccgagagcgacgaggaggtcattactcaactcttggcacatgggctgacacaagaggaggcagaaggcgccgccgacgcctccctccctgagggctactcccggctcagcagggtggcaatcggcaagatccttccgcacctcatagacgattgggacaccgaggccgacgcagctctcacatacgaccgagcggtgctcgccgccggatatgcctcccacagcgatcttcacggtggcgagttgttcgaggccctcccgtactacggacaggtactgcgccgccacacgcaagacctcgcaaatcgcgactcgtaccacgtgcgcaccacggcgaatccaggcgagtgggagttcggcaaggtggccaatccgacggtgcacgtgggtctcaaccaggttcgagtggtggtgaatgccctcgtggagcgatacggatcaccggctgagatccacgtggaggttgcgcgcgacctgggccaatcggccgaggggcggcgcgaggcctcgtccaagcgcgcacaaaatgagaaggccaacgatgcattacgcgccgaactcgcggcgctcggccagcgtgacacgttcgcgaaccgcgagcggttgaggctctacaacgaactcagtgcgctgaatcacgtgtgcgtgctcacgggcatccccatccctaagtctcggttgtttaccaacgacttccaggtggaccatgcgctgccgtactcgcgcacgctagacgactcactctccaacaagatccttgttcaccacacagcgaaccagtacaagaaggccaggagccctttcgaggcctacgcgtcgctggagaacagggaagacaaccccgagtgggctgccattctggaccgcgcggagtcggcctttggcaagacctctccgaagttcaggcgtttctcggccgatgctatggatcgctacgaaaatggcgagcaggactttatcgcgcgccagctcacagacacgagttacttggcgcgtctgacaagggagtacctcgcgacgctggtgcttgctggcgacgacggcttccaccctgaacgcatcgtcgccatgccgggacgtctcacatcgctcttgcgcggcaagtggggactcaactccctgctatcggacaacggggagaagcagcgatcagaccaccggcatcacgcggtcgatggcctggtgatcgccttgagcgatcgatccaccctgaaggcggtcacggacgcgaacaagaaggccgaagacaagtaccggctggcgaatgacgcgggggtcaagaagttacttgacgacctcccgttgccgtgggtcggcttcgtagacgatgcccaagccgccgtggaccgcatcgtggtgtcgcacaagcccgaccacaacgagcggggccagcttcacgaggaaaccgcgtatggcgtccacgacggccccgacaaggagggccgttacctcgtggcaaagtcaggcgaggagcccaagtggcgccccgtggtgcccatcttccggcgcggcgaggggccagactcggcgttgccgtacaaggcttacgtgggcgggtctaactactgcatcgagattgttcgcaatgcgaagggtcgctgggaaggagaggtgatctctaccttccaggccaaccaggcggacttccaggcgttcatgggcgaaacgtccacattccggtctcagagtttctcgggccgtgatttggtgatgcggctcgtcgctgaagactgcatcgcggtcgaacgcgaggagggcgtgcgggaggtgttgcgattcatcaagacatctggcgcgagccagatgttcttcactaacgtccgtgagggcaacgtcgacgctcgctcgcgtgacaagtctgtcgcattcgccatgctttctaagaatcccggacccctgcaggcgatcagagctcgcagggtgtttgtcgaccccatcggcagggtcttcgacccagggttcgctgggtagccgcatgattggccgggtggttgaggtagtcgagaccgacaggcatctgtcgctcgagtacgggaacatgctggtcaagcagggtgtggtagttgtgggcagggtcgcactcgacgacatccaagcactcatcatcaacccacacggcgcgacggtgtccgctggcattctcgccgcccttgccgaacgtggcactccggtgatcatttctggccgcaactttcgcccggtcgccacggtcgtgcccatctcagggcatcacgcaatttccaaacgcatcgaggcgcaggtagaagcatctcaaccggctcgcaagcaggcgtggaagcagattgtgcgttccaagatcaccatgcaggcgctcgtcctggagcagtgggatctcgatgccgaacagttgtgggttcttgagtcgcgggtgcgctcaggtgaccctgagaacctggaggctcaggccgcgcgtctgtactggccgcggctgttggggcgggggttcaggcgtgatcctgacgagccggggctcaacgctctcctcaactacggttacgccgtcgtgagggcagcaaccgcgcgcgcaatctcggctgccggccttcatcccagcatcggcgtgcaccacaagggaccgctagacacgatgcgactggcggacgatctgatggagccgtttcgcccgctgattgacgctcgagtgagggcgattgcggactcgggcgaggacctggacgtggtgccgcgcaccaagaagatgctcgtcgcggtcctgtcgacggacgtacccaccgatgcgggaaccagccccgtctccttagcgatgcaccgcaccgcccgttcactggccgagtactacctcaacgagcgcaagcgtctcgagttgccgtccgttgagtaccggcctgtggtcgcggccctggccgaggcattcgtgtgagtgaactgtcggggtatcgacttatgtggctcgtggctctcttcgatctccctgtcctcaccaaggtccagagaaaggatgccgcggactatcgcaagctactgctgtcgaatgggttccagatggcccaactgtctgtgtacttcaagttctgctacgacaaggagcaggcagaggttgtcaccagggagcttgccaagcgggttcccgagggtgggcgagtcgacgtgatctccatcacggaccggcagtacgctgggatagtcaccatcagggacagcaagcgagtacgacgcgaaaacccgtcacagttgtccctgttctgagcggagcgacgtggattctgagacgttgatcggggcgaagcgcctagtaaacgcctagattcgccccgatctagtctatcgctctgggaaatgagccctggccgcaactgtaatgagcatgtacacaacagagaagccagtctatcgctctgggaaatgagccctggccgcaacttcgcgtcgatctgggcgaaacgccgacgcaagtctatcgctctgggaaatgagccctggccgcaactcggcagagtcgatagcgggcgacctcactagtctatcgctctgggaaatgagccctggccgcaactcggcagagtcgatagcgggcgacctcactagtctatcgctctgggaaatgagccctggccgcaactcggcagagtcgatagcgggcgacctcactagtctatcgctctgggaaatgagccctggccgcaac

SEQ ID NO: 391 - DNA, 23099 bp, synthetic construct
  misc_feature 1..23099: note = Synthetic
  source 1..23099: mol_type = other DNA
aaggtttaaaggcagaaataattcaaggttggtaaataatgtattgtgaagacgatttgcttcatataagaggagtacagcaattatcttattgtaagcgaagatgtgccttgctttttattgaacagcaatggtcagataatttctttacggcaaaaggaattgttatgcacgataaagctcatgcagaaaaaattgagcataaaaaaggcgtagttattgaacgtgatatttatcttaagtcttatgagcttggattgataggaaaaagcgatgttgtggagtttcacagatccgggaataaattaattccatttcctgttgaatataaaagcggtaaggcaaaatctgacaatgtagataaagttcagctttgtgcgcaggctttgtgtcttgaagaaatgatgaacgttacaatagaaagtggcgctatattttatgggaaaactcgcaatcggctaaatgttgaatttaataagtctttaagagaagaaacttttgctcttgctcaggaatttcacagcttagttgatagcagagaaactccaaaaccggagtattcgaagaaatgttacaattgttcgtttaaagaactatgtcttccggaaatatttgacaaacaaaaatctgtaaaaaaatacttaaaagaaattgtaaataatgaaaaaactatttagcacgctttatgtttcaactcaagggacatatatatcaaaagagcgtgaaaatattgtagttagtttacaaagcaaagaattatttagagcgccaattcatctgattaattcagttgtttgttttggaaatattatgtgttcgccttttcttttgggtttatgtgctgagaataatgcttctgtaagttactttacagaatatgggaggtttattgcgaaagtgcagtctccggtttcaggaaatgtacttttaaggaaacagcagtataaatattcagatgatggaaaattttgccttgaaacagcccaatcagtattgcttggaaagttaaataactcaagaactgtaataaatagagctttaagagatcacgaggataaaatatctgattctgataaattaaaacaagtgtctgatggtttacgcagggcaattgctaatattttcaatgctgaaaatgtagatgtattgcggggtatggaaggcgatgctgcagttgcttattttagtgtctttaataaactaatattgaatcataaagaagagttttttatgcccgggagaaacagacgacctcctaaggacagagttaattgtcttctttcgtttgtgtatactttattagtgcatgatgtttcgtcagctttagaaggagttggattagatcctcaagttggatttttgcataaagacagacccggcagaccaagtttagctttggacataatggaggagtttagatctgtaatagctgacagattagttcttactttaataaatctatctcaagttaatgccaatggtttttcagaatctccaagcggcggtgtgataatggatgatgaaaatagaaagattgttatagatgcatatagaaagaggaaagaagaagaaatatttcatccttttttcaaagagaatatacatatagggcttttgtatcatgcacaggctttactttttgccagatatataagaggcgatattgatgcatatccgccatttatttggaaataggattatattatgttggttttgataagttatgatataagtactattgatgcaggaggacaaaagcggttaaggagggtttctaaagaatgcttggattatggacagagagttcagtattcggtatttgaatgtgaagttgaccctactcaatggatttttttaaaggataaattattgaatactgtaaacttaaaaaaagacagtataaggttttatatgcttggttcagattggaaaagaaaaatagaacattatggttgtaaaaaacctgttgatttacatgaaacgttgataatataagagttataaaggattataacggtgcgaatggtatgtaattgattgttgtttattggtatcgcacattgaaaaatgaatagaaattgagaatatgtcaatggttttgtaataaaaatgggtgattcgcataaattgtgaaaaatgtgttgaatttttaattattttttgtttagccgtcgcgccccgtgtgggcgcgtgaattgaaattccgttactgcgtaatagcgtatatcagcacccgtcgcgccccgtgtgggcgcgtgaattgaaattggataccgccaccaccgccgccacctccgccggtcgcgccccgtgtgggcgcgtgaattgaaatccacaacacacgaagttattgacaacaatatgtagtcgcgccccgtgtgggcgcgtgaattgaaattgcggagttaattccatagtacctaaagcagtatgtcgcgccccgtgtgggcgcgtgaattgaaatccattcgcgccccacaaaaaactagctttgctaggtcgcgccccgtgtgggcgcgtgaattgaaattctaaaccattgtaatgatatatatccatttctgtcgcgccccgtgtgggcgcgtgaattgaaatttccacgcgtaactatttacagcgataaacaaagtcgcgccccgtgtgggcgcgtgaattgaaattgcgagtaaatgggacaaaaaagaaagccctaaagtcgcgccccgtgtgggcgcgtgaattgaaattaaaaatggaaaagatttgctgtgttatgaaaaaggtcgcgccccgtgtgggcgcgtgaattgaaatcgataacagcccagaaaaatcaggactggtaaaagtcgcgccccgtgtgggcgcgtgaattgaaatccaactacttatattcctccactgtgttcctgaaagtcgcgccccgtgtgggcgcgtgaattgaaatcctctaattccaactgacattcgtatgcatttccgtcgcgccccgtgtgggcgcgtgaattgaaattggtataagatatttttttttctgaccttcaagtcgcgccccgtgtgggcgcgtgaattgaaattgtttgctgatttatctaaatcgtggcgagtaggtcgcgccccgtgtgggcgcgtgaattgaaatctaatgcgaggtaaggatttaagcctgcttcttgtcgcgccccgtgtgggcgcgtgaattgaaattctatatatctgccacctgcacgagccgctctctcgtcgcgccccgtgtgggcgcgtgaattgaaataaaagtgattgtttgtttgcctgctatcacttcgtcgcgccccgtgtgggcgcgtgaattgaaatctcaatacgtcctcaagcaggttcctctctcccgagtcgcgccccgtgtgggcgcgtgaattgaaattgtgcttaagttttgtattaccatatattctggtcgcgccccgtgtgggcgcgtgaattgaaattgctgtcatccaccgcaaaaaggttgcacagtgcggtcgcgccccgtgtgggcgcgtgaattgaaatcttgcaagtgcagcattttgctcctcaagctctgtcgcgccccgtgtgggcgcgtgaattgaaatctgcaaagctgtaaatactgaagcaaaatgggcagtcgcgccccgtgtgggcgcgtgaattgaaattacagccgtgcttccagtgccagtaccaacaacaagtcgcgccccgtgtgggcgcgtgaattgaaattaccaccaacacatattagcaccgctagtataagtcgcgccccgtgtgggcgcgtgaattgaaatgctgcaccacatccgttataatcgtaaattgttggtcgcgccccgtgtgggcgcgtgaattgaaatccgcccgccagtaaacttacggtacaatgccagtcgcgccccgtgtgggcgcgtgaattgaaatagaacagccagcagagagatgtagagactatgcgtcgcgccccgtgtgggcgcgtgaattgaaatttgtacgtatgttgcctaaaagggtgtgaagcggtcgcgccccgtgtgggcgcgtgaattgaaattaatccaaatggtgataacggtggcgataataagtcgcgccccgtgtgggcgcgtgaattgaaattggcgataccagcggcaataagtactctgcgaagtcgcgccccgtgtgggcgcgtgaattgaaatttgaattttaattgtttcaggaggtgctaactctgtcgcgccccgtgtgggcgcgtgaattgaaatcttctaaacctgtaacaaattctaacgcctcatgtcgcgccccgtgtgggcgcgtgaattgaaatttgcattctgctcgctgcaaattcataggctgggtcgcgccccgtgtgggcgcgtgaattgaaatataattgtgcttatcattttattcccctttagaagtcgcgccccgtgtgggcgcgtgaattgaaatgtcaaaaaccagattatttaatatgcttgagtttgtcgcgccccgtgtgggcgcgtgaattgaaatcttaaatttcgcatacgataaatcattatcaatcgtcgcgccccgtgtgggcgcgtgaattgaaattgtggctgaccaagagcggatagcgaaagctcaagtcgcgccccgtgtgggcgcgtgaattgaaatgcttccaaaactgctaaatcttttttcattcggcagtcgcgccccgtgtgggcgcgtgaattgaaattgcaggggagtatcctgttgaggaaacgctggtgtcgcgccccgtgtgggcgcgtgaattgaaattcgcagaaaatcttgctcaaatctaatacggtatggtcgcgccccgtgtgggcgcgtgaattgaaatctgccagtccgcacattgcacgttaattatactgtcgcgccccgtgtgggcgcgtgaattgaaatttgttttgcttgaaatctagccaaaatgcctgagtcgcgccccgtgtgggcgcgtgaattgaaatcaaatccgcgccagttggcgcataagattttttgtcgcgccccgtgtgggcgcgtgaattgaaatccgcagaacaaaaagaacttgacgcagaaattgacgtcgcgccccgtgtgggcgcgtgaattgaaatcagcgtggacgcaagtgctatagacggtagttcagtcgcgccccgtgtgggcgcgtgaattgaaattaaataggttatactggtatctattttttttaggtcgcgccccgtgtgggcgcgtgaattgaaatcactcttggcaaaatttgttttccttgagaaatagtcgcgccccgtgtgggcgcgtgaattgaaattttacatctaaccagctggcttattatgacatacgtcgcgccccgtgtgggcgcgtgaattgaaatttgagagagaagtccatttttgtatatatcctttgtcgcgccccgtgtgggcgcgtgaattgaaatttgttctccttcgggcggttctggcgctgcgtaagtcgcgccccgtgtgggcgcgtgaattgaaatatcctcgcgggcatagctctcgcaggtgatttcgtcgcgccccgtgtgggcgcgtgaattgaaatttctcttgaagccccatactgccacgctggcaggtcgcgccccgtgtgggcgcgtgaattgaaatcaaactggcaatcgccagaaacttttctgcaattgtcgcgccccgtgtgggcgcgtgaattgaaattttacggcgttgctctgttatcccaaacatatccgtcgcgccccgtgtgggcgcgtgaattgaaatattcacagctgtgtaattaccataatatagcctggtcgcgccccgtgtgggcgcgtgaattgaaatagcccctctgggctgttatagtgttcggcaaccggtcgcgccccgtgtgggcgcgtgaattgaaataagtatttatcactacaatcatatttttattaagtcgcgccccgtgtgggcgcgtgaattgaaatccacaaatcttgatatggagttttcagcaaccagtcgcgccccgtgtgggcgcgtgaattgaaatttagaactccccgttttaacttcgcccccatctagtcgcgccccgtgtgggcgcgtgaattgaaatcgccagttctggtgtccactcatcgtgctggtctggtcgcgccccgtgtgggcgcgtgaattgaaattcgctattaaacgcttgttgtggcagagtatggtcgcgccccgtgtgggcgcgtgaattgaaatcagcaacattaagtgttccgccactgcttcctcgtcgcgccccgtgtgggcgcgtgaattgaaataagggcttgacatatttacaaatatatattataagtcgcgccccgtgtgggcgcgtgaattgaaatcgccctgaatatcccgtgctggcttttaggtgatgtcgcgccccgtgtgggcgcgtgaattgaaatatatcgccttcgttataggtgctatcaacatcccgtcgcgccccgtgtgggcgcgtgaattgaaattgtacaccagcgagcttaatgacagcaatgaacggtcgcgccccgtgtgggcgcgtgaattgaaatagggtatgaatgcttacggaagcttatctgctgcggtcgcgccccgtgtgggcgcgtgaattgaaatcgtactctctaactcattggcttccatcatttatagtcgcgccccgtgtgggcgcgtgaattgaaatcatttctgccgcttcacttctgccctttacaggcagtcgcgccccgtgtgggcgcgtgaattgaaattttttagtgtaatacttgcctcaagctcaataaaagtcgcgccccgtgtgggcgcgtgaattgaaatagctctaaatatcccgtgctggcttttaggtgagtcgcgccccgtgtgggcgcgtgaattgaaataagagatattagatatattaaatctgcctcatagtcgcgccccgtgtgggcgcgtgaattgaaattatagaaggtttaatgtgtacgcttgaaatgtttggtcgcgccccgtgtgggcgcgtgaattgaaatgtagaaaaaatcgtttgagcagaattaccagcaagtcgcgccccgtgtgggcgcgtgaattgaaatgtcaacagcaaataagttgcacaatgcgtattttgtcgcgccccgtgtgggcgcgtgaattgaaatcatatatcctctctgtgccgattggcactttatgtcgcgccccgtgtgggcgcgtgaattgaaatttgcagaccttgtttcagctgcgggcggtgatgagtcgcgccccgtgtgggcgcgtgaattgaaatctaaaaacggcaacatcctgctccatttcgttcctgtcgcgccccgtgtgggcgcgtgaattgaaatatttattttcaggtgcttgtgcctctggaaccttgtcgcgccccgtgtgggcgcgtgaattgaaattagtgtcccgctctggagtataaccttgattaccggtcgcgccccgtgtgggcgcgtgaattgaaatacctcatcaaaactaatccaaaaaacaaagggacggtcgcgccccgtgtgggcgcgtgaattgaaatcagtttggggtaagaggcgtgctgattaaaacacgtcgcgccccgtgtgggcgcgtgaattgaaattacagggttcattttaatctttttcattcctgaaggtcgcgccccgtgtgggcgcgtgaattgaaatttgtctgcgttgctgatataatctctctgcttcagtcgcgccccgtgtgggcgcgtgaattgaaatctcttaaccgttacatttatatcaatgacacttagtcgcgccccgtgtgggcgcgtgaattgaaatccaaaatctgctttccagcatagcctctatataaggtcgcgccccgtgtgggcgcgtgaattgaaattaaatttgaggagcagtggcggagaaaagccagagtcgcgccccgtgtgggcgcgtgaattgaaattgcatatcggctttattttggttatctttattcggtcgcgccccgtgtgggcgcgtgaattgaaatccgcccactacggctggaagcttgtctatttcagtcgcgccccgtgtgggcgcgtgaattgaaatgcaaaagaaggagtaaatgatatagtctgttttccgtcgcgccccgtgtgggcgcgtgaattgaaataagttcaagctctagcagttccagtagcagtaggtcgcgccccgtgtgggcgcgtgaattgaaatagttccgacaggagaaaagagttcaacattgtagtcgcgccccgtgtgggcgcgtgaattgaaatcactctcccgctgcacctcctgtgttgtacatcctgtcgcgccccgtgtgggcgcgtgaattgaaattaaaggcggatttagagcaggattgcgattgaagtcgcgccccgtgtgggcgcgtgaattgaaattttatcctcaaaatatatacgtccgccttgtccggtcgcgccccgtgtgggcgcgtgaattgaaatggcggactggacgcgaaacaaaaagcggcgttggtgtcgcgccccgtgtgggcgcgtgaattgaaattcttgcaagcgtgttggctggcgccgtgacatcagtcgcgccccgtgtgggcgcgtgaattgaaattgctttcgcggaacacaattgcgtgagatatactgtcgcgccccgtgtgggcgcgtgaattgaaattgaggctaatgacagtacaggtacaaatcctatgtcgcgccccgtgtgggcgcgtgaattgaaatccatattttcagcttttgtttgctccgcctgtggtcgcgccccgtgtgggcgcgtgaattgaaatattgcaatctcgtaatctaacctcattttttcagcgtcgcgccccgtgtgggcgcgtgaattgaaattgctttcgcggaacacaattgcgtgagatatactgtcgcgccccgtgtgggcgcgtgaattgaaatttcgcagaaacgttcagtatcagcgaaattatccgtcgcgccccgtgtgggcgcgtgaattgaaatgcaaaagaaggagtaaatgatatagtctgttttccgtcgcgccccgtgtgggcgcgtgaattgaaatagtccatccaatttcgtttgatggcagtggtttagtcgcgccccgtgtgggcgcgtgaattgaaattgtgctaaaaggtgttaagactgcagctggcggtgtcgcgccccgtgtgggcgcgtgaattgaaatttgcagaccttgtttcagctgcgggcggtgatgagtcgcgccccgtgtgggcgcgtgaattgaaatcgaaggatgttcccaatgagtaaagataataaagtcgcgccccgtgtgggcgcgtgaattgaaatagggaataatgtctcaacttgcttcaggattagggtcgcgccccgtgtgggcgcgtgaattgaaattgtggcatagatactatcaagagctgtaattaagtcgcgccccgtgtgggcgcgtgaattgaaatgccgcctaaagaaagagccatacaattagctttgtcgcgccccgtgtgggcgcgtgaattgaaattagttaatgtagctacgttattagccattgtaagtcgcgccccgtgtgggcgcgtgaattgaaatctgttaagggaaagcgttatgagatattcttttctttcattttaagttgtaaggagagtgtgactaaaaacaacaacaacttttaaaatattatttgaaaactgttgcggggaatgatatctaaaaaagatatgacttaaaacttatgtagggaatatatatcaaattctggttttatcttaagatgataaggcaaatatatctgttatataatgcatataaaagaggattccccggctaccaaagcagtcggggaagaacctcggaaaaattattataataaccatcctctctcagataagttacaaattaattatactattatagtaaaatattgtcaatagctttttatttacaagatgaaaaaatataatatctttctataaatattgagtcttttgtttttgaggatagcttaggaggttttatgaaaaaaaggattttgggacttgatatcggaattgcttcggttggatgggctcttgttgagtttgacgatgaatttcaagataataagaaaaaagggacaattataaaatcaggcgtaaggatttttacaagagcagaaactccaaaagaaagagaatctcttgcaaagccgcgaagagaagcgagatctcaaagacggagaataagacgcagagttgagagacttaattctataagagagctatttgttaaaaatggtgtggttgaagagtggtcagtgagtaaaaaaaatccaaataatatttatattacattaaatcagattaaaacaccttggcagcttagaatggaatctttagatagaaaacttactaatgaacaatttgcagttgttttgactcacttggcaaaacatagaggttataagtcattgagaaaggatgataaagctggaaaagtgctggaagcgataagtcaaaataaaaaaagattgaatgattctgattatagaacgcttggtgaaatgttttgtaaaaatgaatcttataaagaacataaacgtaataaaggcggtgaatatattaattctgttgcaagggaattgattgaagaggaagttgaaaagatttttgtcaaacaaagagaaaaaggaaataattttgcagatgttaatactgagagagagtatttgaaaattgcgttttcacaaaagcctgctggaagtattagtaaaatggtaggtttttgtacatttgaaaatggggaaaaaagggctcctagagatagctatagtgctgagttatttaaagttttatgcacaataaataatacaacttttacggatatgaagaccggagaaatacgtagcttttcaaaagaagaaatagggaaaacattggaaactgtaaaaaatgtaaaagatgttaaatatgcaaaaataagaaaagatttagggttagaagattctgttaaattcagtggcgtagattacagagaaaatgcaaaatcaaaaggtgagggtgagatttttgtttctatgaaaacttatcatgaaattaaatctaaaatagaaaaattgtcaaaagaaaaatgggataatttaaaggggaatactgaacttttagactcaatagtaaatataattgcaaatttaaaagatgatgagtcaataaaaaaagaatttcaaaaacttaaaattgatgaagatattattgatgtattgcttaattttgagtttaaaaaatttattaatttatcgttcaaagcattgaggaagattataccatttcaatttcaaggacaaaagtatattacggcgagtacgagtgcaggatactcattaaaacaagaaggtataaaaaataaattagttccaccagcaaaagagaatattaatgtagctgtagttgctagagcttttgcccaaacaagaaaagttataaatgcagtgataagaaaatatgggcagtttgatcagattaatatagaacttgcaactgagttgaaaaacagtaaatttgataggtctaaaatagaagaagggcaaaagaaatttcaatcccaaaaagataaaatttttaaagaagtgcaagaattgaggggagggatgacccctagtagtagtttgctgttaaaatatcgtttatggagagaacaagatgaaagatgtgtttattctggaagaaaaataagcttcgaagatttgttggacacaggatttcttgatattgatcatattattccatatagtaagtcaatggatgacagctttaataataaagttttatgccttgccgaagaaaataggaataaaaagaatgatattccgtttaactattatcaaagaattgatagggactggaatcttttgatatctataattactagtatgaaaaatatgaagattgcgaaaaaaagcagattgttgaaacaggagttaagtgatattgaaggatttattgagagaaatataaatgatactcgatatgcgacaagatatataaaggattttttggaaaataatctagaatttaaagaaaatgaatttataaaagtaaaagtgcaagcaagaagtggaggtttgacttcagttttgagttataattgggggatgtcgaaagatagagaagaatcatattttcatcatgcaaaagatgccattattgttgcttgttcaacacaaggtatggtgcaatatatatcaaagatttcacagcagtatgaaaatgataaagataaaatgaaaaagattaaagataaaactgagaattgcattcctaaaccttgggattcatttagagcagatgttgaagaatcaatcgagggaatttttgtatcttttgctccaagacataaagttaccggttctgcgcataaagagacaatttacagtaagaaacatcttgaaaaggaaagatatgttactgttaaaaagtcattggataagataaagttatctgacttagaaaatataccatgtaatgaaaattgcggtataattagagttttaaaagaaagattagaaaaatttaagaatgattctttgaaagcttttgcagatcctgtgcatatgccgacaaaatgtcctaataaaaaaggaccagtaatccgttcagtaaaaattaaagagagtaacaaaaccggaatagaagtacgcaagggtttagccgaaagaggtgagatggtaagagttgacgtatttataaaagataaaaagtattaccttgtgcctatatatgtgtcagattttaaaaataaagatttgcctaacaaagcaatagctgcattaaaacttgagaatgaatggataatgatagataagacgtattcttttaaatttagtttatttaaagatgatttaataaaaataaagaagaaaaaagaagaaatttttggatattttggaggtgttcatagatccacaggtactattaaaattaaatcaaggcataaaccaaaagagatagatgaaggtataggtagtaggtgtttgctagattttagaaaatttcaagttgatgttcttggtaattatactgaagtgaaacatgaaaaaagaatgcccgcatacataacaagaaaggataaaaaacattgagttggagaacagtatttttctcaaaaccgtgtagcttaagcgttaaaaattcacagttgtactgtagatttcaagattctactgttcatgatattccgatagaagatatatcggttattgttttagaatcaaatcgaataaatttgacttctgctttaatttcagagtgttctcaaagtaatatagtaattttttcatgcgattcgtctcatattccatgtggaatatatgtaccttttaaccagcacagcagatttactcaaactgctaattctcaagttaaatgggatactgcatttaaaaatagaatatggcaaaaaattgtaaaacaaaaaatatgtaatcaggcagaaataattaaaaagtattcttttgcaaattatgtcggacttaaaggaacttgtgatagagttcaatccggagataagacaaattgcgaagcttttgctgctaaaatttattgggaaagcatatttgagaactttcaaagaaataaaaattcagatataagaaattctgcattaaactatggctacgcaattgtgaggggtgttgtagcgagaagcttggcatcaagcggatttataacatgctttggtgttcatcattcaaatgacttaaatgcttttaatttagcagatgatattattgaaccttttagaccttttgttgatgatattgctattgatatcttcaaaaatagtgaaaccagtaaagaattgttaaaagaacataaacagcagcttttatcagtcttgtccactgactgtatttttaatgataagaacagtaatattcttacggcagcaagtcagacaacagagtcttttatgattgcttcgagagaattaaatcctgataaactattacttccggagtttaaaacggcatgaaaaaagaaggtacaagatttatgagaatacttgtatttttcgatttacctacagaaactgctgaaaacagacataatgctgcaaaatttaggaacaatttaataaaagacggttattatatgcttcagtattctgtatattgtcgtatttgcagaggaatggacagttctgaaaaacatatcagaaggttgatgatgcgtactccgatggaaggtaatataagagtgcttgagattactgagaaacaatacgaaagaatgaaaataatattaggtaaaaagcaacttgctgaacaaatagattcaaggcagttagtatttttttaacaaattaacttataatatgcagccacgacacttcgtcctcaaaggtgtttatagtttccttcctctctcagatgtgctataattttggtttgttgttattgacatcttgttctgttatagtttccttcctctctcagatgtgctataatataatagcgatagcagtgatattcttgatggttatagtttccttcctctctcagatgtgctataatcaatattttcaagcccagtgctgtctccaagtttagtttccttcctctctcagatgtgctataatattaccattagcatctaatccaaatgatttgttatagtttccttcctctctcagatgtgctataataccgtatgcttctatagtgtttaatctacagttatagtttccttcctctctcagatgtgctataattgtattcagcttcaatggcgatttttggttcgttatagtttccttcctctctcagatgtgctataatttacgaaccgattaaacaaacatgggacgcgttatagtttccttcctctctcagatgtgctataatccagagatacgacgaacgtcacggattgaagttatagtttccttcctctctcagatgtgctataatcattatatcagcgattgagagcataaaaccgttatagtttccttcctctctcagatgtgctataatttgattcgctgagagcctttacggcctgtggttatagtttccttcctctctcagatgtgctataatcaaagtaaataccatacgggaaccacgtaggttatagtttccttcctctctcagatgtgctataatgtactaaagggtgctactacagtaaagcccgttatagtttccttcctctctcagatgtgctataatcaattgtacggaatatattaactttcttacgttatagtttccttcctctctcagatgtgctataatgtaaggtgcatagcgtactccggtagctgggttatagtttccttcctctctcagatgtgctataattggatatcatattacctgcatacgctgatagttatagtttccttcctctctcagatgtgctataattaaccaaagcaggcatatcgtatacattgggttatagtttccttcctctctcagatgtgctataatacattgttaaaaaatatagagagaattacggttatagtttccttcctctctcagatgtgctataatcagggattattacgtcctcgcctgcttttagttatagtttccttcctctctcagatgtgctataatgcaaagtaacttaatctaaacatttttacagttatagtttccttcctctctcagatgtgctataatatgacgaatataaaactatggctgatataggttatagtttccttcctctctcagatgtgctataatgaattcaagtacgacgatatcagagatggtgttatagtttccttcctctctcagatgtgctataatcatgcaaagcacttttatcacacttacgtagttatagtttccttcctctctcagatgtgctataatagacaaacgctaaattattgaaaactcaattgatttagcgttttctatttttagtaagcaggctttattaaatttcggaagtatctgtaatttcaacttcaaaaattccgctctgcttctttttattgccggaggctttcatagttccacactctacattccacgcttcagtttgtcgtttaacagttatataattgtctgtaagcagcttattttttcctgtttttacagcctttctttttgtgcctatgtttttatttaaaaaatcttttctttttatagaatctatttcaaatatatcttttgccctgttttttatttcacttgtaggcactttgtttccaaatgttgaagctttcgtttcctgtctgtaagaatatctgaaaatgtgaaatcttgcaaacaaaatttgttttacaaaatcgcatgtttctttatggtgtttttcggtttctccgggaaatcccgtaatgatatctgtagtaagcgccaaatcaggtaaaatccgcattattttacttacctttttttcaaactcctttgttgaataatttctgttcatttgttttaaaatttcatcgctaccggactgcagggggacgtgtagatgacggcatattttttctgtatttgtttctataagttctatgaatttgtcgtcaatctcgcttaactctacagatgaaatccgtactctgaaagctaaaggaattttaatgattttttcaagcagatctgacagtccgccgtcatatttccctgtatgtattccggtcagaactatttcagagtatccgctttttacaagatttttaatttccgataagacttcattttcgggtttgctccatagagtgcttcttacatacggaactatacagtagctgcagaaacttttgcagccatcctgtatttttaaaaatgctcttgagtgtctatcaaaaccggagactttctgtttttgtggttcgataaaaagttttgttttatccgttattatttcaatatcggggaagagatttttgatatcaatatttttgttttttacaatacagcctgtaagcattattttgggtctgtttggcagttttgtcgctcttcttaaaaaatattccaattttttatcagcgtctgccgttacggtgcaggaattaaaaataataatatcagcttcttcaggcttttgcgtgcattcaaaattatcttttctaaatttttcggaaatgagctgcgattcgtattgatttactttacagccgaaagtgtgtatataatactttttcatttaagatttttaaaaaagtttaaaattaaggtgcttgtgacaattgccgcggtttctactcgtaagatgttgtttccgagtgtttttgtcaggatggcgaacgatttcgcaaattatacttcttcattttcaaatccaccttccggacctataaaaaatactctagctattatattttactttttctttaaaaatattatttataagggatttgttattttcgctttcgtaaggataaaatatttatggattttttgtctgcggcagcatttttgcaagcagttttaaaattcaaaggctcatttattttcataatgtcgtttctttcgcgctgcgaacttgcggcaacggatatctttttatatcgttctgacttattttttgaaaaactggtttttagtattgacaggtgcgatttcagaaacttctatttcggcatgtttttcaataagccattcaaattgtcgtctttgggaagcttttacgataaaatcagacattttatgtaaagaagacaaaatattctccatgagcatattactattataacacaatacaaagattatctgaaatggtaaaaatggctgttttaagtgttaacaaagtaaggtgtaaggaatttattttcccctgttccgacgaatatactgcttactcctttagttattgcagaacctggaaaatggtggcagaaagtattaatatgtactttgggttccgtttgcggcgttttctttggttatatgataggcaaggttttttataagactattgaacttgtaaatagtaaatttttataatttacgcaatgctgtggcaataatcggtgaaaaatatgcagtaaatgctttttaagtatttttacaggaacatttgcgactattccttattaaagtgctaacgattgcagcaggaatattcaatatatctatgcttgttttgtttgttgcgtctatgctttgaatagtcgggcgtttttttattgtctctgctgctttaaagctgtttggcgcaaaaatctaatatacaatagaaaagtattttaatatcctctctgcagtattgctattttacttattaccggcttttttttagaattaaagtgtcctatacatttctgttgacggtgcggtatctttatggtataattataggttgattgatacgataaattttaagttattaaaacgggggtgtggcagagcggtctaatgcaccagactgtaaatctggcgggcttgcccttcggtggttcaaatccatccgcccccatactactataaatttgcgggagtagcacaatggtagtgctccagccttccaagctgtccacgcgggttcgattcccgtctcccgctttttacttaattgttgtctgagagtctgccgaggtggctcagtggtagagcacctccttggtaaggaggtggtcgcgggttcgattcccaccctcggctagtttatcttgaaagttacaattagtactgcagtgaggttggtgatgagggaggggaaataaaaatgggaaaagagaaatttgagaggagtaaaccgcacgtaaacatagggacaatagggcatgtagatcacggtaagacgacgttaacagcggcgataacgaaagtattgggtgataaagggttagcgaagtacattagttatgatgaggtggcgagggcgtcagaatcgcaggggagaagagatgcgtcaaagatagtgacaatagcggtgagtcacgtggaatattcaacggtgaataggcattatgcacatatagattgtcctggtcatgctgattatgtaaagaacatgataacgggagcggcgcagatggatggtgcgatactggtggtgagtgcgcttgatggtccgatgccgcagacgagggagcatatattgcttgcaaggcaggtgaatgtgccggcagtggtagtatttctgaataaatgtgatgcggtggaggataaggagttgttggatttagtggagatggaggttagggatttgctgacgaagtataattttcctggggagagcacgccgataataagagggagtgcattaggtgcgttggaagggaagcaggatggagtggattcgataatgagtttgatggaagcggtagataatacgataccgttgcctgcgagagatgttgacaagccatttctgatgagtgttgaggatgtattttcgataacagggcgagggacggtagcgacggggagagtagaaaaagggagagtgagagtaggagagaatgtggatatagtggggatacaggagacgaggaaatcggtggtgacgggtatagagatgttcagaaagctgcttgatgaagcgcaggcaggggataatatagggatgctgttgagagggatagagaagaatcaggtggagagagggcaggtaatagcgtatccgggttcaataaagccccataagaagtttagaggacaggtatatgtgctgactaaagaagaaggagggagacatacgccgtttttcaatgggtatcgtccgcagttttattttaggacgacggatgtgacgggaatagcgcatttgcctgaaggtgtggagatggtgatacctggggacaatgtgacgatggatatagagttgataatgcctgtggcgatggagacgcagttaaggtttgcgataagggaaggtgggaagacggtaggttctggggttgttaccgagatagttgaatagagagaggttttttttgattatgtttgtgtgagtgaaagatttgggtggagaaattattagatttaataagaaagaagctttattgtttggatacgacttgaatgtaaaataatcgacgcttaagtattatgttataaaacggagattaaataaacaggattaaaatctatggtaaatgaaaaaacagtcccgactcaacgtttgagaattaagttgcggtcgtatgatcattgacaccgagagatttgttttggagctattttattatagttattactcttaagaaattatatatagcgattctaacagatatataaaacagagggaggggggggataaaccgaaacgagcataaagagacgatagcggcagaataaagtgatagaatatagcacaggctctcgtatcggcgaaagaagtatgaagtaaaagcaaacagatgtttttgagacaaaaactacttaaacatggcaggcaaaatataaaattggagaattaatagatggcggaaagagttattataacattagcgtgcagtgtatgtaagaacaggaattattattttgacagagccaaaaatcatgaagggaagctcgcattgaaaaaattttgtaaaaattgcggcaaacgcactgatcacaaagagacaaaataatcaagacaagggaagggggtataagctaatggtaaactgctggtctccaaaaccagctttggaggttcaaatccttctgcccccgtttttgaataatatttacgaaggtttaagatgaatttaattagaacgtccatacaattttttaaagagtcgtattacgagcttacaaaggttacgtggcttggcaaaaaagaagttgtgggaactactataatagtgattatatttgttattatcatgtctatttttgtaagcgttgttgacttgtttttaggcactgttgttggtattatattatagctggagtgagaaatggcaaaccaatggtatgttgttcatgtttattcaggacatgaatataaagtaaaaaaagggttggaaatgactgttgcaaatttgaacatgcaggatactatttcgcaaatacttgtccccactgaagaggtaattgaggtaaaacaaaataaaaaaaaaataaaaaaaagaaaattctatcccggttatatttttgttgagatgacgataaacaattcgacttactggcttattagaaacaccgcaggagttacaggttttttgggcggcgtaaagcctattccaatatcgcagtttgaagttgaaaatattcttaacactgttgccaatccggatacttctaagcccagacccgcggtatcgtttgagaaagaagaaaatatccgtattattgaaggcccgtttaaacattttataggtatcgtggaagaagtcaatcacgagagaggtaagttaagagttatggtgacgatattcggaaggcatacaccggtagagcttggtttcttgcaggttgaaaaaatgtaaaaaagttaaggttaaattctatatatatttttacttatatgcgaaatcagtcaatacaggagtaatataaaatgccccctaaaaaaataaaagcaatgattaaattacaaattcccgcaggcggagcaaatccgtcgccaccagtaggtcccgcattgggacagcagggcgtaaatattatggatttctgcaaacaattcaatgaaagaacaaaaagtatggagcagggaatgacaatacctgcagttataactgtatttgaagacagatcatttacttttataacaaaaataccccccgttccggttttgattaaaaaagctgccggtgttgcaaaagcttccggagttcctaatagaaataaagcaggaaaaattactgcgacacaggtagaagaaatagcaaagcaaaaaatgccggacttaaatgcaaacggagacctgaatgctgcaaagcttatgattgagggaactgcaagaagtatgggcattgatattgttaagtaaccgtaaagttgaaagtgaaagcaaatagtgaaattgacaataataatagaagtgaattgtgggagtcggtttatgctcgacatataaccacaggaggaaaaagtgggtaaaagattaagcgaagcgtcaaagttagttgataagaacatggtttataaactgacggaagctgtaattcttgtaaaagaaacggcaaaagcaaaatttgacgaaactattgaaattcatattaagttaggcattgatcctaaacggagcgatcagatggtgagaggtacaatatctatcccgcacggcatcggtaggacaagaaaaatcgcggttttggcaaaaggcgaaaagcaaaaggaagctgaagcagcgggtgctgatattataggttcagatgacttaattgaggatatatcaaaaggtaaacttggttctggcttcgacgttttggttgcgacgcctgacgttatgaaagatttgagtagggttgcaaaaattctcggacctaagggtcttatgccgaatccgaagtcaggaactgtgacgtttgagatcggcaaaacagttgaagaacttaaaaaaggaagagtcgaatataaaaacgattctttcggaataattcatgttccggtaggaaaggcatcttttgaaaaagaaaaacttgaaaacaatataaaaactttgcttgaagctgttgcgaaagcaaaacctttaagttcaaagggacagtatataaagagtatttctatttcatcaactatgggtcccggtatatttgttgaacaaaaaatatagttgctttttaagttttagttatataaaaggcggctgactaaaggctgtcttttgctttttttgtgaggatgatgtcagatgagaaaagtgcaggaaatagaggatttgcttgctccagttgcagcgagggaaaaaattgaaatagttgatgtacagtacagtaagaaagctggcgattgggttgcaagaatttttatcgataaagacagcggggtgacaataagcgactgtgaaaatataagctgtattttcggtgcttttttagatgagagcgatatattaaaagattcttatgttctggaaatttcttctccgggatttaaaagagttttaaagagcgaaaaaagttttagacgttttataggaagtaaaactagaattcggacttttaaacctataaataatcaaaggaattttttaggaactcttttaaattttgatgatggc

SEQ ID NO: 392 - DNA, 23252 bp, synthetic construct
  source 1..23252: mol_type = other DNA
  misc_feature 1..23252: note = Synthetic
gattaaatttaacagcatctgttttgttagctattaacaaatatccatataggctaaaagaaaataagaaaaaggggctgtacgattcggagtggacagcaatctcccaactgagggaaggatggggtattcctaacggatgtaaaacacttgaagctcaaataatggatttatctgatgatattgcatattctacacatgatattgcatattctacacatgatattgaagatggtataaaagcagggaaaatcagaagagatcccctttttgtgaaaagtattatggatgatttgattcaagaagtttgtactagcaaagaaaaggaactttgggatgctttaagtaagggcgaaatgaaaaaaaacatcaatgatcttcttcaacaatttataaacgtttggcaggggaaagtggatatgtcagatgaagttattggtagacaggaactaaaagcacattatgtaaatgaatttgctaatagcatcgggattattgaaacacaagagaatggtgagccttggtataaagtaacttttgttaaagatggggaagaagatttatcattgttaagacttatgataatacttaagaaattagtctgggtaacacttgtaaaggacattagagtccaacgattgcaaatgcgtggggaagtaataataaaagggttatggagtatattaaatgacgtagaaaacgggaagaaaatacttccaagaggatgggtggatcgatttgaaagcagcaatggagagtgggggtgggatcgctttattgctgactatatttctggtatgaccgataattatgcagataaactttatggagagctatatggaagtagaattggcaacatttacggagaataatcccactttctatgttgaaaatctgctccacgaacaacctattggtttttttggatgagatagtttgacctccctgatccgtttgcgcttatatcttacaaactaaccccttccatctacaaaaaagtatcgagggattcttacaaagcaatttcactttaaactttgggtgagttgtggtttcattcttgggaacattgtcctgattgacgactattgacaacctgcacagccccaattgaaccaaacgccattccatcttgcacccatgagtgcatccaatttgccccgctgtaccatagagtacttcatagattactacataacttttatatacatgactcggttgctagccagctgggtctttttttgttctgacaaaaattgttcacattttgccatgtcctttttgccgttaaatcgctatgtaaagggtgaaagggtggagtgataaaaactgggatgaagcatggacaaccaaaatgaaacggaggtttttgtaggggcaatttgttgatcaaggagcggccgatgatggtgattcctgccttggcgaaaaagattggattgaatgaagcaattgtactgcagcaaatccattattggctgacgaaggagctgcatatgattgaggggcgccgctgggtttacaacacgtacagggagtggcacgatcagcttccattctgatcggaaagtacgattaagcgtttgtttaagacactcgaggacctggattatgttctatcggggaatttcaacaggtcaaaaatggaccagacgaagcggtatacgatctattatgaaaatttgaaggagctcggagaaggagaggtctccttcactgatccaatagtaatttataggatgataaaagaaggtgtgaggttatttaacccctcaccttacttcaattatatgaaaaatggaattgaatgtatgtttccgataccccaggagaatccatacatgtaatgcctggtgaaatgactgcagatgcagtcattagggcaataacagagacctttcagcaacagaggagatggtttcttcatttataagttgaactcctaaatccgacagtgacataggcaattcaagtagactgccaatgcggccgaagtaatttatatgggaaaagatgtataagttgtcattacttaatatgaattttatttcttaaggggagttactatacttacaattgggttttctttatggtctttctcttcttgattcatgttgagttttccacttattttgatacttatcatcattttttctgggtaatttcccaaagtagttaaatgtgctctttagatagtattcaaagggaaaggctacaccggctaaaagattatcaaaataaacaagcctttctgctatcccattttcactacgtccataaaagagaggaactgtactgactagttcctttgcaaataccttagttagtcgctttgtttcttctggtgtcgccccctcaattcttcttcgatactcctccataacttccatgaaaacattgttttgttcagtagtgtactttacagccatgcgatccactcctataaattttattgaaaataaaataaattccttatcttctatcccacttcataaaagcttattttagaaaagagttaaatatgtttaatgtaccaatagacctgtttaaaaagctggtattaattaaaaaaggttacaagggaaagtcctgggatcttatgataaataacgcacaacagcgttatcccgattattaaatccacactaatttctacaaaaatagggaggagtttgaaggaggagggttttaattacagcttatttcagaggagagtgtttaaatttgtactataagctaagaaactgctaaaactttgatttgtttgatgtctataggagaggtacacgaaatgaaacaacttaatataatatattgagaaattccacatattaaagacccgaattagcatttatatcattgctatacgggtctttttctagaagcgaatgctctggctttataaaaaaatattagactgatactagaggaagattttcaagtttttgaaaaatgttagtgctgatatcttccggtgaagtaattgctaagagaggaatatccattgacactgcacattgtattccccagtaccggcctctgcctttttctaacggtttactggtccatattccattatcgtttgaaatgttgaaaaacttctttacccgaaatggatctgaaaaaacccaatgatcagaaatcgctggagttttttgccattgagaataatcaaattgatatctagttagagagattgtagggtaatcttcttccccctcaagttccacctcaataccatatatgaatccatcttttagatttggaaggtgttttagattggggtctttttctacttgatacaatttaatgaaattagtagttagccaaccatcgtaatctgaatccgatttccatcttagaaatctaggggttattgagataaatccttccttctcaccgattctatctaattctgaaaataacaagttcaaatttttataggtttctcttaatacattaactgcgttggagatattttgtccgttactagttggaatagttgtagacatatttctcatcctccttaataaatttgcttggccaattaaaagcagtctggttaataaaatactcaccattaaaagaataggcttctttagttacaagttgcagaaatacaggtgagttaaatccattaaattgcattaacccttttatttttaatagagctcgtaaatcctttattatgcgctgcggtcctatttctatattactgatatctagggtcaataacgattcatggatatcttgccaactaataaatcctatttcaaccgtaggggcaataatggggcgttctaaaaccttcttcttaacttggttcatcatatcgtatggagcaagaaacaataagtaagacttcctgccttttgaaagtctctcaatcattcttgaataacgagctaactgatgtacactttctctgtaatcaatagcaatttcttcagagtgatcttcggatgaaattccgcttagatattttacttcgatacctataatcattttttcagtagtgattaataaatcgatttctccttcgtcatcgcgataccaaaactctatttgagttgcgaatcctttttctttctcaataaacttcatccatttttgttcagcttgcttatgagtaaaatctgtcgttgttaaaacttgctttaaacccaattcaaaaggcaaataacgaatggttccaaaaaaatctccagtgagcttatcttcaagcctttccgacaaattactcccactctttgagattttactatatatttcggccaacaatttatcaccccttttctaatattcagtttataatacaagtaaaggaaaatatacccttttttaggaagatagacaatttggaggtgactttattgaatagagacaaactggcataagcattaaaagcaattggtaaaaaatcaattgttgtatgatgatgtttacggctataacaactttccaaaggaaacaagatcgagagattaacaggaaagtattcttctcattgtgcaactaggaaggtttcttttgctaaagaaatttttgaaaatcgtaaacaaaaagacgctttaaagctaaatattgactcacctcgaaactcatcagaaaaaagacatgccaatcagctaataggtttggagggatgaatatatgaatactttagaaacattatattataaaaagaaattcggctatcagggttctgttaaagaaggagttatattgttttttggtaagaatcaatcagtaaaattagaaaaagaagatttgaaggttctgcttaatacatttagtgggaagaccgtaccaataggagcatccagaaccaatcctcctattgggtcactaggagattggttaatgaaaaatataaccaaagtagcaattgcctcttacctggctccagttttaataacagaaggatatgctcaaaaaattgataatttttcaatcaaatttaattagaaaagataaggtagcgtacttcttgtcaaaaaagatgtgtctatcggtagctgtaaaatgaaagaaagagtttcaacttatctactaataataaggggagaatcttatcgatttaattcctgctgataaattgaaaagagtttatagagttgacgcgcacttttataaaactaaagttgatgataccgaatatttgatgcgcagcgaggcaagaattttacgaaaaggtaaaaaagtcaaatatacgaatgagataatactgtttaatgttgtagtcaggtagaggatgttcggaactaaaattagcatgatttcatctatgctaattgagaagagtagaattatcttattagttcacattttgaaaaaggaaaggtgaatatatgggaattaatatttttgatagaatggttctgaaaatattggaatattccataagtagagagaagaaccctctggtggataaagacttattcttaagagtaactagaatggcgatggagccgatgggtgaaccaaaggtgccgctttatagaacaaggcacgacaaaaagaatgcatttaaagtgattaatggtggtttgaatgaaaaaagaaacgattaatctatatgttgatgatttaagagattgtccacatggatttatagtggcgcggaatatggatgaagcgatccattacattgagaatagtagggttcatatcctttcacttgatcacgacttaggggaagatgaaaaaggaaatctattacctactggttatgacttagtgaaaaatttttgtgaaaagggattgcgggccaataagatatatctacataccgataatggcgttggccgggataacatgtatcatacccttaaggctgctcaaagaagagggtttatcgatcaagatatagaaatctaccactactccatcaccccaaatagatactctggaaattagatgatgacaaatacctgtgtgatctgatttaattgctcttaaccacattcccttgattagataatattgtcgacctgcaaactccaatttgaaccaaacggcatatcattctacaacattgagtcgatccatattggcccgctgtaccatagagtacttcatagattactatataacttttatatacatgacccggttgctagtcagctgggtctttttttgttctgacaaaaattgctcacattttgccatgtcctttttagcgtccaatccatatgtaaagggtgaaagggtgagtgataaaaactgggatgaagcatggacaaccaaaatgaaacggaggttttaatatgagcaatttgttgatcaaggagcggccgatgatggtgattccgtccctggcgaagaagattgggttgaatgaagcgattgtgctgcagcaaattcattattggctgacgaaggaactgcacatgattgaggggcgcagctgggtttacaacacatacagggagtggcacgatcagcttccattctggtcggaaagtacgattaagcgtgtatttaagacgcttgaggatttgggttatgtcatttctgggaatttcaacaggtcaaaaatggaccagacgaagtggtatacgatcgattacgaaaaattaaaggagctcgaagaagaagatgagggttccttcactgaaacccaagctgggcttgatgtgcggacggaacaacaagtggtggaggaaataccgattgctgaaatcgtcgagtacctgaataaaaaaacttattcaacatataagcatggcacaggcaagacacggacgctgatagcggcacggtggaaagaaggattcatgttggctgatttcaaaaaagtcatcgataaaaagtcggatgaatggctcgagcatccaaaatggagccggtatctgcgccctgagacgcttttcgggccgaagtttgaatcttacttgaaccagaaaaccgccagatcaaggcttcgtgaggaggatttctattttgatgacgaagcgtgagatatacacgattttaaagatgaccgcgagctactatgaccagttcgttattgatcaggaaaaagtggacaattggcacaaggttttaaaagagtccacatttgagcaatgtgagcagcgtctcatgtactatgcagccgcttctccttatccgccaaagctatgtgattttgccaataaacctgccggtgcggggagggcgattccaaattgccaggaaacgcttgaggttctttggcaaacggacaagcaagccagcaatgaggttgcaaagttccatatggaaaaaatcaggaagattctcgggatagaaagagggagttaacaatgggcgtggctttacaaaacttgcatgcttacgatggaaggctttttaatcaggaggcggaggaggcatttgtaggcgcgtttttcctggacggagcattgatgcaagaatgctccgtccagccggaacagctgtacaactatcggctgaggagacttttcgcagtccttcagcgcctccatgaaaagggcaagccgattggcatcatttcggtcgcggaggaagcgggcatcaaggaacttgagagccttggcggcatcagctatatcaccgatatcgcggtcagtgttccgacgacagcgaacttccatttctatcaaaatacagtcaaggcctacaaccaaaagagaaggaccattgagattaccgggaaaatcagggacaaggcccttgaggaggatatccaggatgtccttagtgacggcatcaaccaactcaggcagattgaggatatgcacggggacgaggatgccggggaaatccaggcggggctcgttgacttgtacattgactgcgggaaggatttaggcgaaatcaccgggattccttccgggttccagaggctggacaagctgaccggtggttttcaggaatccgacctcgtcgtaattggggcgcgccagagcatgggaaagactgcctttgctctgaacatcgcactgaacgcgggcaagcaggacgtaaccgctgttttttcacacgagatgtccaaaaagcagcttttgaagcgggcggccagttgtatagggagcatcagcagtgtgaagatgaggaatccgaaacgctattttgatgacgaggattgggataatttcagttatgcgatgggtaccttgtgcaaacgcaacataaggattttcgacaatgccggaatggatatcagctatatctggtcaaaggtccggcaactgaggaaggaaattggggaggaaaaaaggctgctggtcgtcgttgattatctacagctgatcgccgggagccctaagcaccagcaaaaccgccaggcggaaatcagcgaaatcagccggctgctcaagcaaatggccagggaaacaaacgccgtcgtcatcgccctgtcccagctcagccgcggtgttgaaagccggcaggataaacgcccgatgctgtcagatttgcgcgagagcgggcagattgaacaggatgcagacgtcattgcgttcttgtaccgggaggagtactacgggaagaaacaggaggaagcaaccagcctgggcggccaaatcatagaggtgatcgtcgccaagcagcggaacggtccgatcgggacagtggaattggggttcttgatggaggtggggaggtttggatgatggagcaggaagagcttttcatggcaaaagccagccggcaacccggctggcgtccacgtcaatcgttagtattcatcaatcccgcaagcttccgccagcagcaggcggctccttatcaagctcgcgctcaatataacgttccagcatttccttcgtattcagtcccgcaacccgttgatccccaatgaaaaacgttgggacagccgtaatcctggcttcctcatatgcgtggcgaagggcttccttatgtgcctgctcatacttaagagtttcaagcgcctcacggaaagcatcccggtccagcccaacacttccggcaatctccgtcagcacatcaatgtcaccaatgtcacgcccttctgaaaagaaagcagccaggacggcctcggtatattcgttgcctttcccattctccttggcaaaaaaagttccttcatgggccaagtgcgtatgcggctgcggatcaacatccggcagtacgatctttacgttgaaacgctcagccatcggccataccgaattatgccaggcattctgtatataatcaccctttggcgacagcgtctcatggggaaacggccgcagctcaaacggcatccatttcagctcaacattttttcctttaatcgcttctcgtagcggagcctccgctatataacaaaacggtcaaacaaaatctgaatacacacgaattttcaatgtcatcgaacaatcctccttctagtagcaattacctcatagtctaaaggggaggggagagattatccaaatttctgcttaaagaaagaaaagagctgttcaataaaaaacttgttaaaaatcccttgacttaaagttgttttcgtactatagttatacatgtcctcaccaagaggaaaacttaatacgactcgttagctcagcgggagagcacttgcttgacaggcaaggggtcactggttcaaatccagtacgagtcataccaatcctaacatcaaaatgatgttagggttttttattttatattcctttctaaatttgaatgggtattcttttttctactaactattaaactaaaaatattttaaagcataacataatagagttcccattcagttacagtattttagctgattaattagggcatagtttcaaaaggtcaatctgtgtttttgtcataatatacctttacaaaatacaccagataaattaaacttaatgtatcatagtacagcaatggcgttgatgtttctatgataagggctttaaagcccgtggcgttggggatcgcctgcccgtttcgacgggcttctccccgcttccttcaatgaaaaggccttagctaaattggtagctgaggcctatttttataggcatttacttttaaagggggttaaaagatggttgaacaggattataggttaggactggatattggtacgaactcaattggctggagcgtcattggcttacgctatgatgatctaagcggacgctatgtaaaagaaaaaatcattgatcttggggttaggatgtttgataaggccgaaattcccaagactggggcttctctagcagaaccacgaagaatagcacgatcttcaagaagaagattgaatagaagaagccagcgaaaacgtgatatccgacaactattaatcaaacattctattatcaaccagaaagaactggatcatctttatccattgcccccaggttccgtagatatatgggatattcgcatagatggtttggaacgaaaactttcccacctcgagtgggtgagattattgattcatctcgcacaaagacgagggtataaatctaataggaaatctgaacgaaaagaagaagaaaccggaaaggtattgtccagtattcaaacgaatcagcagcttttagctgaataccggacagttggagaaatgtgggtgaaaaacgaaaaattcagttctagcgacaaaaggcgcaattctccgaacgaatacatatttaacgtaagccgggaagatttaaaacaagaaattataaccctttttaatttccaacgacaatacctgtccccttatgccacagagaaactacaggaagaatacttggaaatttgggaatatcaactgcctttcgcatctggaaatgatattctgaaaagggtaggctgctgttcgttggagcccaatgaacgcagaattcctaaagcttcttttaccttccaatactttgctgtactggacaagctaaataatttaagaatcggaaacaatgccgagcatttgaccgaagatcaaagaaacttgttactaaacaggatttttgaacgaactgattactattctaaaaaggaagtaccaaaggttcattattcagatttaagaaaatggttgaatctggattactcattccgattcaatggatttgattctgcatccacagatgagttaaaaaaaatagagaaaagggagtttgtcaacttaaaaccttattatgaaattaaaaaggcagctgccctatattccgaaaagtcaggtgagttctgctcccatgaagattttgacacatttgcctatgtcctaactgtatacaaaaatgacaaagacatcagagcgtatcttctaaatcagaataatatagcaaaaaaagtctatgacttggatttgattgagaatttgtcggacctttcctattctaaattcggacacttatcttacaaatcattaaaaagaattatacctcttatggaagcaggaaaatcttttaaacagtccgcagaggagttaggatatgatacaacaggaatgcagaaatcgaaaagaagtcttctgcttcctactattcctgatgaaatcaccaatccaatagtaaagcgggcgttatcacaatcacggaaagttgtaaacgccatcatcaaacgtaacggttcccctttatccattcatattgaattggcaagggaactttcaaaagatcactcagagagaaataagattaagaaggaacaagatgccaattatgagaagaataaaggggcaatcaaggtcttagttgaaaatggggtttttaatccaactggttttgatattgtccgatataaactgtggaaggaacagaatggccaatgtgcatattccctaaagaaaattcctgccaatgtgttttttgctgaactccggcgtgaaaggaacagctcaccaattctcgatgttgatcacattcttccctatagccaaagctttatagatggctatgataataaagtgctcgtctatagcgatgaaaataggaagaaaggaaataggattccttactattacttaaaggataagcccgaaaagtggacagcatttgagaactatgttgaatctaataaagagtttaaaggaaaaaagcgaaattatttgcttaagaaagagttttcagcacgagaaagcgagttattcaaagagcgccatttaaatgacactcgctatgcaacacgctttttcaaaaatttcgttgaaagaaatctcttgtttaaagaaccattagttccaattgccaaaaaagtgcagactattaacggaaaaataactgctcatttaagaagccggtgggggctagaaaaagcgaggaaggaaagttttctccatcatgcaatggatgccgtagtgatagcctgcacagatcagcacatggtgactaaagttacagagtattatcagttaaaagagaatgcgaaaaatataagaaagccatactttcctttgccatgggaagggttccgggatgaattgttaacacgtcttgcaacccagccagtcccccaaaaaattaaggaagctttagaattaaaggctcctctgcctgactatatgttcgtttccaggatgccgaaaagatcagttacgggagcggcccataaagagacaattatgaagtatggcggcattgatgaaaagaccggtaaaaccaagataattaaaaaagttgcccttaaggatataaaattcaattcagatggtgactttgaaatgatagggaaagaaagtgacatggccacatacgaggcaataaaatcccggtatttagaatacgataagaatcctgaggcggcttttgctcagccgctctttaagccaagcaagactggattatttaatccaattaaaaaagtgaaaatacagatggaaacgaaatcctttgttagagaggttaacggaggcgtagctcaaaatggtgatctagttaggattgatctttttcgaaaagacaacaagtactcaattgtgcccatctatgtaatagatactgcagaagaagatttgcctaaccgaatggttgcagcacgtaaaggatatcatcattggccggagttagataagtcgtttgaatttgaattcagcgtacaccctttcgacttaattcgtattcaaagtgaaaaaggggataaaatagaagataaattcttatattttgcaacaattgacatcgatagtaaccggttagagtgcaaggaagtaaacattccatccgttagaaatgctagattcggcttaaattctattatatcaattgagaaatacgaggtggggattttaggagatcttcatttagtcaaaaaagaacctagaaaaccctttcaaaactctaaaggtagaaaagtggttttaaattagtagcagcggtaagtgacttgtcacttaccctatttttttatgtattttttcacctcttttgggaagaatgggggacaaatggattaaaagaggtgaaggggatgacttggcgtcatattatgattacacaaaacgcaaacctatccgttaaaaacaacaaattagttattaaacaagaggaaacagttacaattccactacaggatattgcctctattataattgaagccagaggagtttcattaaacacatatttattgagccagtgtgctgcttataagatatcgtatttacttgcgatgaaaagatgcttccaaatggtatcttaacaagctttcatcagcactctaggcaattgacggtcctgtcaatgcaactatcattatcaaaaccttttaagaaaaggatatggcagcagattattcagcaaaaaattcttaatcaggcactatgtctacagtacttggataagaccggatacgaggatttgaagtttattgcaaaagcagtagaatcgggagatagatcaaaccgggaagcttatgccgccaaaatttattttcaaaaatggatggacaaaaattttacaaggcgctcagatgatccagtgaatcggcttttgaattatggatatgcaattttgagaggggcaatggccagagcttttacattatatgggttcacccctagtttagaggtttaccatgataatcagttaaactcctttaatctggcagatgattttatggaagtgtttcgccctttggtcgattatcatgttgcacaacagaatgctgaagaatggaagccagaaacaagagctgccctcgtaaatctcttaaatatggatatagagataggcggagagaagaggtcagttacaacagcgattgaagacatggtcaaaagttatgtgacctgttgccgccagcaagatccggtatatttaaaacttcctgtgctgctcccgacaagggtgcatgcttatgagtaattatatgaggatactattgttttttgatctgccggtgaaaacgaaaaaggaacgccgggactacactcgttttcggaactacttattgaacgaggggtttgatatgatgcagttctctgtttactgtcgtttgtgcaacggacatgaatcaatggaaagacagctggagaaagtggaaaaaaaccttcctcctagaggacaaataagggcaatgccagttactgaaaagcaatatgagagaataagaattttgttgggtgccaggaccaccaatgaaaaaagagtaaccataaatcaactttccttgttttaattcagaagtatatttatctccacttttggaaaaagtattaaatttagtatgtataaatttaatgacttttgacaatactatatataaataactggaaacatgttaattgagttgcatattcaatttactgaaccaacttcttatagtctccaaaaaatatatcttatgttggctttcttgatactttgcaacaaaggtccagataaaaattaacaaaaagcaatttattataaggtgttttttgaaaaaatagagactttttgcagaacaaaggaaagtttcaagtcgatttttaaagacaaaaagcctgcaaacacttggtttgacaggctttttgcgagacgtatcataatacagcaatggctttgatggaactatgactaataaagttcaggctttcgaccttccttcatcataatacagcaatggctttgatggaactatgacattttgcgctcatcacttcctacggttaaaatcataaaacagcaatggctttgttggaactatgaccaagaaaatcagacgtaagattgctaaagaatcataaaacagcaatggctttgatggaactatgacacagaacaaagtgtacttcgcaggcaagacaatcataatacagcaatggttttgatggaactatgactgactgcagcggttaaggtttggatcgcagatcataatacagcaatggctttgatggaactataacggatgttgagttggaatggatgccgtttgaatcatagtacagcaatggctttgatggatctatgacgggtcggaggttcgaatcccactcaaattaatcataatacaataatgcatttgatggaactataacgtgtatttaagtgcctcctactccttgctatttgtcgagagaatattcggtttctcaatatataataaaaatgtgggcagacaattatttttttgtctgcccaccttgttatgcttaccttaaaataaccccatctgttccaccttgccgaaactttctttatcctctacataacccatgtttttataaccagcttttctcttttcgtacattttctctaaagcaggtacctttttatctgcgtagtcgtagaccctcacttcctgcttgtcgtcatatagacggtgtagccggccgacatattgttccagggttcctttccaggagattggcattgcgaggaacagagtgtccagtcttgaatcgtcaaaaccttcgccaatgtattttcctgttgcaataacgagccgttcttcggaatcaggtatattggctagccgttcaagttcagctttttgctgctttttcgtcaatttaccagtaagtacaacgatatttttagcaaaatgtttgaattgatcttgtaggtaatcaagatgctcaatccgctcagtcagaataagtggcgaccttctttcctcaagcgctagtaggacatcatcaaacagctgctgatttcttcttttatcggaggatagctgtttataaagttcttgaatatcctctgattttgatgaaaaagctgtttcacggacaatgagcctgtgaataaatggcctcacttttgcctggctctttgcatctactttatagcggataggaccgcattgcatgaagataattggatgaaggccgtcttttcgtattggtgttgctgaaaggccaaccacatacttggcacgaacctgtttcaaaacacgttcaaatgtaaaggcagaaatatggtggcactcatcaataacaatttgcccatactgggtaataaagctttttaactctcctttatacgcaaggctttgaagcgtgacaacatcgacctttccggtcagttgttttttgttcccgccatattcaccaatttcttttttaggtaaatcaagaaatgaagcgagttgcgcaatccattgttgttgtagctgccttgtatggacaattacaagcgtatttacttttcgctcaccaatcaaagaggcagctataacggttttaccgaaaccagtagtagctgacaaaacgccattgtcatattgaagtaattgtgaaactgcatctatttgctgccctgtcaactgcccagtgaaggaaacgtctacatgttcgccatggtaagaatggtcttcaaacacgacttcgatattatgctcggccaacaacttttcgaggggctctttgcaaccacggggaaggattagatcctgatagaattctatactacaattgatcgaccttggaatcctagctgtagataacctttgtgcctgggctttataatatgccggattcctaattgtaacaagatccattagttttgcctttaaataagaagggattagctgttttttaatgaacaagccatttttgataacaacaaccaacttcttagacattacctcattcgctgtaatttctacttctccactcaaaacttcaagaaaatggaatagttcacctggcgtaatcttatggactgtggaaagatatatccattgatccggatatgctgtaaaggtttcgtctacaaaaaggctattgccctttcttcctgattcgcgttgcaagggaagggcgatcaaatttccaattccgccttcaggcaaagaatcctggtttgggaacatcctgtcataggactcaaccccaacttgattcctttttactagcgttttagaaagaaggacatgtccaagttttcttgctgtggcagcaggtacgttagcggaaaagaagaaccatacatgtgcaccatttcctgagcgggaccgttcaatgctgtaaggaactctatgttcctggcaaacttgggtaaatgcaagaacatcttcttgccagttgtgcttatcaaaatcaacagccaagaaggagcatgtattatctttttgtaagggataaatgccaattgtgtgatcaccgccaagatgtccttgaagaacctgatccataagcagaagaaatgagcggttctgacaatctgtacatttaattgttggcagcttgcacttttctggatgccattgtaaagaacatgcaggtgagtagccggatctcccgtctttggcgatccacctttttgcatataagtcataccgtcctttaaagagactcttgtacagcttcaatttattatcaaagggagaatgctttgttacaagctctatgttttcaaggtctagtcgccggatcataggttgctttaataaaagagcgatttgtttagtgagataggcattctctcgcagtaagcgattgttttctgctattaatttctccaatgtaatatctgcactcattttgctacctctataagttttttaataattgtaagtgatttataggggtgagtacaacattaggatatgggaatccacaattagatttttcctttaatagaaacttagaagtcattatatgccacaacaaaatcatcatccagcaaaaaaggatgatgtttttccttttagtgataaacccgccaagatcttctataaaccctgccattatagtaaaatattggtaacaaggattttgtcgataggggaagaatcatgctggttgaaaaacgtttaattgttaattcggataaaggaaatttgctgcaagaattaatcgattcaatgaatgagtgtaagagattttattttagtgttgcctttattaattttagtggactccagctgttgcttgatccgctctttgaggcagggaaaaaagggataaagggaaaaattattacctcaacgtatctcaatttcacggaagcgaaagcattggagaaaataagagagttcgagcatgttgacttaaaggtgtttgtgacggataaggagataggttttcatacaaaggcttatatttttgagtatgaagagtcctataaggtcatcattggttcatccaatattacccaaagcgcattgaaaagtaatgttgaatggaacgtggaggttatttctaaaagtgatacttcttttattcaggcagttttgaaagagtacgatgccttatgggataggtcccgggttgccgacgataagctgattgctgaatatgaggaatttttaaagtctctaaagaagactcaatcttcccagcagttgatttttgaaaagccggagtatatcactcctaaccggatgcaacgaagggctatcgataatcttgctagattacgagaatttggggaaaagaaggctcttgtcattgcagcaaccggtactggaaaaacatatatgtctgcgtttgatgtgaaaagcttccgaccaaagaggcttcttttcgttgtacatagggaagagattttgagaaaagcaaaagaaacctttgaaaagctgttaccaaatgaaaaacttacatttggattgttaacaggaaatcataaagagaaacacgctgattatattttcaccacaaacctgacaatctctaattgttatcatgagtttagaaaggacgaatttgattatataatcattgacgaggctcatcacgcaacgagttcaacttatcaggccgttttgaattattttgaacctaaatttacgcttggaatgacggctacgcctgagcggagtgatgggtacaatgtgttcgacttgtttgataacaatgttgctcttgaagtacgtttgcatgaagcgcttgatgatgagcttgtcattccgtttcattacttcggcatcaccgatattgaaggaatcgatttaagtgatgtttccattgatgacattgcggaagtaacgaagcgtcttaaggtgaatgagcgggtcgattttataattgagaagatggaattttacggtcatgacggagaaaagcgaaaatgcttagggttttgtgcgagcattgagcatgcccagtatatggctgccgagtttaatcggaggggttgtaagagtatatgtctgcatggtggcgattcagctgaaacccgtcaacaagccatgaaccgtttggaaaatgaccatgacgaacttgaagttatcttcactgttgatatttttaacgaaggggtcgatattccttcagtgaattctgtcctcatgttaaggccgactaactcaccgattatttttattcaacagcttggacgtggattgcgaaagcatgcgaataagagctttttgacagtgctcgattttatcgggaatcataataaagcgttcttaatcgcattggctctaaacggcagtcgctattatgataaggagagcttgaaggttgcggttgcaactggttttgccaacattcctggttgcacacacattcaaatggacaagatttcacaggaacggattctcatgcagatcgaccaggaaaattttaattcaatgaagtatttaaaagaagagtactttgaatttaaaaatcttaatcagcgacgcattccatattttctgttggattatttaaagtatgatggggcacctgatccggtgaaattcattgataaagaaaaaacgtatctacagtttgttgccaaagtcgagaagagcgagcgattgaaagcgttattgagcgatgatcattttgaaagggctctgaaggagctttcaagtaaattaccgcttaaacgagtttatgaatttgttgtgatgaaatatttgcttaaccatgaccaagtctcgctaacaacggctaaatatgagattctgaaatgggttaagtttgtcgatgatgatagtgtcctgcatgcgttccaaaccttgaatcaggacttttatgatagcggagaattgcgccgtaatttaaagttgtttgatttgaaggatggaatactcggtaagacccctgtattttcgaatattcttggcaacgcggaataccggaaatatatcgaagacattatcttgtatggcattttccgatatgaaaaggagttcaagaacgaatactacggtgtcccgcatcttaagttatatgagcagtataaaatggcggatgcggccttgctttccaatttccaaaaaagccatagctcgtttagaggctcaggtttgttgacaaatgggaatgactacttcctttatattgacctccacaaggacgccgacgtggaggaaaggcttcagtataaagatgaaataaagaatacccgcgaatttcagtggcaaacgcctcacacaacggcccagcacacaaatacagggaagaatgttatcttcaataaatcccgaggaattaaccttcacttgttcatcagaaaatacaaagagattgatggcaaaaatgaacctttcatctatatcggtaaagggaatactgttagttttgaaggaaataatccaatcactgttcaaatggaactggagcacgagctgccgcacaatctgtatattgaatttacgaaaaaagtatagcctttaaaggactatacttttttcgtctattaatttttctacagccggtatatccgcaggtgcccacaccaaagaggtcaggttttctcgctttagccagattaactttgaatgctcagtagggattggcgtcccgctagtgattttgcatttaatcgcaatcagatttatgatgaacgtttcgtattcatggaaaatgtcattatgtaactctatcggttcaatctggcaatgtaattcttcttcaatttcccttgttagggcagaaaataaatcttcatcaggttcaaccttgccacctggaaactcccacatattcggaatagccatctctggtgacctaagtgcacaaagaatctcattttgttcattttcaataattgctgctactacttttactgtttttttcatgaggacctccagtgatttatatttctactaaatataatagcattattaatattaattacataaataataatagtctctgacactttaaccatgaggaataagtaaccggttaaaggaagattattagtcatatttgtaatcacctcgttgtaacaatttgtaattcgaggtaaaattatttaaatgctaattactgtattaataggaataaagaggggagatgggtgaaggttgtataaaaaggttgctttattggtattattgtttacatttgtttttggtacggtttcctttgcacattcaggtagaactgactcaaggggaggtcacaattgcagtgacaaatcaaaagccaagggattatgtacgggttaccatttccacaatggcggtagtacatctggcagctcctcctcaggaagtaaatcagcaccgaaagtaacaaggaaggataaggattgctccgatttcagtagctatgatgaggtagtggcctactggaattccaagggatattctgctacatatgacccggaaaatttggacggatggggcaacactatagacgatggaataccatgtgaaccgccaagtggttacgacaagaccaaaatcaataacagccccgaacaaattcaatttaaaaaggaccaacaagatagtaaggctggagaaaaagagggatatagtcaaggtctaaaggacggttataaaggagaagagaacaaaggaacgacttcccgtggcagcgatgcttttaatagtgcttttgcaaccggctatgataggggttatgcagaaggcgaaaaaagactagattcagaaaaaagtaaagcctatgatgaaggttatcaattaggaaaaaagcaaaataatatactgattccatcagtttttctggcacattctgaactaaagaatgcttttgaaaatggtttcaaaacagctgttgctgaacaaattgagggaaagaaaaaacaatatcgagaaaaaggctataaagatgggaaagtcgacatatatgatgctccttcagaaaaagagtttattgaggtatacgatgaaggatatgaaaaggcacaaaaagaactaaaggattactatatcaagcaaggatatgaggctgcatttacgatgttagagtataaggagcctaatttagaagataaaaagtttaaagactggtataaagaggggtttaaatccaatgtggaagtagagaaaattaaagaggttgccttgaaacacggaagaaagggagatagcttaataattcctgaagactataaagttggaaagataatctatgaattttactataaacaaggacttacagagtacaaagttgaaaagcaaaaaaatcaacgaactaccgtcagtggattaggacttggtgcccttgcatggctaggaagaagattctatgtggctaagaaaatgattggataagggggaaacatttaatgggagtttaccgtactgttagccgtaaagttgaagatgtgttcgtgaaaatactagcaggtaaacaagattcacaacttgtaaaagaaaaagtagcaagatatagggcagaatatgacgaaaaactaaaggtgaaaaaagctggaaaggatagagagaacgctgaacaaaagcttctttttcaacaaagaaaggaagagcaggaacgaggaataaattaaggagtacatcgacagcttggaaaagggtttgcatgtctttttcatcataaagataagatagatactaatctccatagattctctcttagcttaaggtaatagtgaacaggtattctactttcagacgcagagggggaatgcctggcgcttatataggaagggcgaaaaaaattttgaggaagcatcaactctgtgcttccttttcctatgtaatcaattaaaggtgatttggagattttg

SEQ ID NO: 393 - DNA, 23231 bp, synthetic construct
  misc_feature 1..23231: note = Synthetic
  source 1..23231: mol_type = other DNA
agcggatgcgtttgtgttctaccaggagaactttggtgtggcaagtccttttgttgtggaatcattaatgcattggatcggtgatatcggtgaagtgttagtcattgaggcaatgaagcgggcactcgaacgaaataagacaagttgggggtatgtgaaaagtattctacaagcctgggcgaagaaagggatacatacggtggaacaagtgaaggcagatgaggtggcatttaagaatagtcgtgggagaaaacgagcaacaagtacaactgtacatacgaatgagattattccaggatggtttgaagtgttgaagaagacggaaaggcaagaaccgagaaagaaggttcaggtcgataaagggaatgcggaggatgtgaggttggcacttgaagaattgatgcaggagatgggggagtaggtagggacatgtcagattatgactgaaaccgaatagtggcaggcactctctaggttttagggacaatatcgggggaacttttgaattagcctgattgttgcggaatgcggagtttggcattatacaatatgagacataaaaaacggagagctgacatacgctctccgccttgcatcctattaatctctgctaaacaaatcacgcgtatagattttttccctcacatcagataattcttcagacattcgatttgcaacaatgacgtcactaacctttttaaattcttcaaagtccttaattactctagaattaaagaaatcatccgcttctaatgctggttcgtaaacgacaacttcaatacctttcgcttttagacgtttcatcacgccttggatagaagactgtctgaagttatcagagtccattttcattgtaagcctgtaaataccaacaattttcggattgcgatttagaatcatattggcaacatggtcttttcttgtggagttggcatctacaattccttgaataatgttgtttggtacatcttcatagtttgccaagagctgttttgtatcttttggcaggcaatatccaccataaccgaatgatgggttattataatgtgtaccgattcttggatctagcccaattccctcgatgatttgcttcgaatttagtccacgaatttcagcataactgtctaattcattgaaaaaggcaacacgcattgcgaggtacgtatttgcaaacaacttaattgcttccgcctctgtagaatcagtgaataatacatctatatcctcttttttcgccccattaaccagtagatcagcgaatgtcttcgctctatccgattgttccccgacaatcacgcgagaagggtataaattgtcgtataatgccttgccttctcgtagaaattcaggagagaaaatgatattttccgtgttgaatttcgcttttgcatcttccgtatatccaacaggtaccgttgatttaataaccatcactgcttcaggattaattgctaaaacttcttgaatgacagcttcaacagagctggtatcaaaatagtttttatctggatcgtaattggttggtgtggaaataacaacaaaatctgcatcattatatgcttcttttggttcggttgttgctgttagatttagatctcttgttctaaggtaatcttcaatcatctcatccacgatgggggaccttttttgattaatcatttccactttttcaggaatgatatcaagtgcaacaacttcattatgctgtgataaaagtacggcattcgataaaccgacataacccgtcccagctactgctattttcattatttgtttcctcctagtgagtcctaatcctattaatatatatgtcctattatacaataatgtagtttgttttgtcgaaagagggtggagggaaaagaaggggcctgtggtacatcgtcccagttcttctgaaatgatagagtggtagtgttttaaaaaatcataagatgattagtggctcaacgatatgttgttattctcctttttcgtttgtctacgtttatttactttatctcttgaagggaactatcgcatcattaatatgataaaataaagtagcaactgaatattgtgagggtggttggttgtctttcttctttcctttaatggaaaggaggtgataattatggaaacatttccctgaatttcttcgtgaagctctgaaagggattgtacgtgaattaagtgcttttatctttcggaaaaacatactagagaacaagaaaaccaccccgcgccgtcacaagcaaaagggtggttctcaaagaaaataactaaatttgacaaccaccaccctgacggtagaggttgcatagactgggcgctggttatgctcagtcttttttattttacgttgattatgaatatattatacatgatttgttggcattattacaagtgggggtaacctgtgttagaccgtccaaggagagatacttttctgtggtatttccgatttttaacatactaaaattgattttctatctctttttccttacaaaatgtaatctcctctatatggaaatacaataataataccaggcgtttttaaatgggtcagggttagtatggttggacttcaagctgtatcggtgaaggagtcaaaagatcagagcagggggtcacatccccactacaatggaaaggcaacaagggattattacacgatagaggctgcgcccaatagtctagcaatgcagctagttttgttcataagatatgttcctttctttcccgcatctaacacatttatcagtatagtagttgtacttatgtttcttgaaaaatattttacaaaagaaagcctttaggtacatatgtatgataactcctttgatgttctagactacattcaagggtatcattttgtgattacaacaagattactaaccatttaatatatgatgtttgtttcattacaaggatatagtaagcaagattcaggttaaatttattttaatttcgtatataaaaagaaggaggtaatcatgccaaccacgaggccgagaaagatatcgaccattaaagttgttaggaaggtgctaaggtaaatgagtgcatcggtcattttgttttttacataatgaaggagttgtccaaaattgataagattcgatatagcaaaaatgataattgcggctagtgtcgcttttggtaaatagtaaaagaatggtgttagatagataattgccatgagaacaaatactgctgctacgaataaggaaagattacttttggcaccggctttatagttaacagcagttcttgatatcgctcctgcaattggtatcgaaccaaccatcgagcttcctatgtttgctgcacctaatcctcttagctcctggtttggatcaagcggttccttgtcgtttgttgctagtttcattgcaacagcatatgactcgacaaatgatataaatgcgattacaagtgctattggtagaagggaaaatatcaagtctgctgttggtatggttgtaggtaattgtgggaattcaaatgttatcttcccgatgatatctaccccctgattatataaagcgagtgactctacgatgataacggacgcaatgatgataataaattcagctggaatagtggggaattttttctttatgagatagagtgcaataatacatcctaacgcaataccaaatgtatatggatgaatagcgtgaaggtgcgtaatgaccctggaactaaacgtaataagattttcataggcaggtagggaaacaccaagaaaagaatcgagttgatttaatataataataatgccgactgcagcgataaatccattcaatactgcttcggaaacataatggaaaatggagccaagtttgaagaatccccatacaacctgtaagaagccgacaatgaagcttaggataatcatgctttctaggaagtttaatgattgggattggtctagactggatataccagagaatgccagaagggaaacgacggaaacaggtcccacagaaaggtatcgtgatgcgcctccaaataatatataaaagaacactggaaaaattgcggcatataatccgacatgcaggggtacacctgcaattgttgcataggccatgctttgtgggattaataatacagcaacagtcataccagcagtaaggtcgccagttatatttaaacggctatattctataatttgctttaatccagggaaaattttgtacaacataatagattcgtccctccaataaaaaatgacccatacttgtactatattttgaaggaaggagtattattcatatcgtatttgatagcgatggttttgaaataaaaaagacagctaatctgcttgattagattagctgtcgatagtttatcttaaataaattaattagctgtttttgaaaagtcgtcattggatttactgtttgttgtttttctagaactatataacccataggcaatcgaaagtacggttaagagtattaaaacgccggaaataggtctcgtaacaaataatgaaaggtctgcgctcgtttctaatgcacggcgtagattttcttctgccattgggcctaagattacaccgagaacaaaggatggaatggaaaatccgtattctttcatgacatatccaattaacccaaaaattaatagtacccatacgtcaaacatgcggttattaatagcgaaactaccaaatgcacataagacgataacaatcggtagcaagtattgaaaaggaacatcattgatttttacaaacaacctaattccaaatgattgaataatcaacatgaaaattgcagcaacaaagaacgaaataaatataccgtaagcaagtgttggctgcgttgaaataaagaaaggacctggttgaatgccatgaattaataaggcacccatcatcatcgcggtaacagcacttcctggtataccaagtgccaatgtcgtaattaaagcgccaccttctgaggagttatttgctgactccgctgcaataaccccatctgcagttcctgttccaaatttttttggattcctagatgatttttttgctatatcatagctaagtacgtttgcaatggaggaacccgctccaggaagcgcgccaacaattacaccgacaatagaagaacgtaggacattcacccaagatgtaaacattatctttattgttttaaaaactggataggaaaagctcatattttgattaattgaatcgatgctttgattattttggtgattttttaactctgaaagtaattgcgaaaatgcaaataccccgatgagaatcggcaagaaatcaaaaccagcagaaagttctatttgcccaaatgtaaatcgtggggaacttgttactgggtcaagaccaaatgttccgaaaaacattcccaatagtcctgcaattgctcctttacttaatgggccatcacctaaactaataattgcagttaaaccgaaaagcattaagctaaaaaattcccatgggccaaattctagtgcccagttagctaataaaggtgcagcaaagattaaaattagaccaccaataatggagccaaagaaggaagaccataatcctactgataatgccttaccaggtttaccctttttcgtcatcggatatccgtcaaaagtagtggctaaagcggatggcgtccctggtatgccgagtagtgctgcagaaattaaaccaccggaagctcctcccagccaaacccccatcatgagggaaatgccttggagcggctccataccgaaactaaaaggcaatgttaaggcaacggccattgttattgtaaaaccaggaatggatccaaatataatacctaaaaatacacctattgcgatcgttagtaacatacctggctgaaaaattgcttgtaagcttatgatgatttcttccatgaataccccccctagttaaaagatgccaggtaaagaaacacctaaaaagcgatcaaagataaacgttaatgcgatagttgcgatcaaaaatccacttatactcagtacatgcgtttttactgggcgacctttccctacaataagtaagtacacaatcgacataaataaaaaggatgctaatataaacccgataaatgaaatagaaaagatatagatggtaaaaaggagaaagataatccaaactatttttccgtttcctttttgttctggactttttgatggatgattgtccttatttttgactggtaaaaaagatttaattagcatagagattgctagtatagcgattaaagctagtaatagccttgggtaaaatgctgatgaaagtgccaagtcactttgtgtccgtatgttattactttgaaaatagaaaaagatacagaatgttaataaggcaatacttgcgatgcggtctttggatttcattcagcccctcctattctattaagccttgtctttgtaatatggattctagttgatcgaattcactacttaaccattcaccataatccgctgcattcttaaagttaacgtctacaccctgcgcttccatttcagcaataaaatcaggattttctgcaaccttttgcagtgcttcgctaaccttatccacgatttcttgtggggtatctttcgggaaaaagtacccacgatttgtcgcattaatgaaatcaattccttgttcctttaatgtaggtacatcaggcaaggattcgtgtcgttcctcagaggagatccctaacatcttaagttcaccagattctaagtattctttcgcagctggtacggttgttgctccaagacttacgtgattccctaataatgcggttgtccgttccgacgttccctcataatttacgatattaaatgttgtttcggttgcatcttcaattcctaatggtaatgtatggctagttgaaccaagtgcagctccaaagctaatggattcaggctcctcttttaattgtgaaattacttcatccatgttattccattcgttgtccttatgcgtagcgataatttggttcgcggtagtcataagtgcaacaggctcgaattcttcatgagaaaattccgtatttcctaatagataagataaatcaatcgaatcatgaccggctaatagtgtatatccgtcagcatcactatttaatgcttcattagccccgatggatccaccgccaccacccatgttctttacaacaatactcgtatcaagttcttcttcaagatatttgttaataatccttgctatgacatctgaatctcccccagcactccaaggtacaatcaaattaatgttctctgttggataatcctcagcactttcggatgtagacgagctacagcctgctacaaacaaaccgaaagcaagaactccaactgttgcccatttcttcagcttcattcatatccccctttgtatttttattcaggtcgttatgaattatataattatgcagtctattcgtttggtattcatagaaaaacatttatatattttatattacaactatttataactagaaatggggacgggtaccttgtcccgcgggttgggacatttcaggtgcctgtcactccccgttttttgtcataatatgtcgaaggttagtgaagttcctttcttttatttatcattagatttttatagtaataagtatctagttcttttgtagtgttttggtgataatattagtgtaaatccctatgatattttgtaaatatagtgtaacattcaatgaaaatggggaaatttggattaaatgaaagtgggtttttaaatgtggattgttgttgcagttattataatcgggcttcttctagtgtctatcaaactatataatgagaaaataaaactacaacggcaagtggattatttaaaacctatggtagaaacggttgaaaatgtacgtgatattttatattattgcgaaacaaaacctacattaaattatctttatttaagtccaaccgttaacgatttgatcgggccagaaacattggaagagcacttgcaaaatccagaaaagatctttgaaattgttcatccagaagactatgatacattaatgaagaaaacgttaggacaacttgattttagtgaaccgattaaggtaaggtttcgaaacgatcaaggacaatatatgtggtatgaagaatatgcaacacccgtatatgaaaaaggtgaatacatcgcggtacaagggatttttcgaaatattgatgaaagggtttccttacaccagcaattagaatataaaatctctcatgatgcattaactgatattcataatcgggaatacttccaatcaaagctaaactattttaatcaagactgggacatccctattgcagttattgttgcagacttagatgatttgaaatttattaatgataattatgggcatcacatgggagattgtttcatacaagaagcagcaaatcgattgaagatgtatgctgatgaggaaacgatcgttgctcgtataggtggagatgaatttgcgattctcctagcaaatgctagtattccaaaggtagaacagttcttaaaaaaggttcaagctcaaatgaatctttatcatgatgatacacaactaaaacggattaatatttcaattggttatgcttacagctcatcctctaaaggtgtaatggaacaattgctacgcgaagcagatacgctaatgtatcaagaaaaaagggaaaagaagcagttaatcagtgggggctgaataccattgtaggtgcctgtcacttgtcggaatttggcggaaaatgtcgaaagttgtgcggtgaatgaaaagagaggtatacacctggataggtgtatacctctctatattagtaattttgctgattatctagcgtgttattctctttcttttcgttgtagtattgtataccgaattgggagccttctgagaccatatttgcgttttctaattgcgccaaatcattattactagattgatccggtacacctgcattttcaaatgttttcttcgtcattttatcttgatttgtttttctttttttatcgcttattaaataacttgtagcggtaaccccaacaactccagctatacctaaggcagaaactgcaattttctttttcatgttatacccctctccaagtatcgattgtattaatatatattccctaagataggtttaataaacatggaagaagattaactagagaagaaggtagggtaggtaggactttgtaatgaatcatagtaaaaatcccattaccgcattataaaggttaaaaaagcaatagaataagagacactttctattgctgtatttcaataattaattagcaatggctttaaatggaactatgacttgattaaccaaaataaggtaactgattatattctattacaattaattaaaagtataaatgaaaaataattcagaaaaatattgattgaatgatataaactaatatattgttaacttagctgggaatgttaatggaaatatattgaggtagattaattaaccaatattggaggtggtagtatgagaaagcagcttaaattacaattaaatatatcaaaagataaactaaaagttattataagtttaagtctataagtatatttattcgttaattacaataaaaagatctaaactattattttgtaataaactcttttactaaaagatgatagcacaatagttacaagtgaacatcagcagtaaatttcattttttattaaaccattcccagctttcataaagtactgaataatcatttaagtcatagtcccatcaacttcatagctgtatattgactttgcttaggtacaaagttataataagtgtatctcatagtacagcaatggctttgatgtttctatgataaggctacaacttgtagctcgtggcgttggggatcgcctgcccatcaatgatgggtgtctccccactttacttattataaacacaccagaccttggctataaacaatagctgaggtttttttatagatacatagattaacgtagaataatattgtctaaactaggtaaaaagaaggaggagtagtatgagagaactagattaccgaataggattggatattggaacgaattccgttggttggggagtgattgagcttgaaaagaatgaaagcgacaacaaatataggacaatcgggattgttgattctggggttcgaatgtttgataaagcagagatacctaagacaggtgcatcattagcagaacctcgtcgcttagcgcgttcagcccgaagaagattacgtagacgtagtgaacgaagaagagagattcgaaatctcttaatacagtttaacattgttaccgaagtagaaatggaacacctttacccgttaaatgatggttctgtggatatatgggacattcgtatagatgggctagatcggttattggctaacgatgagtgggctagattgctcattcatcttgcacaaagacgtggatttaaatcaaaccgtaaatccgagcaaaaagacaaggaaacaggtaaagtactaacaagtatccaacaaaataaagaaaggctggataaatatcgtacagtaggggaaatgtggggaaaggatccacattttgcacaatatgataaacgacataattcccgtgatgagtatatttttaatgttagtcgctacgatttggaattggagattgtcacattattcgaaacgcagcgtaaattgggttcttcctatgcatccgaagaactgcaagtttcttatttaaaaatatggaatcatcagttgccgtttgcttcgggaaatgccatcctaaataaagtagggttctgttcacttgaagatgaagagaggcgcattccaaaggcaacgtatacatttcaatactatatggcgcttgataagatcaatcgcattagaattggcaaaaatgtagaagcaatttctatggaacaacggcaaatactactacatagcatttttaacagagatgatttggttaaacgcaaaagcactcctgatgtaaaatattcggacattcgaaagtggttgaaactggatgatgaattaaaatttaatgaccttatgtatgatccagaggcaacacttagtatgaatgaaaaacttccttttgtaaatttgagtgcatactatgaaataaagaaggtaacagattcgcatgctatggatacaggggaagcatatgatacaacggattatgatgcaattggttatgcactgacagtctataagacagacaaagatatccatcaatatttgagaaatcctaataatatagcaaaacgtgtctatagcgaagacctgattcaaatgcttttatctctttcttatacgaagttcggtcatctttcaagcaaggcaattcaaaatctgcttccacttatggaagaaggattaccgtttaaattagcggcagatcagtttggctatgacacgacaggtttacaaaaggtaaaacgtgaaaaatttttaccaccaattccgaatgatattgcaaatccggttgtaaagcgggcactgacacaatcacgtaaaatagttaatgcgataatcaagagatatggctctcccatgtctgtccatattgaattagcaagagagctttctaaaacacatgaagaacggtccaaattgcaaaaaaatcaaaaggcgaactttgatcgaaatgcaggagcaattaaagtgttagcggaaaatggtattctccaaccaaaaggtcatgatattgtaagatacaaattatgggaagagcaagatcataagtgtgcatattcccaaaaaagcattccacctgaagtcttttttggagaattaagaagagaacgtaatagtaccccaaacctagatgtagatcatattttaccatacagcaaaagctttatggacaattatcaaaataaagtgctcgtatatagtgatgaaaatcggaaaaaaggaaatcgcatcccttttgattacttaaaagataatccggaagcttgggagagattcgagatttatgtgaattataataccaagttttcaaaagggaaaaagcaatatcttttgaagaaagagttcacagctcatgaagaagatgtagtaaaagaacggcatttaaatgatactcgttttattagtcggttttttaagaacttcatggaaaagaagcttgagcctaaggatccgcatcttaaaaaatgggtggtaactgtgagtggtcaggtgactgcgcatcttcgtagtcgctttggacttagcaaacaccgggatgaaacacatcttcatcatgcacttgatgctattgtggttgcttgtacagatgatggtatgattaggcgcgtaaccaattaccataaagtaaaagaaagctccaaagcagtaaaggaaccattgtttcctaggccatgggataatttcagagatgaattacttacgcatctcgcagaatcggcgaatccaaaggcaattagtcaggcattggaagctaagatctcccttcctcgttacatgatggtttcacgaatggcgagatactctgtaacaggagcggcgcataaagaaacaattatgatcaatggtggtattgatgaaaaaacaggtaagacaatcgttgtaaaacgtgttccgttagcggagattaaatttgatgaagatggcgatttttcaatggtcaataaagtatctgatctagcaacatatcatgctattaaagaacgttatttggcgtttggcggtaatgttaaggaagcatttaaagaaacgctttataaaccaagtgaaaaaggaaaaggaaatcctattcggcgggtaaaagtagaaatagaaaaaagggctcatgtacgtgaagtgaatcggggcattgcgcaaaatggcaatcttgttcgaatagatatttttctaaaagaagagcaattctacatggtaccgatttatgtgatggatacaagtttacccgaattgcctgatagagttgtcacagctagaaagggctacgaacagtggacaagaatggatgattcatttattttccaatttagcttgtatccttacgatttggtccgtgtgaaaagaggagaagatgatcgctttctttattttaattcgattgacattgactcaaaccggatttattttaaggaaccaaattttccacataaacatactgaaaacagaattggtctaaaaggcattgatattcttgaaaaatataaagttggtattttaggggatattactagagtgaatagagaaacaaggcaggcctttaaaaagaaaaatatgaagcaaacaatctaaaaatacagtaggcagaatttactatgcctactgtatttttctttatagatttggagaaactataggtaaatagtaatagaaggaaaggaggaaagaacgatgagttggcgtcatattatgattagaaagaatgcacaactatcagtcaagcgatcccagttggtaataaagcaagaggatatttttactgttccattacaggatatagcttctattctaatagaagcaccgggagtaacactaactgcaagtctattaagtgaatgtgctgacaaaaaagtaagtttgtttacatgtaatgcacaaaaacttcctaatggtatctggactggtttccaacagcactctagacagcttgcggttttagaaacgcaacttgcactttcaaagccgtttaagaagcgattatggcaacggattattaaacagaaaataataaaccaagcgaaatgcctagatatgatgggaaaggatggaggagatgaattaagaaggttagcaaaggaagtagagtctggtgatatgtctaatagagaagcagtcgctgcaaaattgtattttagaagtttatttggtgtgacttttactcgccgttcgatagatccgatcaatcgtcttttaaactatggttatgctatcataaggggattggttgctagatcccttacaaattatggtttaataccgtgtttaggactttatcatgataaccaattaaatgctttcaacctagcagatgattttatggaagtgcttcgtcctgttgttgattatcatgttgctgaacaagaagatatagaaaaatgggatgcggaaactcgagcaggcttagttaacctggtaaacgcaacgattttaatttcaggtgaaaatcattcgattactgctgcggttgacgaaatggtaaaaagctttgtgtcaagctgccgccagcaggattattcttatttgaaattaccagatttactacctgtaaggatgcataaatatgaataggggtggatatatgcgtatattgctattttttgatttaccggttaaaacgaaaaagcagcgcagagattacacacgcttccggaattatttacttgacgagggctttgatatgatgcaattctctgtttattgtaggctgtgcaatggacatgagtcgatggaaagactactagaaaaagtaaagaaaaatttaccaccaaaaggatcgattcgagcattaccagtaactgaaaaacagtacgaccgtatgcgacttttattaggtaagaaaactgctaatgaggaaagggtaacaattaatcaattgtcattgttttagttcatgaataaaagctgctgaaattggataaaatgataaattttaacgtataaaagttgtttgaaatggagatattatgattagaagatgacgagcgatatttaaaaaatgattaggtagcaggttattaaaaggattaattatgcaaaaaataaacacaaaaaagcctgcggaatattgattctacaggcttttttggttacgtatcatagcacagcaatggcttttatggagctatgacgatacttatcggtatgacgcactcgactgaatcatagcacagcaatggcttttatggagctatgacggctatgcaaaaatggctaggaacgccacaatcatagcacagcaatggcttttatggagctatgacgggcatttttaaggggtgcaactttaattaatcatagcacagcaatggcttttatggagctatgactcacaaggtattcacgtagatatttcgggtatcatagcacagcaatggcttttatggagctatgaccctcgtcttgtccttccagctcctggacttatcatagcacagcaatggcttttatggagctatgacgctcagccctttcctccatttttagtacaaatcatagcacagcaatggcttttatggagctatgacataaagctagaaggttgggctagagatggcatcatagcacagcaatggcttttatggagctatgactctagggattccctttataactgtaattatatcatagcacagcaatggcttttatggagctatgacaccatacccacgcgtacattttatatttttatcatagcacagcaatggcttttatggagctatgacacaaagtgtttacaggcaaattagagcaagatcatagcacagcaatggcttttatggagctgtgacttaattatctgggggatgttgaaaaaattaatcatagcacagcaatggcttttatggagctatgacttcggggaagatgttataaaagaaggaaaaatcatagcacagcaatggcttttatggagctatgacgtatggatgtttcactcatgggaacagataatcatagcacagcaatggcttttatggagctatgactcctatcgttgaagctagttctgcaatggaatcatagcacagcaatggcttttatggagctatgacaatccaaccttacgaatatttgttttacctatcatagcacagcaatggcttttatggagctatgaccaatgatgtccatagaagaatcaatccgtaatcatagcacagcaatggcttttatggagctatgacataagcaagccatcacttgttgttaaagagatcatagcacagcaatggcttttatggagctatgactcagatggagaagcgtattcatcgcatttcatcatagcacagcaatggcttttatagagctatgaccttaagagacagattagaaggataaataaaatcatagcacagcaatggcttttatggagctatgacagaatcgaattaggtatgtttactagatttatcatagcacagcaatgactctgttgtttgttgtactggttgctgcattatcatagcacagcaatggctattatggagctatgactattgagtgagcaaccgcaacaagtaccagatcatagcacagcaatggcttttatggagctatgacattctttctaaaaacctccgtgccaaggatatcatagcacagcaatggctattatggagctatgacagtaatactggcatcttttatttgggctgtatcatagcacagcaatggcttttatggagctatgacggtgaacgtataatccatattcccaaaggaatcatagcacagcaatggcttttatggagctatgactaaactgtttaactggttcgcaatttcattatcatagcacagcaatggctattatggagctatgacctgttctgtggaaaaagaacagactatttttatcatagcacagcaatggcttaagttagcgctgatagcattagtgacgatggtcgtaacttttgtcgtctatctaaacaaacaaaaatagccaccctttcctgccaaagtaaggtgactatttctaacatagttcataaattatgatcttcaacaattggctagtttgtagcaaaatacataactagtgcctatcttcgttattttttatttcttcaaaggaattccttcggctaaaccagtgagcaattaaatacattaaagttaaaacaaaaaaagaatatgttaaagaccaatcgattgttttatgtaaatcaatcaaatccaacaatggaagacctacatatgcaccaagaccaccgaaaacaattgcttttatatatggattgaaatgaggtttatattgtaacaacagcattgcaaatacaggtataacggaaagcctgaatgaaaagcttacagtcgatatgggtataacttttactggatatgaccattttccgaaactaacgccaatcgcatcaaaaatttcagacataatcattatcagtaaaccagcagaaaatatacgagctgaatttttacggtcacgtaatatgagccaaataacccaaggaactatcatcatagctaatgctatccaccattgccaagtaaataagaaagcgttcataaccgattcaatcgttaattgagttgcttcagtaatcttttgtgtcgctttatctatttgatttaatccttcctggtaagtcatgaaatgtccaccttctttgactttggtttctttcgcttataggtttcaccacagtttcttggaatatacatgaagtgtggggacggttctcctgcttcctctcaacacagtatttgcttagaggtttatattgtccgtggtgaagatatcatttttaataggaaaatgaggattttgaagccgaacaaccgaatcactgaagaaattgaatgaaaagagaggtttacacctgtcaagatgtaaacctctctatattataaattttgcttattatgtagtgataatcaaatttgactttgtgaatgttgcacttaaatggagttttcttcaataaccttttagtctttagattggtttaaaataatctttcaattgcttgatctactattccataaataactattgttaatccaataattgagccaaaaaataaataaaatttacctttagtcatagtgatatttttatcattctttttagtattactcatctaataaaccacctttttttattaccaccagcaagtagcaaagtaatcaactccaccggctgcgacaccaccaatcgcacctactccagcacctggtcctgcaccaacgccaccaatagcagcaccaccaacagctccggtgaagcgtggggacggttctcttgcttcattttgaatagtatgacgggcactttgtctgatacaaggtttatgagtagctatgaggaagtcataagttatcttatggaagtgcctgtcaacagaataatagtaagggatacatatgatggtaaattacatgaaagaaatcagtgagttttacaagtatgtacggcaagttccattatcaggttctgccatcactttatggcatgtattaatgcagataaacaatgatgcaaggtggaatgacatgtttactgttccagccgtatcattaaaaccgctgcatggtttaaccgatagtacattcaaacgggcaaggaaggagctagctgataagggctatattatttgaagatcccgttcaaataacctagctccaatctattccatacgaagatttggtaatagtgatttttcggatacaccaaaggaatatagcatggaacaaccgagtggagcaaattccgaaccgccgatgatggatgaattgggtagcaaagtcgcaacaacgcgtgaagctgttgagaagaggctgaggcgcggttggcgggttatttgagtggtgtgtgagtgaatagggtaacaggcatccgccaacaaagaagttgacattccgctgacaatttgtatgattatatcgtactattgtatgtgttatgatagtcctatataaaatcaataatggaggaacaccatgagaaaaacaacagcattcctattcatcataattcctttcttattcatgtttggctgtgatgaaaataaggaaacagcagcaaatgaaatggaagcggaagtaccaacgaaacaagttgtagcggaccgggatgtagaagaagagaaagcggttatcccaaatcttacaaactatgaaacgattcgattagaagagataacggaccaaagagaaattacaatagaatacccacattttaattatgaacccatagataggcttatagaaagtgaaatggaatctgattttgaaaatcaaaagcgtatagcggatgacttaatcgagagtggggatgaggatggattcggaagtttccatttttataatttacgttttgatgaaccgaatataaccaaagattatgtatccattcattttgacgggagaatttctatgggagctcctacaggtcatcctgtagattactcatttaactatgacctcgatgaagatgaactcattacattagaagaaatacttaaggagcatcagactaatttgctagtaatctccgaacaggttgcagatgaaattataaacgatgagaggtttggagagtttcgagatgatccagtatcagataattatatccaactagtaaaagaagaaacagcaccctcaagtgaaaattttcaatcatttacgttagatgaggatggaattacattttttaaaacctattttagtatccttccaaattcagaaggtattgttggtgtaaaagttgattgggataagttagagagtgtaaaggatacgtcacatgagtcctctcaatctcttgattcagaaggcaaatatgtaaacgaagagtacaaatttttattagaaatacctgagtcatgggaaggaaaatatattaccgaaaagggaaattggcatccaactgccatttctagtattgattttcaatttgtaaatgaaggagaaaaggtatccaatatctttagtataaatatttatgataaagatacagatgtcagcccaggtatggaaacgattgttgctgaaggaaatgattatttgtatacgtacaataccgttatggaacttcccttagcgttttatgaagatggagaactatcccatttggaaggcgaattcctaaaaatggttaatgaagacatacctgaaatgatgaatagctttacgttgcagtaagggtgacaggtacctcttcttcattcttttgaaagctagactgagtgtgttggcgacactcagtctgtttttttacaaaaaatatagaacgtacgatctgtaacctaacaatttttgcaaaggtgaaactcaattattagaataaaaatcctctaataattactcatttactcatgacaaagaacgaatatcttcaggcaaaatctccattagaatatcgtaatttgtagcacttatttcaaataaacgtatagattgcagtcggataactctttcgacaatgttacggacataacgcccatttccatctgcatcttgataggtttgttgaataactgtttgtaatgctgttttagcttctgcaccaagtataaagcctttattactgaataaatgaatcgctatggcatacagttcgtcacatgagtaatcgggaaaatggaatatgtttgaaaaacgagattttatcccaggatttgtttgtaataatttgttcatatgctcttcgtatccagccaaaatgacaacaatatcttctttatggtcttccattaatttaataagcgtgttaatcgcttcttcaccaaattggtcattagccaatgtgtatgcttcatcgatgaataatactccaccaagtgcacttttgaatactttttcggtctttaaagctgtttggccaacataagatgcaactaattcagttcgagcaacttctactaaatgtcccttttttaggatatcgatgcttttaaaaagttcagtaattgttctagaaatggtagtctttcctgttcctggatttcctgtaaatataaaatttaatgactggttgcttataaaattactattaaattcttttcttcttttattaatcaattcttgtttttgtaacgttttaattaattccttaatatgatttaatccaatgatgtcatttaaattactatctaaatcaaataccttctcttcttttaacccaaagtcttctaagttgagtatatctatttttgaatttatatcttctgtggcagtacgaacagcttgctttttaatagcattttcaatcgtttgacgtgctaagcgcccatttccactatcggttttaccttttatttgatgcttttgataatattttattagttgtttctgagctgcttcctcgatctgaaaaccacgttctttagcaagtttatgcgatatttctaagagctcttctgtagtataatcattgaataaaaatgtttgtgaaattctagaccgcaaaccagggtttagctcaagcaaatcatcaatttctttggggtaacctgcgaatatgacaacaagttgatttttgtagtcctccattgccttaacaattgtatcaattgcttcacgaccaaagtcattttcaccgcctctggccaatgaataagcttcatcaataaaaagtacaccaccaatggctgctttaattcgattcatcgtttgagctgcagtatgtcctacgtattttccaactaaatcagagcggtctacttctattaaatgaccttcacttaagtagccgattgtctttagatattcagctattaatctggcaactgttgttttaccagtcccagggtttcctgtgaaaacaaagtgtaaagctggcttttctgattgataacctttggataattttctctctcttttctctaggaatatttttaattcctttaaagaatcttttacttcatctaatccaattaattgctcaattctttccttgatagaagatagatttgcatgcgtttgataaacatctaacacgtgatacgaattttctgcatcttttaatgtaatctcattattttcctgtgcaatttcccaggagttagtaaaacctacattattattctcaaggagaatctcgctaaccttttcataaattttattagctagattatttaggtttgctgcacctccataattaaagtaatgtgtaactaagggtgataagttttgaatatgataaagtaagttaatacctaaatttgttctcgctttttcaatataattgtttagcatgtttttaaataatagttgcatattttcattatccaaagcgtctagtgacactttatatgtgaaattggattgactagacgcagtaaatatattcagtgctttttccagttgttcatttgtatgaaataataaatattgatcccttgcttcaattgtattgaagcttccctcaactaacatttggttcacttttactagtattccatcttgatacgtatatcgaccatcaagtggtatataaccgttgcatacaatactatttagaagattgattaaatctaatggacattgatcgacatttttaaaaatcgtaacacgactacttcccataaaagcattgtaaatatctacataaaacatttccaccgcattatcgtgtgcatcatattgtgatagatcaatcgtttgaatttgttctccacttatttgattaaagctataaacatatttaaaaaaggtattaatagtggtgtaaacaccttggctttttggactggaaatgatcatggaatctttatatgtgtgaatatttccagggtttaataatgatttttgcactaactttgataaaaattgtattaatttttcttgtccaattatttctttatttacttcctgttcaatttgttgaaaaatctgtttgtttttttctagtaagctaactgtactatcgatttgttcggatgatgttgattttagcgtatttagtcgttgcttaatttcgggaagtagattcctagactctgtatcatttggttttctaattaaaattttcctacacaattgatatgcatcttggtaagcccctaattgatataattggttaagaattatcttttgggcatccatatcgtgttttactttgctttcctttgacaacgcaataagagcttttattaaactttctttttcaaaatgatccttcgattgggtattaatttgtttcttcaatccatcgattccgtgcgctttatattctaatagaaggtccatttgtatcatcctttttgactatctttaagtttaatcattatgatagggtgttaatatattttcgattaagttcatattgtggaacacggccttttttccatgccaaataacccgctccggccatgaataacatcataatgacattaaagtcctctaacgctgataagaaaataggtatgatgataatgaatagagctaataccttaaaattgttttttgtttttaaggctgagtttgctaaaccaatccacttctggatttcttgtctaagatggttatcatgaacgtattttgatgcttcgataaaatggtctttcccttgtaaagtagcttgtttgtcaataaagtaataaagtga

SEQ ID NO: 394 - DNA, 23216 bp, synthetic construct
  variation 14605..14622: note = n is a, c, g, or t
  variation 7988..7997: note = n is a, c, g, or t
  variation 7784: note = n is a, c, g, or t
  variation 16823: note = n is a, c, g, or t
  source 1..23216: mol_type = other DNA
  misc_feature 1..23216: note = Synthetic
cttatcaatgtatattctatcgcgtacattccttttgcgagcactcttatgaatgtacctggttcgagctgtgtactggtgctaaatacgacacgttttgtttctttgttttcgtttattcctttcaaatcatacgtgaatcttccgttatcgtctttaggttcatcttcatcttgaacttccacataaatatagtcttcggaaatgaatgggttgaatcggtcgaatgtctcgcgaaaaagaacgtaaaggcttcctatgattacaataagaatgagaatggagattatcgcttttttcatatacagatattcctttctataaagcacttttgacaatgcttctgtagtattggatggtgagtgctgcaaagactaagtagatgatgatataggctgccatactaatgataatgggcgtgagcatacttgcagcgatgagaacagaaccgacgtttagagcaaaagcagcgtgaattaagccaattcctaacgggattaaaaaaacaaacagctgtttacggataatgcctttcatgatatcgttcacttgaaatccaagttgtcgcaaagtcttataatgtgttttttcttgttctgcctctgtcatttgtttgaaatataaaatacttcctgttgaaaggataaaaacaaaacctaaaataccagcgatgaaaatgagcaggccgaatgtttgtcgagattcctcgtaagcggtataaaagtcagtgatatacatgtcatcgtctacattcattagaaaaatgctagaggcaatatctgattgttcggtatccaagacatgaaacacatcaaagctcaaagtttctttatattcattttcctgaatgttgtttttcatactttcaaaggtctcatgagaaacaagtaattgttcaccataaaatctgtaattcattacattgtcaagcaaaaattgagagactatcagctgatttgtttcattgtctgatgcgtactgtacgtctttggggaaggaaatgtcgtttccttcgataatggcccgcgtattataatagatggcttcaccaaatggaggactctgaacgtctaagcctgcctccactaactgagtggctgagaaaagcataaaggttctgtgacgattatctgcagttgaatcctgctccacccatgcaccgtcaaatcggatcgcatctagttggtaatgctcaaaatcaatttgttctgcttctaacatgtttgatatgacagtggcttcctcttgcatgttttccacggcaaaatcaaagggcatcgccaatctcacatcgttttcggtcgaatagtataaggaataggaaagtgaaatcatcgtaatcgtcatcgcagataataccgttattaaggttaatgaattggcgtgacctttcattctatgcattaatggtgctatcgaaaggctattatacaagccaagatttccatttttctttttacgaaagacatataagagccagcttatggtcgtatggaagactaaataggttccgagtatggtactgactaggactgctaacatgaggaacatcagtaaatcggcatggtctacgattaaagtagacacataataaccaaatcctattagacctaatcctgtgaaccctaaaatgccgctaacgatacttggacgtttgacaaagtgatcatgttgattatttgcttgaaataattgtaggagtgtacttcgataaaccgtgatcataatttgtaacgatgtcgcagcaatcaggcaagcaaaaacagccatagtctgaataactgcttgaccagaaaaagttagaccaatcatagcttctaatcctataagattcataaacagcaaaagaaaaagtcgtgctagtacagctccaactagcatgccaattaataaagctcctagaccaagaatcgtatgttctaagatgagtactctagcgacccaagccttggataagcctattaattgatacatgcctatttcttgactacgccgtctaatgaaaatgtttgtagcatacatcgtgaacacaatggtaatcagaatgagtaaaattcctgccacttgaaagcttgttgcaaagttcatgctagcttgattcatctcgataatcatcggatcattttgtagagtggaaaagataaaatacaaactgatgctgaaaatcatcgcgaagaaataaaggtaatacattttgatgttttttcgcatactgcggatcactaatttccgtgtgttcatttttggttgcctcctccaagaacggcttgcatatcaagaatatccttaaagaaggcttctctcgttttctctccccggtataattcagaaaaaattcttccatcttttagaaagacgacacggttgcaatagctagaggccaaagggtcatgggtaaccatcacgatagtgacttgccgcgattgattaatgtcatgtaaattttctaataaattggaggctgcttttgaatcaagggcaccagtaggctcatcagcaaatacaagtgatggtgaatgaattaacgctctagctgcagaggttctttgtttctgaccgcccgaaatttcagaagggtacttattcgctagttccttaattcctaacatctctgcgatggcgttaaattcttccaccgcctgacttttacttatttttgttagtgagacaggtaacaatatattttcttttaccgttaatgtatcgagtaaattatagtcctgaaaaatgaatcctaaatgctggcggcgtacattcgaaagctggctgtctttcatgctcgaaatttcatgatcatgtataaaaatttgaccatctgaggcacgatcaattgttgccagcgtatttagaagagtcgttttacctgaacctgaaggtcccatgatacccacaaattcaccttccatgacacgaaggtctataccatttaagactttttgaacatggcccttggaaccataggatttacttacaccttcagcatttaaaatggttttaagtttcttttgattcatcattccgtacactcctatcttgtttgtatacacatagtatagttctgtttcaattctaggtcgtacgctttacatgataaaatgacgtttaatgtgatatttttgtcacctaggcaaataaaaagtaggcagacaatgaataaggcctgactacttttttcgtaattttataacatggatcgtctaatctgttcaaatgaattcgttcgagtaaaactcatggaaacggatgtgccatcacctatagccgaagtaacatgaagttgaatatgtaacttcttgcttatttctcgagcaaggtaaagccccattccggtagcgttatgttgaatgcgtccgttttctcctgtaaagcctcggtcaaaaattcgggggagatcatgtgcttgaataccaggtccctgatctgtcacatttacaaaaacggaatcgttatcatctgaatgaatatgaatgacaattgttccatttgccgggctgtatttaatggcatttgtgagaagttgacgcatgacaaacccgcaccactttttatccgtatatacggtaatttttgtgtttcctgatagctccaccgctagatttttttccatacaccaggtagctagctgacgaatttcttcttttaacaaagcgtctacttctagcttctctggcaacaggtccgcgtctaaagtggctaatcgtgacatataaagctgctggtcaagtaagatatgtaactttagccaattggtttgaagcctttgagctaactcattcgacgggtaagcatcaatggttattttcatcgccgtaagtggcgttttcatttcgtgcacccaggaagcaagatcattatggcccatctgttgagagaagtggtcctcacgacgtttgttttgctcttgctcatcaatggattgaaaaattttatataagtaatggtcaggaaacgattgatttggaggtggtatgctttgaaaccaatcatcgcttaggtcgttaaaaacggtaagcaaagatttataataggcggtttcttttttgtacctccaaacaaaaaaaataatacagactgttaggaacagcccatttaaataaatcattgaaagggactcaacacgaatgcctgcatcaattaggatgagcgtgtttgttaatagaaggagtgtcgccaggagaccgagccaactttttttgtaaactagataatcaatgaccaattttgaccctcctatagtgtaatggacatgtatccaagccctttttttgtgacgattgcatcggctaattgaagagcggaaagcttttggcgtagccgtgtaatgttagcagttaatgtattgtcatttataaattgatcatcatcccaaagtattctcatcaattcgtgacgtgaaacaatctcattatttgattttattaatattgaaagaataaaaaattcatttttagttagttctatcgttgttccatctttatggatttctcctttttttaagtcgatcatcgcttgattccattcaatcacatcagctgaagcttcttcatatgtatacgttctccgtagaatcgccctaattttggcgagaagaacatccatatgaaaaggtttttggacgtaatcgtctgcccctaaattcatggccatcacgatatccatcggatgatctcttgaggagagaaagaggatgggtacttttgaaatagcacgtatttctctgcaccaatggaagccatcaaatttagggagctgtatatcaatgatgactaagtgggggcgatttgctacaaaggcctccataaccaaagaaaaatcgcttggactacttacctgatatgaccactggcttaatccttcatttaacgcctctaaaataagggggtcatcttcaataataaagatattcatgttcaagttgtgtcctccttcctttatgcagatcgattcttccttattaagattaggaatctaaaggttctcaatatgattgttggcgatgtgatgtgaactgggcttcgccatatgggttttgtatgtgtatagtatttatgaggaatattaataggtttaaaggctattttgggcttttggttacatggtagtgagtaacaaaaccgaattttgtcattttatcttaaaatacgagaagcttagtgtttgatggaaggatcattgttaagctctatttcgttagtcaattttacaatacataaaaaggatagcctattcgcaacaaattggtcaagtttgccaacaatacattttataagtgaaggtcgtttcaactactcccaatattgcttagtattgatgtaatccaagcgataaaaagggcgaatgtcttcaacagttatatagctctcctcgaaaaatagaacctacccaaagggaaggttctatgacaagctttaacgttcatggtttgtttggtctttcattgcctcatctacaatttcttcaggcatcgtagattcgaattcctctttcatcacttttaattcttctttggattcttcttgatatggctttccccactctttgtgttttaattctaagcgtagaatatcgtattcactactcagggcttttaacaatgagaccatcattaagatgacaacgaaggtaaaagggaaagcagcgattaacatggccatttctaatgcttgtaacccgcctgaaagtaaaagaacagatgcagtccctgaaagaattaatccccatattaccttgacttttacttgaggatttaatcgtccgcctgttgttagcataccaagcacgaatgtagcggaatcggctgatgtgataaagaatgatgatattaacaaaatagcaattccgagtattaagggactaaatgggtattgctctaagaaagcgaataaggccacttcatttccttggtcaagtatgatttgatataaagctccagaataagcattgtctaaatcaatacctgctattccaaaaatagcaaaccatagggcactaaatactactggaacagccatgacacccaatacaaattctcttattgttcttccacgtgagacacgggcaataaatgtcccgacaaatgtagaccacccaatccaccatgaccagtagaaaagcgtccaatcattgagaaattctctttcccctgtaaatgtattcattcctaaagtcatactaggtaaattctggagatagttacctactgtagtagtaaagccttcaaaaattcgaacaggtgaactaagtgcaaacacaaacagcatgagtgcgacggcaataatgatattagcccagctcaagtaacgaatccctttatctaaaccgctcatggcagataaaataaataatacggtaacaatagcaatgacaatcatagtcatggtcgtattgttttcaaatccattatatgtataacttagaccagctgttatttgtgatgcccccagtcccagtgatgttgcaataccgaaaatcgtgacaaaaacggctaaaatatctacactgaaacctaatgttccattcgttcttttaccaagaataggagttaaagctgagcttattaaagcaggtgcatggtgtctaaatttaaaataagctaatgtcaatgcgacaattgcgtaagttgcccatgggtgaaatccccaatggaataaggtgtaacgcaatgactcttcagcagcagccatagacatcgggttcgctgagggtggattgtgataatgtgttaaaggctcggaaactccgaagaagacaaggccaactcccatacctgctgtaaatagaaaagcaaaccacgtgaagtaactatattctggcttctcatctggccttcctaaacgaatacgaccaaatgggccaactataagaaaaatggctaataatacaaacaaagttgttgcaataatatatacccaaccaaaataacttgctaaaaagctatcaatagtcccgagaacagactctacattggaaggaaataagattccccacaaaataaatatacttgcaattcctaatgaaacccaaaatacaatggataaactgcttttactagttttcatgattgcctcttcagtttaaaaaactcagagttcacacctttcgtctttaaatattttctttcattttctcaactatagtatgacaaaacaccactatattcattcaaacatgtctggtaatttgctcagagtcatctcattatcgaacgctcctttatccaaaagtcaaagggtacattctagaatgaatttaagttgacgtcaacctaaaaagttacacagacatcaggattaatcccacctaaactaccatcaaacgaatggataaactgttttataattaaatgatttgtagtaggtataaggggcttgctcatttgtttatatttcttgagcacctttgtccaagattggggcataaaaaactcgcaaggaatggattttcaattcttccacaaacgcctttatcaacggcttatcgattagagtaaagaatttaggtggcgttaagcctacaaaaataatccaccaaatagctagagaagctttcggtggagtaacttaattgagttatacaataaatttcttaataaaacccgcatggcgaagcctcatacacttcgccaccaacaaatatgaaagtcatctctcgccaacttaacgattaattaagttttgtacagatactgactaaaaccttggaataactacacgaagagaaggttaatgtgaagatacagaggccaaaccttggagtaactgcacaaagagagggttaatgtgaanccaaaccttggagtaactgcacaaagagagggttaatgtgaagatactaaggccaaacctgggagtaactacacgaagagaaggttaatgtgaagatacggagtccaaacctgggagtaactgcacaaagagagggttaatgtgaagatacagaggccaaaccttggagtaactgcacaaagagagggttaatgtgaagatacnnnnnnnnnnccttggagtaactgcacaaagagagggttaatgtgaagatactaaggccaaaccttggagtaactacacaaagagagggttaatgtgaagatacagagtccaaaccttggagtaactgcacaaagagagggttaatgtgaagatacagaggccaaaccttggagtaactgcacaaagagagggttaatgtgaagatacagaggcccatccttggagtaactacacgaagagaaggttaatgtgaagatacggaggccaaaccttggagtaactgcacaaagagagggttaatgtgaagatacagaggccaaaccttggagtaactgcacaaaggccactcttcatggatagcgacgacttcttaacatgttgatacgtttacaactagtcctctccaaatatataagtagggtttcaatctttaaatggtggcttttcattcataaacggttttgagaattcacacactttgccgtagccccgccactttttaggaaagagctcgcaagagctttcctaaaaagattcagcacaccgcacacacagccaccactaaccaaaaaaatgtgtagtattccattaggattagtatctaaaatccaaatgtttttgaatcgttaatgtttgcattagcgattgcgagtttactgcttgctgtgctgtcatttaaccaaaaaaataatccacccttgagttagacggctctcggtggattatttatactaatctgctgaccgccttaattatggaagtcatttattgctagactgttggtgctctaacactagcagtctttattaatgtatgtacactaattgaagtatacatgaagtggaaccttatggcaatggatttaatgtatcgggaacatttttcgttattctaacggattaaatataacaacttcattagcaactcgtcctgatgaaaagggaagcgtgtatgtgtttgaccgtggctacctcgattatgagaattgatcgaacgaccgatgacggttacccttttctctcaagatagggtaataacgttgtggttcgcaaggtagcagccttttctttccctgaacagaccgaggttttatctgatgagatcgtctttcttggcatgacacataatcggacaaaaaatgtcttccgtcttcccaaagtgcttgatacaaaagggatgagcttcatctcgtcacgaatcgttttgatctgaatgcgaatgaaatttctgagatgtacaaatcactttgcgcactcgaacttctcattaaatggctgaaacagcacatcaatatcaagaagttctatggccaaagtggcttgcggtaggattcggtgatttggcttcggaaaatcacttggaaaccgtctcttaagaaggtacttgccgttgttacttttgtttagatgtaaaataattttcaaatggacgaagccgcctttagttctggtcttcctttttttgcttttaaaaaatgtgtgtgccttgttaactgaatgtgtcaatgtttcttaaacgatactaaatgcacttgttaaaggaataaaatagtagaatgagtattataaataaagaatatttcataatcttcaaaagagagtaggtttgaccttttggatacttcattccttttttgtcaatttctacagaaaaaaatatgattttcttcacttccttcacccccttaaggaacaataatttataatttgtttataactattctgtgtctcaagaattaattctttttaattgaaaatgaatatatgaatattttgaaattgttgacatgatttctagatacggttaaaataagattatcatctcacagcaacggaattgatgttgatatgataaggttgcctgattggcaactgtggcgttggggatcgcctgcttactacactcgtagtaagtctccccacttaaaataattgagtcagccccagtgatcgacaggttcgagagttggggctttttattatatataaaataggtgaaaggttgtgggttatttggattacaggattggccttgatattgggacaaattcaattgggtggtcgataattgaactgacgactgtccaatcaaagttagacggaaaataccgactaaaagcagttggccttattgatgctggagtgagaatgtttgaccgtgcggaagtgccgaaaacaggagcttcactagcattacctagaagattagctcgttcttcgaggagaagattgaccaggagatctgcccgaaagaaagcaattagaaacctcctagtaaaagaggatattttaaatcaaatagagttagatcatttatatcgaactagtgaattagtagacatttggcagattcgtgtcgaaggtttggaaagaagattaggtcggcaagagtgggcacgccttttaatacatttaggacaaaagagagggtatcgttcgactaggaaggctgaagaaggtgcggatacagaaggacgtgctgttcttagtagtattaaagaaaatcaagaaacactcaaacaatatcgaacggtcggtgaaatgtgggcaacagacgataaatttaaaggaagagtaagaaattctacaaatgaatttatttttaatgtcagccgtgacaatttagaagaagagattcgatttttatttcagcaacagcgcgagttaggctctatgtacgcgagtaagttattagaagaatcatatatggaggtttgggggcaccaattaccttttgcaagtggagaaagtatcttgaaaaacgtcggtacatgtagtttgtatgagaaggagaaaagggccgctaaagctacttatacattccaatatttcatggctttagacaagttaaataatgtgcgtattttaccaagtatgaggactttaagtgaggaagaacgaggattagctttaaaagcaatgtttgaacgggataagttacctaaaaacccacccaaatttacatacagtcatttaagaaaagcgattaaattagaagaagatgagacgtttcaaacaatctcttatgatgtagaaaaaacgctagcaacaaatgagtcggctgtatttgtgaatctagctgcttattaccaaattaagaaggtttgtgatgagcataatgagaattacgactatgttgattataatacgattgggcatgcattaacggtttataaaacagatgaggatattaataagtacttagctagtaaaaataatatcgcaaaacgagtgtacgcgaatgattttattgactcagtcttaaagcattcttatacgacgtttggtcatttgagtttaaaggcattaagtcggattattcctctcatggaagaaggagaagtgttcgcaaaagcgaaagagaaagcaggttttaaggaagagtcttacctagaaattaagagtaagctcttgactaacataccagacgctattaaaaatccagttgtcatgcgttccctaacacaagcgagaaaagtgataaatgcaatcattaaaagaatgggcgaacagccggcttcgattcaaattgaactagcgcgtgagctttctaaagacgtgtcggagcggaagaaaataacaaatgggtttgcagaaaatagaagtcgaaatcagttcgccataaagacgttagaggaaaatcatataacgaatattagagggcaagatattgttaaatttaaactatggcaagaacagggcggaagatgtgcctattccctcaaaccgataaaattagaagaattaatttcttttctcaaaaaagaacgcagatatgaacataatctagacgtcgatcatattattccatattccaagacatttgacgattcgtatacgaataaagtgcttgtgtttagtgatgagaatcgaaagaaaggggatcaaatccctgctgaatacttggggattggaacgaaaaggtgggaaaagtataaagagttcgtcattacgtccaagttcccggctagtaagaagaagcgattgttaaaagagcagttagtagagcgggaagaattatttatgaaagagcgacacttaaatgatacacgttatgcgagccgttattttatgaactttttacgggaaaacttactgcgcaaagaaactgttcttcatgaaacgcaatgggtgactgctgttgcaggtagagtgacttcccacattagaaaacggttaggttttggaaaagaccgtgaagaaacacatctccaccatgcattagatgcaattattgttgcttgtactgacaaatggatgattgactgtgtaactaattactacaaaagtcgagagggagggagtattaaaagaaaagaaattcgttttccttctccttggaacggtttttggcatgatgtgcaaacgaaactcgcccaattgccacaaccagaagtaattaatgaaagtataagcaaaggaaatcccgatgctgttgattatatgttggtatcaagaatgccgaggaaatcgattacgggagccgctcataaagaaacgatatccaaatggggtggctatgatgacaaaggaaaagccttacttgttaaaaaagtagcattaagtgagttgaagtttaaaaatgatgactttccgatgtataacaaagaaaccgacccactcttgtatgaggcgatcaagaaccgatatgtggaatctggaagggatgtaaaaagggcgtttgcaacccccctttataagccaagtaaatcgggtaagcgaaatgaagtgaagcgtgttaaagtcattgctgaaaagaaggcgatggtaagggaagtaaatgggggtatcgctgagaacgggggccttgtaaggagcgatatattcttaaaggaaaagaagtatgtgatggtgccggtttatacatttgatacgatcaaacaacaattacccaataagtatgtcgtatcaggacgaggttatgagcagtggccagaattgacggcagaacatgtttttcaatttagtgtttatccgtatgagttagtgcatgtaggaacgaataaaggtgacaacagtttctattattttgcttctttaaatatatctagtaatgttttgaaattctcagagtgtaacagacctactaaggattatatagagataggtttaaactcaatcattctattagagaagtatgaaatcgatgttttaggaagaattactggacaaagtaaaaaagggataagacagtcattcaaaaataataaatcccaaatgaaggaataaaaagaaacacctcaaactgttagtgctagttaacaatttggggtgtttttctttgaacatttttgtttaattctaccaacgcatgtctatactgatagtgttaataaataagagaggtgtatgagagatgacctggagacatatcttcattacaaaacctagtaaactatcggtgaaaaacagtcagtttgttataaagcaagaaaatgaagtaagtattccatttcaagacatcgcttcaattaccttagaaaatgaagtcgtaactttaacacaaagtgttctcgcagcttgtgcgcaacatcgaattagtttgattggatgtgatcaaaagaagatgcctgttggaatatttactgccttccatcagcattctaggcaattaaccgttttaacgatgcaacagtctttaagtaaaccattgaaaaagagaatatggcaaacgatcgtgaagcaaaaaataagtaatcaagcggattgtttaatagagttagggaaagatggagcaaggaaacttcaatcgctcgcaaatcaagtagagtcaggtgacaaatctaatagagaagcatacgctgccagagtttatttcttagagttatttggagatgaatttacgaggcgttcaagtgatgaaagaaataaaatattgaattacggatattcaattatgagaagtgccgtagctcgttccttggtcgcttatgggtttacaccatcactgggcatttatcatgatagtcagacgaatgcttttaatttagcggatgactttatggaagtgcttcgacccgttgtggatcggtatgtcgtaagtttaactgagttgtcatggacggtacaaacacgtgcaaatttagtcaatttattaaatacaactgtggcacttaatggggcaaagtatgattgttcagctgctgttgatgaaatgattaaaagttttgtcgctgtttgtagacagcaggatgtaacgtacttaaagctcccaactttatcggatatgtcagaatcagcggatttagtcatatgaggcaatatatgcgaatattattattctttgatctaccaacaaaaacagcaaaaaataaaaaggattacgtgaagttccgaaggttcttgctaaatgatggttatgatatgttgcagtggtcggtttacagcaggatttgcaataatccagaaatggtcacaaagcgagtgagccaattacagaagcatttaccacctaaaggttctgttagagcattatcagtcacagaaaaacaatatgcaaatatgaaaatgatgctaggggaacaaacgacaaacgaaaaaaatattaaagtaaatcaactgactcttttttgaatgacatattaaaaaagtggaaaagctaatacgttcgtataaaannnnnnnnnnnnnnnnnngtagtgagaagcaagtgaatggttttttgaaaaagaataagaagtgtatagaaaaaacaataaataattatattttttatgcatcaaaaaagcccaatcacttgatatattgggcctttttgaatctgtatcatatcacagcaacggaatagatggagatatgactgcccctactcctacaattccaatcattctatcatatcacagcaacggaatagatggagatatgacaaactgtggtataataccactaacctatttatcatatcacagcaacggaatagatggagatatgacatggccgcttttattagctttgtgcaatttatcatatcacagcaacggaatagatggagatatgacgtcgagtcggggggagaaggggaaggtcagatcatatcacagcaacggaatagatggagatatgactaagtcgataagcgttaggatagtgtcatcatcatatcacagcaacggaatagatggagatatgactagatgaagggaattggacatattctcattatcatatcacagcaacggaatagatggagatatgacagcactaccgtgagtctatcgcctattattatcatatcacagcaacggaatagatggagatatgaccgcgaatgggacggcgatatgactgcgaagatcatatcacagcaacggaatagatggagatatgacctgagtttaaatcatcattttgcaaagtaaatcatatcacagcaacggaatagatggagatatgacgagcattcgatagagtttcattctactgagatcatatcacagcaacggaatagatggagatatgactgaaaccataaaacctaagtttaggtcttgatcatatcacagcaacggaatagatggagatatgacgatataatcgttagatacataaggcacttgatcatatcacagcaacggaatagatggagatatgactacagtaacaagaccaaaccgatcatttgaatcatatcacagcaacggaatagatggagatatgacttagatgctgggggtgaaggtggaggctttatcatatcacagcaacggaatagatggagatatgacctaagagggcaactgattcagatgcctcgaatcatatcacagcaacggaatagatggagatatgactgtatgccagtatattaaaatgatggccatatcatatcacagcaacggaatagatggagatatgacaactgagggagcgactcgccaacagcaagatcatttcacagcaacggaatggatggagatatgaccctctgtggatggctacggaccacggtttaatcatatcacagcaacggaatggatggagatatgactatctctgcttctgtcgcccgaaaagtcttatcatatcacagcaacggaatggatggagatatgaccctacggagacgaccagagaaatggaattgatcatatcacagcaacggaatagatgtagatatgacagttcggggcagatggtgattttggggctgatcatatcacagcaacggaatagatggagatatgacgacgtccgtatcatggcattacacagttgaatcatatcacagcaacggaatggatggagatatgacaacaagtgcatcttttattaatgtacatatatcttattatagtatatgagtgatgaagatatgacttttgtcagtattattgagaaagattgatggagtaagtgaacgagtgcaatatgattattcgtttttttagaagctattttctttaaaattaatttctgatagcttttatgctgacatttgaaaatctacttctattcgtttttaaatttttaaaattccattatataaggattcttctaaggtaatgaaaatttcctcacttgcttccttttctaaagggttaaatataatataaaacttgaagggttaaagttagaaagagtgactggttataggacagtctcagtggagacctcttataacacaaattatatactattttcctagaagttatagtctctttgtatataacatagaagtttaataattatatgagagctttgttagtcacgtaaaaacaatatgcataaatgaaatgatacttgggaaaacaaacaaaaaaatataaaagtaaatcaactgactcttttttgaatgacatattaaaaaagtggaaaagctaatacgttcgtataaaangtagtgagaagcaagtgaatggttttttgaaaaagaataagaagtgtatagaaaaaacaataaataattattttttttatgcatcaaaaaagcccaatcacttgatatattgggcttttttgaaagtgtatcatatcacagcaacggaatggatggagatatgacttctagaggaataaatataggacaatatttatcatatcacagcaacggaatggatggagatatgacgccaccagatgattatccttatccgatcgaatcatatcacagcaacggaatggatggagatatgaccgaattacttagaatctttttaggagttgacatcatatcacagcaacggaatggatggagatatgacatatgcttcttagttcattttcagttttctatcatatcacagcaacggaatggatggagatatgacaccgtgtgatatgggataatgtctcttcgcatcatatcacagcaacggaatggatggagatatgacatcggctatcaaggtaaacaaattaatttaatcatatcacagcaacggaatggatggagatatgactagttcattgagtttaaatactagtttcttatcatatcacagcaacggaatggatggagatatgactattataaagcaattagcaggaagagtaagatcatatcacagcaacggaatggatggagatatgacagacggcgatgtggattaataagttaatgtatcatatcacagcaacggaatggatggagatatgacacttgacgaacaggaacttgtagaaattgaatcatatcacagcaacggaatggatggagatatgacctctctgtttcaaatggtgggtcaacgattatcatatcacagcaacggaatggatggagatatgactggtactggggggacgttgtacacatacaaatcatatcacagcaacggaatggatggagatatgacacttgacgaacaggaacttgtagaaattgaatcatatcacagcaacggaatggatggagatatgacatttcaacgcgatactctcctcggtcagttatcatatcacagcaacggaatggatggagatatgaccttccgttgagaccacatcccatcacatcatcttttcatttgtctagtaataaaacaacttcactagcaactcgtcctggtggggatgacatttcttcatttccttcccaaatgacccgtacacgatcttcgacttttacgtgctctagatttctggcagcgagagaataataggcaatttcatggtctgaattttggtcagctagttctaataattgccttgatgtggatgattttgcttcttctgatgaaatatgtgacatgacaagtattctctgcgttgtttcggtttcagtgttgcttttttctataataattccgacatgtgtataatggtcatctttaatcgtgagtatgtcaactttttcagcactacgttgtggtggtgcggagtcttcttgggagtggccatcccagtggacttgaacgtaatctccaacttttaaattttttactttttcttttgaaagattgtacaaagaactatcgtagtggtaggaaagctcataaatctcctcctgtgtgaaagtctcaatatcctccattaaaatatttgagataacaagaatttgataacgagattctgatttaatgattgatgcgataagcccttcatgaatggctccatctgagttatcggcctgttgcgcatcttcatcagaggttgagcagcttgtcatgattaaaagagttaataacagaatcaaatatctcattatatacgctccttctaatcgtttatgaattttttaatatccaagatagcttgaatatgcatgccttcatgaaaaatggtgcgacttaaaacttgctcaatcgtaaacatacccatttcgactggtgggtattctgtttctaaatgttcgccgtatgtcttatggatggttgctatttgtgactggagtaattcagtgatctcgttaaatgatggggtttcttccgtgaaattctctggtgtagtgccaaagccgaaccatttgttcagtgattggatctctggtttttgttctttggttaaggtatgaatccataaaaattggtctaaataaatatggccgagattccagtggatgttgtttcggaatccattggggataagggctgcttgttcttcggtaatgtcgttgactaaataaagtaaatatccgcggtaatcgtttagttgattgagtaagatttcatgtcttggtttcattgttgacctcctgtattaaatacgttttttattaaagttacttggatggtgctcatttctcgagataatttggcctttctgtctttgtttatggtccgtttttgaaaatcgaaatgacctcacagacgaatgaattcgtctgaaggttcatttcgattttcaaaacttcacgcaggcgcgtgaagtagccaagcgagcttggctaacggtccaaaaacacttgtatgttagatactaatcctgctgggttacgactctctcatttttgggtggtggctatttgagcggtgcactgaacctttttggggcagctctttcgaacttccctaagaagtggcggggttacggcaaagtgtgagaatcctcaaagccgttattgaatgaaaagccaccagttaatggctttataagattagtgatgagagttgcttacacttaatttctaatgattgatagtcattggttttagtgcctattcgatgaatcttgaagaatcgttctgtttcttttagtaccgttagtaggaactcatttttaggtaaaagaaagtgttcatgttttttttcttcgtaaaatgattcgtaggtaatctgaaaggtgacttcatttttatcaagagtgagttcatactgttgaaacataaacccgttttttacatgaccggtttgaataagttggtagattaagtcagtaaagaaaagccaaaaattatttaaggtatcagtgtcatgatggtcattgataatgaccgtatctcctgattttattaatacatagccataatatacatctgtatgggtagtgagatgttgataaatccgatgtctttgttgttaatcttttgaagatgtataaataggtggtgggttaatggtattcatatcgtcattaacattataaaatgtttccactgttatcacaaaatacgctcccttcaatcgtaatgaaacgattagttcgggtaatccgtttcattagtggaatattcttattatttatcttattatgcgtatgtcgatagagcaagcaaataccgtacgcaagcagatttttatcaaaatcatatttgaggagtggatttatatatgaagaaaattttctcgtcattctcatcatttttgttatgggccttattttaatgatgaccggttcaaaaattattacttcaaaaccaaattggaatatgtagaatacgagacggatgaggttgtgattagttggagacaagaagatgatatctctgaaataaggaaaattgtatcaacggtgaatcgaggagtggagattaggggagcgatagattcggaaccgtcttattacttacgtatccaagagaatagtagcttagcatatatcgtttatgtaggggtaagtaaggaaagcgatggatatggagcgttgatcgttcatgaagacgatacctcaatcggttaccaactaaatactaatcgaacagaagcgttaagagaaatcttatttcagggagactaatatttatagccatgacttctctattattatggtaatataaagaagaacttgacaataagaggaaaatgttggatggtatacactaaatattatgatgaagctcgtggtatttacacgacttcagtgtgaaattataggaaatgcacattacgcaccagattcattccgctacttgcaaagatgtaagtacagcacttggctctttgacactttaacaggtggcttttaaattaatttggctttgtatggaaagtatacgaaccaaagagcctgcatgaaaaaggcggagcgtgagcaacgccttgacatgtcgatgaaggaagatggtcgacatgatcttgggccaaaaaggacgagaacatgtcgatgaaggcggttggtcgacatgatcttggacaaaaaaggacgagaacatgtcgatgaaggaagttggtcgacatgatcttggacaaaaaagggcgagaacatgtcgatgaaggcggttggtcgacatgatcataggccaaaaaggacaagatcatgtcgatgaaggcggttggtcgacatgatcataggtcaaaaaggacaagaacatgtcgatgaaggaagttattcaacggaactgagaaccagctaacttccaggcacagcctatcgcccctaagtaaatttcatccaaaaggagggaaacaaatgcaacttacaatgaaagccacaggagagcatgttgaggttctctcctatttattggccaaaaatccgtacaacctctatgagcgtaaagtaaatggacatcttgttcgaatgatttttcgccacttcacaaaggagcatgtcgaggttactctttttgtgacagctgacccaatcgaattatcgcgtgaaaacgcacaagcctatgacatcacttcttatatcaatgatcgagaatttgcggtaagtagtattttccttacgctcctacgttccgcactaggtactgccttaaatggaaaaccaaaggaagaatataaggattgggttgagcatgtatttaatcttgagtttgaatttggaccagttgcttctaatctaggagacaagcagattcgtaagttatttgagccgcttggttatacggtagaaatgaagagccctgagttaggaactcttcgtcgttttaaagataaaagcacggcacgtatgatttcgattaaaggggagaccacgcttcaacgtggacttagacagctatttgtcttgatccctgtaatagataattataagcattatttcattgatgaaaaggaagttgaaaagataaatcgatatggtgagggctggctggattaccatccagaaagaagctttattttagaaaaagctttaaggttcaaagcagtatacgaacagctcgaacatttggagcaagaacctaagtcagaagaattaggcacgctcataaaacacaaagcggaagacaaaaaaatcagtttaaatgaattaagatatgaaaaaattattgagtatgtggagcgtattcctagaaaaacatcaattgttgattttggttcaggagaaggtaagctttctgtgaaattaggatttgttcaagggatacaggagattttagctgtagaaccttcggaacaagcaacgaatcaagccataaagaggtttgaaaaagtgtctgaccgagaaggttttttaatgccgacaccacttagaagctcgttgttttatttcgatgatcgtttaaaaaacaaagatattctcattttatgcgaagtcattgagcatatagatgagtaccgtttgcctaaaatgatgaatacgattatttcgcactatcagccaaaatcattcattataacaacacccaaccaagaatataatcaagtctacgatttaggagaaaactatcgtcatcctgaccatcgttttgaatggacaagagagcaatttaaagactggtgtcatttacataatgatgggaattatgacttgcaatttgatgggatcggcgatcagcatgactcatttggctatcctacacaactttgcttatggacaagaaaggagggcaactagatggacattatcttgccaacggctggactggttctctgtattggtccttctaatagtggtaaatcaacttggctacaaacactggtgaatgaaggggaaattaaacgttcggaagttgttagttcggatgattttcgtgagctagtgagtgatgaggtatttattgattggacgaatcgttctaaagatgaagcggatattttaatgaatcaatatcagcaaatatcgcaagaagcttttgcgatgttggaccgtgtagttgagacaagagctaaactaaataaattaacgttcattgatgcgacacacttacatccagatgatcgagcgaggtatcgcaagcttgccgagaaacagcatgttccgatttttgctctagtgtttgacacggaagaggatgtattattacagcgtgaccagcaacgtgagaacccgcgtggaaaaagacgaattaagcagcaatatcaaacatttaaacgagagaaacgttatttgaaaaaagaagattatcatcgaatctatgtgcttaaggaaacggcagttccaagaattattcgtcaagcatcgt

SEQ ID NO: 395 - DNA, 23210 bp, synthetic construct
  source 1..23210: mol_type = other DNA
  misc_feature 1..23210: note = Synthetic
taattgttggaattatctaaagaaacgaaaaaattgttaggctttctatcaaaaccaatggtgggatgaagagaagaagatgaagatgcaggtgaaaaggtgaggatgaagagcccatcagagtagggtttgagcatggtaaggatgcagtagctatcggatgaaagcttctttttttcgaaggaaggtcaagacaggagtgttgtcagatctgatgacgggaaaatttaataaacgattccgacctcgaaggggggaggaaggggaaacagaatagaatggccacacacaaacggccatctctgctgttatatgccctataaagagggaaaacatgtccattaacattttgaaaatccatcaattgggcaaaataacggtcttcatggccgaaacaaaaaactgcggcgtgcggccacgccgccacatcgccgcacgatcgcccattacaatttcggccagtcttcctgctgataagccgcttcccagaacagatattcatagtggctggtggtcaaaaagatttcttcatagcgctgcatgtcagcttctggtttcccttccatcgaacggtccagcaattcaatcgtccaattggctagctcttcaaattcttcgccggcatacatttttacccattcgccgtaaaatggatggttcaccgaatctgggtattgggctgcgagtcgcttgccgatctcatgatagccccatgagcacggaacgagactggccatgagctcagcgaggctgccgttatgcgcggcgtgaagcatatagtgcgtgtacgccaccgtagtaggagcgggcttggctgcggccaactcttcaggagtaatgccaaactgagcggcgtactcacggtggagatccatctcggtattgagcgtaccgtcgagcaggttggcaaactggctcatagtcgcctcatcttgtgcttttgtcacaccaaaggcaaataatttggcgtattcaattaaatacaggtagtcctggaccatgaagtagcggaatttgctttggtcgagggtaccctggccgatctcctgcacgaatgggtgctcgaacgattttgtccagatggcttcggctttttggtataggcgttcggatggtttcatacgttgctcctccttttaatggaggggtgcgcggaccctaaaaaaagcacttccataaatgggaagcgccggataggtatagtccctaagtagtcggtcgtcacttcccttcgctagtgttaactagtggcaggttcaaagggtcgaagaacaagttcttctctcagccgcgcggcacccctagtgaataatgatctagttccttttcactgtagcaaatgaggagatggaaggcaagcgatatcctgaaaattaagagttggctgaatattgtaagggctcagtacccgcgttattaggagatgtagctcaccttaatgaacggcagatctagagaaatactgataaatttgttttttcttctacaaaacggggaagtctatctgtagaaatttctacttatatggccactgtctagcgaaaaatggcagtgaaccataatttagataaaggagttgaagctggtgagagtacaacaaccggtcccgcaagccgatggtattgataacactatggctttaatgaaagaaggatttcattttattcccaggcgccgggaagaactgcagtccgatatttttgaaacgcggatcatgggccaaaaaacggtctgcatgggaggagaagaagcggcagaagtgttttatgacaatgaacgttttaaacgaaaaggtgctgcgcccttgccgctgaaaagtgcattgctcggccacggagcggtacacggtttggacggcgaagaacataaacaacgaaagcgcatgtttctttccatgatgacacctgagcgcattgaggacatgaaagaaatagccgttgaagagctggacaagaaagtgagcgaatgggaaggcaaaaacagggtcgtgctgttggatgaaatgctggaactgatggcgcgtacgggcatgcgctgggccggggtcccgtttgaagaggacgaaatcaaccgacgtacgcaggagcttactgaaatggtggattctttcggttctgctaaacgtctccatcgtggctctaaagcacgggacagccacgaaaaatggctgaaagacttgattaaaaacatccgcaaaggcaaggtgaatgccccggcctatacaccagcttatatagtggcgcaccaccgtgagccaaatggcaaattgcttgaccctgatgtagcagcggtcgaattaagcaatgccttccgtccattaatggcaacagcatacttcattgtatttggcgtggttgcgcttcatgaacatcctgagaccaatgacaagctgaaaagggatgagaacaattacagccagatgtttacgcaggaagtgcgccgctattatccgtttgccccggcgatggcggccaaagtgaaaaagaacttcacctggcagaattataaattcaaaaagaacatgctggtcgtattagacttgttcggcacaaaccgccatcctgatgcttgggaaaacccaggcgagtttcgcccagaacggtttaaaaactggaagggaagcccgttcgcatttgttccgcagggcggcggcgaccaccatacaggacaccgctgtgccggcgagtggacgacggtgatggttatgcgctcgtactttaagtatttaactgaaaacgtttcgttctcggtccccgaccaggacttaagctacgacttaacgcgcatgcctacgatgccgaaaagtggcgtcgtgatcagcgatgtgaagaagaaacgggaatcagccgataacattgctcaggaagaagcgagccagacggtaataaaatcgtaaagcgtgtgtaaacgaagccggtccaaccgagggccggcttttgcttatgtgtactggccataaagctgttacgtatttggaatggtatgtaaatcatgtggaatgttacgtatttgtggcgcaaggcttttttagtagtggagaacacgtatggaaacgcatgcttgctcaaataataaacgcgactggtaaaagcttaaataaacattaaaaaggtttatccatacattattcaagttaaatcactaaacgccgcgtagccgagatgcttttttagtggagattgcgataaaaagaaggagggaacgaatggaatggaaatatttatactgtttaccgtgttgtggctcggaatgctgttatggatgacctccagaatggaaaagccggatgaatggtatttcccgagtgtaaggctcagtgattatccgagtccctgggtggaaaaacaagcagagccagttccagtgcatgacgataaaaggatcaaccgccagattaatcaagaaataggtgaagaattaacgccgtttcgcgccaatgtagatgagattcaaacggcaatgggcgaggtggaagcacatcttttgcagcaaaatttcaacccgaattcctaccagctaaaagagctgtcccaagaacttacttttcttatgaagcagtatgaaacagaaaaaaagcaagcccttcagcatgcgcatcacgcgcttcaacatgtgctgcaaaccttgcagactgcggaacagtcactgtataccttggatgaggtgcagcagcaaaaagcaaaaattacacaagcacaagattttttatatcagcattatacggttgacattcccccgtttttcttccaacaggatactaatagatagcttcactaatactccccagaacaaaaaagcccctcaccaatttagtgagtgggcatccactttctcaattcaggaaaaaggagaatctgctaataaaggcaaagcaaagagagctttcttcctctcatgtttctttgaggatgaaaaccctcttttcggcagctagttgggttaacctgtaacccattgtggtgaccaaagagctgcttgctaatcagtacccgctgtataaaaatctaaacctatttctttaacaaatttggtagatggataaaagttagaggaacagaaccaagattcacctatgataaactagaagagacagagcgtttcgacgagacatgggccacgcgctcttttttgttgcgctcgtagaaccatttggagaaaggagaccgtaaatgagcagcttatggattgatataatcttgattgtcatcatattagtaattgtgacagccgttattatggggaccatttctacatttaagtattacaacgttaagcggcgcgagcttgagggagaggcgcaaaaggcagaagcgccaaaggaacatgaggagcaagatgaagagagaaatgaaccttccgaagaagagcggaagaaatagagccacgagatagggagtagggcgttagtatttttaactcatgggagccaccattattgtaactattctggggggtaggtgacattgttcggtatactatgctggttctgatttgctcagtttgggtaagattcagactgcactgcagaaaattaaagaagcaagtgagcgtgctgctgaatagaacgaaataaagggggaaggctgcaatgaaggcggatgatgacagacggcaaaacgcagagcaggtgctgacagagctgaacctagaggaagtacttagaccttacagccctactttttgtgggactattccaattgggttggctaccgatgactctgatatagatatcataatgcaggtggaagaagaggatttccctgcagtagaaaaacagctgcggacctgctttgcagcgaatcctggcttccgtcttaaacgatcgtttaaaaaaggtcagcctgtactaaagggagcgtttacgtaccagggatttgacatagagatttttgctcaacccgtcccgatagaagcacagcatgcatatgtacatatggtaatagaaagaaaactgctagaagaaaaccctggcctgcgcgaaccggtcctggccttaaagcggcagggctataaaaccgaacccgctttccagtacgtattaggcttagaaggcgatccgtatgaagcgctgatagaatacgggcaaaagcgcggatgggtgtaagagggctgttggaggtagagagcggacggcgtataggaagaacacataacattagcttacatttacgtaacattggggtgtgtgagtggaaggcggtccctctcgattcatccgctaagcagtccactctcaaagccgcctccgcttttctttcccaaaaaaggtgttgacgcatttgagagggtatgcttgaatgaaattataccaattacatacgcaccgaccactgggggagcctgtttggctgagagagacgcggtctcgaccctttgaacctgatctagttcatactagcggagggaagtgggggcagttcgcgctaatcagtacataactggcgttgatagatgcacccgcttcggactccgaggcgggttttttgcgtggttggctgtgaaaggagaggatgcggatgtcgattaaagagcggctgcttgcggaggtgcgtgagcgggaaacggagtggctggagctggtggaggagttgatccgttttgaaacgccgagtccgccggcgaggaatacggaggaaattcagaattatgtggcaggtcaacttcgggcggccggctgttcgatcgacgagtgggagctttatcccggcgacaaggtggtggttggcacgaagcggggtacgcggtcggaatcggcgcggcggctgattttgaatggccatgtggacgtggcgcaggtggaagaagatgagccgtgggtccggccgccgtttgatccggtgacagaagacggctacgtgtacgggcgcggcgcttcggatatgaaaggcggcgtggccggcatgctgtttgcgatgaagctgctgcaggagcacggcatcgagctgcccggcgatgtctacgtgcagtcggtgactggcgaggaagtgggtgaagcggggacgaagtcgtgctgcgaacgcggctatgaggccgactttgcgctggtgactgattcgagcgatttgcagattcaagggcagggcggcgtggtgaccggctgggtgacggtgaaaagtaaggaaacgttccatgacgcgcagcgccggcagatgattcatgcaggcggcggagtgcatggtgcgagtgctgtggaaaaaatggcaaaggtggtccagagtctgcaagaactcgaacagcattggagcgtgatgaagagttaccccggctttccacacggaacaacgacgatcaatccagccgtcatcgaaggcggtaggcatgcagcttttatcgccgacgaatgccacttgtggatcacggtgcattattacccgaatgagcaccacgatgaggtggtccgtgagatcgaggactatttgaacgcgctggccgcggcggatccgtggcttcgcgataacccgcttcaatttaagtggggcggcgaatcgatgatcgaagaccgcggcgaagtgtttccgccgcttgccattgacgaggagtggccaggcgtccaagtgttggagcgggctcatgcggcggtgcacggggagtcagcggtcaagtcaatgtcccagacggtcaccgacggcggctggttcagcgacgcaggcatcccgtccgtgatttacgggccgggtaacctggaaaacgcacatgcagtgaatgagcgggtatcagtcgatcagctgcgccgctacattgagacattagtgtgcttcctgctggactggggcgaagtggaatgaagaataaatttggcagaacgatgtcagcgtggcgcacgtggcgggaaaaaatcgcgggccggtgcgctccgcccgtggaggcggcgacggcgcactcgtggggcgcgactcggcatacaagtcccgtgacgccacacctaagcagcgtcatgccacaacaaatgagggtctcgccacaaccgagcagagtgacgccacaacaaatgagcgtcacaccacaacccagcggagtgacgccacaacaaagcgggttcactccacaagaaagcagagtcacgccacaacccgggggcgtgactgcgcaaccggccgatcacgcggcgccacccagctcatctcccgctccggtgttagcgctcgaccaggtggctttccgctataacgcgcacgaatcacgtgttttggaggatgtgtcgctccacgtcaaaccgggtgaaatcgtcgtactgcttggtccgagcgggtcggggaaaagtacgattttccgcttgctctctcaactagaccatccggaatccgggatggtaacaacaccggagaaaatcgggcttatgccgcaggatgaccttcttctaccgtggcggacggtgcttgagcaaggggcgcttccgctggaaattcaaggcatgaaaggaaaggacgcgcgccggcgcgtcctcgcccgactgccggcatttggcctggaagaagtggcggataagtatccggaggcgctttccggcgggatgaagcagcgggtgtcgctccttcgcgcaacgatggccggggagaagacgctgcttctcgatgagccgtttagtaagctcgatgcgttgacaagggtttcgatgcaggagtggctactcgaaatgtgggagaaaacggggctcaccatattgtttattacgcatgatttagatgaggccttgctgttggcgaaccgggtgctgttatttccggaagcaccgctttcaaacccgcttgagacgaaggttccactcggccgtccgcgcagcgcggaagatattacaaagccggccgcacaagaaataaaacgtgagtggctgcggcagttaaggggggatataaggtgagcctggatgaccgagtgactgatcagtctgctcaatcaacaactggagatcagcaacctgaacaaagcttccaacaagaacaaacagaaccatccaacgcggctcctgctccgcctgctcaggcgcctgaggaggagaaaaaaacctcgcgtctccgacctttgcttgccccggccgcgctctttgcagtctttctgctcctctggaccgggattgcctggtggtatgatcagcctttcattctaccgacgccgtgggatgtggttctccgcttcggcgagctctatgaagcgctgctgtttgtccacttgccggcaaccttgatcgttgtgctgattggccttgccatttccatcattctcggttggctgacagcccttgcgatgaccggggtgccggctctggagcgcgcggtctttccattgcttgtcgcctcgcagacgataccgatcattacgcttgcgccgatttttgtgctctggtttggctacagcgtcaccagcaaagtcgtggtaactgttttgattacgttttttcccattacggtgaatacgttcgacggccttcggtccacaagaagcgacctgcttgacttgacgcgaaccatgggcgcgtcgcctctccaacggctggtgaaggtgcagcttccgtccgctctaccgtctttcttttccggactgaaagtggctgtcaccctggctgtgatcggggcggcgattgcggaatggctaggagcggatcgcggattggggtatttctcgcgccggatgatgacgcagtttgacggcgcgggcgtgtttgcgccgattgtgctgctgtcgctatcggggattgtgttgtttttgctagtaaaagtggcggaacggctggttgtacggccgccgcgcaaataataaggaggaatcattatgtggaaaaaaggaataggcatcgctttaagtctcgccgtgctaagtgcatgcggcgcggaagaaacagaaggtgacgaggcggatgagctgtcgctgatgctggactggtatccaaacgcggtacatagctatttgtacgcggcgcaggaggaaggattttttgaggaggaaaatatagaattagacattcagtttccggccaatccgaccgacccgattaatttgaccggggcgggcgaagtggatatggcgatgtcgtatgagccgacggtgctgatgagccgggacgaagggcttccggtcgtctccattgccacgatcgtgcagtcgcccttaaatcacataatgtccttggaagaaagcgggattgatgaaccggccgatttggaagggaaaacgattggatatccgggcgggccgacgaatgagccaattgtggagcgcgtgctggccgaagccgacttgacgatggatgatatcaccttaacagacgtaggctttgacattggcccggcgctcgtttctggaaatgtcgatgcgatcgtaggggcttatattaatcatgaatatccgttgcttgagcaggaaggtcatgacatttcctacatgaatccgggggataaaggtgtgccgaactatgatgaactcgtgctgatcgcaaatgaaaatgaaattgctgaaaaggaggaagtgttcgagcgcttttgggcagcagcatcgcgcggttatgaagtcgttcgtgatgacccggaatacggcttggatctgttatttcagcacgaagaagaagaggaatttccgttaaatgaagaagtcgaagaagagagtatggagattttgctggaacgcatggagactcaggagcgcgcgttcggcgagacctcgctggaagaaagtgaaagcgtcgtcgactgggtttatgaagccggcctggtagaagaacgccccgacgtcgaagacgccttgtggccggtgggggaatagaatttatcaccaaattatttttcttttgacaactttaaacatttaatgtaatataaaggtatcatattacagcaatggattagatgttgatatgataaggttgcttgaaagcagccgtggcgttggggatcgcctgctcactttaaaggtgagtgtctccccacttacataaggctttacaagaccccagtgatcgacgttaatcgactactggggtttttttattaaattaaggagatgaaacattatgagtgacacgatagactataggatcggtcttgatatcggaacgaattctgtaggctggtctatagtagaattagagttcaatggtgaacaatacgaaacggttaatttgattgatgcaggagttcgtatgtttgataaggctgaagttccaaagacaggagcgtccctcgcttttccgaggcgtcttgcacggagtactcgacgtcgcttgaaaagacgagctaaccgaaaaaaggccatacgtaatttgttaattaatcaagatgtagttaatgaaaaagaattagaaaaactctttcaatcacctacattaattgatgtgtggtctttgcgagttgaagctttggaccggcttttaggacgggaagaatgggctcgccttttaatccaccttgcccaaaaacgaggttataagtctaatcgtaaagcagaagaatctacgaaagaaggaaaagtggttttatcatctattaatgaaaatactgaacggttaaaaaggtatcgaaccgtgggggaaatgtgggttgaagatcctcattttgaaggtcgatttcataaccaagaaaatgaatacaaatttaatgtaacaagacatcaattagaagaggaaattcgtttcctgtttaaacagcaaagagaattaaattctccatatgccagcaatgagttagaagagcattatttaaacatatggggacatcagttaccctttacgagtggaaattcaatactaaataaagtagggcaatgttcattattggagaatgaaaaacggtttccaaaagctacatatacgtttcaatattttatggtgctagataagttgaaccgtattcgccttaaaccctctgtaagaaaactgacacaggaagagcgttctcatgtcataaacagtttgtttaatcggtcaaatataaaaaagaccccgccaaaagtgaagtataaggatattcgcaagataatagagatagcggaggaagaaacatttcatgacgttgtatatgatactgagaaatcaataactaaaaatgaagatattccgtttgttaatctggattcttattataaaataaaaaaagtttgtgatgagcataaagaggaatatggccctgctgattatgatgctgtcgggtacgctttaaccgtttataagacagaccatgacatcaggctatatttaagaaacccagagaatcttgccaaacgtgtctttgaagaaaagtttattcaaactttgttactacaatcatattcgacctttggacatttaagccagaaagggattcaagctattcttccgtttatggaagaaggaatgacctatattgaagcggctcaacaagcaggatttaatacgacaggctttaagaaagaaggcaaatctaagtttttaaaagtgattcctgatgatattcgaaatcctgtggttatgcgctcgcttactcaatcgaggaaagtagtaaatgcaattattaaagagatggaggagcaaccacaatctattcatgtagaattagcgagagagttatcaaaagataatgatgagcggaaaaagatatcaaatcagtatgaaaaaaatcggaaacgaaatgagggagccgtaaaaattcttagtgaaaatggcattcttaatccaacaggccatgatattgttaaatataagctatggtctgaacaaagaggccactgtatgtattcattgaaacctatcccagcagaggaattttttgcagaattaaaagcagaacgaaatcgggctcccatgttagatgttgatcacatcattccttattctaaatcatttgatgattcatacagcaataaagttttggtctatagtgaccaaaatcgtattaaaggagaccgtttacctgttgaatattttgatggagacattgatagatggaatgaatttataggatttgtaaattcatgtgacttttctaagagaaaaagaactaatttgacaaaaaagagattgaatgaagaagaagaacagttaataaaagaacgtcatttaaatgataccaggtatgccagccgttattttaaaaattatttagaagaacatttgaagtttaaagtctctgaaaaaaagaaagacaaaaaaagagttgaaacggttgctggaaaaatcacttctcatttaagaaaaaggtggggcctagtaaaacatcgacaagatactcatcttcaccatgcccttgatgcggtagttgtcgcttgtactgatacaaaaattattcaagacgtgatacgttattaccgtttaaaagaagagagtagagcagagtctaatatttacttccccttgccttggaaaacatttcgaaatgacatcttgcacaggttgtcgttagttgctgtgcccgaacaggttaaagaagcactcgagggtgatcaagaacaaacagagtatatgctcgtttcaagaatgccaaggcgttctataactggagcggttcataaagaaacgatttctacttttggcggatatgatgaaaaaggaaaagtactaatggtacaaaaagttcctcttaatgagattaagtttgatgagaatggcgattttaaaatgtttaataaagaatcagaccccgccacttacgaagttattaaacaacgcctcttagaaaataatggagactcgaatatagcatttgaaaagcctttgtacaaacctagtaaaaaaggaaacggaaatgaaattaaacgggtaaaagtgattaaagaacaaaaaacaatgatgagacaagtaaacggcggtattgcagaaaatggcgaccttgtaagaatagatttttttcaaaaagataagaagtatgtgatggttcctatttatacatgggatacaatagaacctgttttgcctgataaatatgtagtcggcggaaaaggttatcagcaatggccaaagataactgaagattaccattttagtgctagtatatatccttatgaactgattcgagtagtgacaaaaaaaggggtagatcgtttttattatttttcttcattaaatattggtaaaaatgttataaaagttattgagtgtaatatacctcaccaagaatatattgaaattggtgtaaattctatcactttgttagaaaagtacgaaatgaatgttctcggtaaaataaaaggtgttgtgcaagattctagaaacacattttcaaactataagataaaaaagcacacacagtgagtgggttaaaccctcttactgtgtttatttaatgaaagttttgttcatcctattattgaagaattaagaggagtgataagaatgggatggcgccatattatgattactcagccaataaaactttctatcaaacaacaacaattagttatcaaacaagatgtagaagtcactgttcccttacaagatatttccactattacattagaacataagcaaactatcattactcaaagtgtattatctgcttgtgcttcgaatcggattgctttaattagctgcgacaacaaaaaattaccagatgggatttttacctcttatcatcagcattcgagacaattgactgtcttaaatatgcaacaatctttatcaaaacctttgaaaaagaggctatggcaacaaattgtgaaacaaaaaataatgaatcaagctaattgtctcgatagtcatggatgcgaagaaagttctaagcttttgtctatagccagacaagtagaatctggtgatacatctaatcgtgaaggttacgcagcaaaaatatattttccacaattatttggttctagttttactaggcgagcaaatgatagcagaaaccgattgttgaattatggatattcaatcatgagaagtacaatagcgcgctcattagtagcttacgggtttaccccttgcttaggcatccaccatgatagtcaaacaaatccatttaatttagcagatgactttatggaagttttacgaccattagttgatatgcatattgttgagcttcccccgaacaattgggatgttaatacaagagctagtattgttaacttattaaacaaagaggttgaaattaatggagcaatgtacgtagcatcatctgctgctgatgaaatggtgaaaagttttgtagcagtttgtcgtcaaaatgatatttcgtatttgaagcttcttactatacctcgtattactgtgaatgaagcaatatgaggcagcatatgagaattatattattttttgacttgccaactaagacggcgaaaaataaaaaagactatctacatttcaggaaatacttgttgaatgatgggtatgacatgcttcagtggtctgtatacagtcgaatttgtaataatcatgaaatggtacaaaagcgcttaacccaagtgaagaaaaaccttccagcaaaaggatcggttcgagctcttcctgtaacagaaaaacaatacgctaacatgaagatactattaggagaaaaaacaacaaatgaggaatttttagaagttaatcaactaacattattttgaataaaaaaaccatggaaggaaataatgaaaatttgattatttataagtgaaaatggagatactaatagtaaggaagcagagtaacgtcatttttttaaagataataagagtttttcactcacgaccaacagttttttcttaaatcaaaaagcctaaacacttgtcgtgtcaggctttatggtggacgtatcatatcacagcaatggattagatggagatatgactcgccgcgttgacaaagttttcatctgtcaatcatatcacagcaatggattagatggagatatgacagacatccacctcacccttttaacgttttcatcatatcacagcaatggattagatggagatatgacgctaatgcctccgtcaatgtgttccgcgcgatcatatcacagcaatggattagatggagatatgacataaaaactgggaagaggttcaccaaggaaaatcatatcacagcaatggattagatggagatatgaccgatccggcagtgactttgtttcacattgaatcatatcacagcaatggattagatggagatatgaccgtaatgtttaaaacaaagtacaggagctgatcatatcacagcaatggattagatggagatatgacttaacttgcactattgaagaagaggataaaatcatatcacagcaatggattagatggagatatgacaaccgcaaccacagccgacacaacctcaaaatcatatcacagcaatggattagatggagatatgacttcgctgtcgacgatttggtacgagaagccatcatatcacagcaatggattagatggagatatgactgtcgcgattaaacttacacattatggtcgatcatatcacagcaatggattagatggagatatgacgtagtaaccaagattgaaaaaatgcaacagatcatatcacagcaatggattagatggagatatgacttccttcatcaattagccccctttatccccatcatatcacagcaatggattagatggagatatgacccgcttcacggtagccgtaatcgtagttggatcatatcacagcaatggattagatggagatatgacttcgtctagtcattcgggtggtggacgagtatcatatcacagcaatggattagatggagatatgaccctgcgttcatgaaggttggcgtggccggaatcatatcacagcaatggattagatggagatatgactctatcgcgatatgtaagtcgcacagcagcatcatatcacagcaatggattagatggagatatgactttccgctctctcttcgaatgacttaccgcatcatatcacagcaacggattagatgcagatgtgatagtgtaaagtaaggaggtccgggcatcaataccccaatacacgtaaatactaaagctataatttcatatgaggtaatgataaaaatattttaaaagcttcttcttaaaaacaaaagtataaatgttaaaaaggattcatagtggaatacacttatattaaagcggaagaacgtcctgacgtcgaagacgccttgtggccgatgggagaataaaagagaagtcgacctggcaaggagctaggtcgtttttttatgttgagaagctcaacactacgtttatcctagccaatgggtcaatgcagcctttaaatacgacataatatatccaaaagttcaaaaattttcatactattacttgtttctgaatgaaaatagtatatattaataattgaggcacgttcaaacaaacaggagctctacatatattgtacataggttagcgagggggaagagtcttgcctacccgagtggaacgtcttgctaattattaccgctttcatttttgataatgaggagaaaggatactcattgacactgtctgaacgaaatgggagatgtctatggtaagctccgagcttccaaggatgactttctatttgcagcaaagttcagcagaagtcgttctttcataaggtacgcttttgctgattgcttttacatctgtcgtttacctgctttcagttttcttgtggtgttagttggttttaatctaacgattgactttcttgtttatggtgaaatgacgttggcacagatggtctcagctcttgctgctgcctcgtaatagaggagaaaaccagcagccacctcagccttttcaatctactggaagcagggactcaccttgatctgggtgatatttataagttactggcagttaaccccgtttcaacttttttagtaacttagtaatgatagaataggagaaaaagatgaagccaatcaaatcctggttacggtttttactatatgggatagcttttattttgctcgttatgatggcctctggactgtatcagatgatcgcctcatcaagtgatttaaaaacctatccaccagcaggaaaagtaatcgagatcaacgacaatgagcagcatgtttataaaaatggggcaggagaggaaacggttgttttcaccgcagggagcggcaccgcctcgccatttgctgatatgtatcagctgcaggaagctgtcgcaaaaaagcaccgcaccattgtttatgagcggccgggttatgggtggagtgaaggcacaaatacggaacgtaccattgagcaactgacgaaggaattagcagaaactttggaacagctgaatgagaaagggccttacttatttgcagcgcattcgatgggggcattggaagttattcactttgcccaacgctaccctgagcaagtaaaaggtatagttctattggatggggtggaaccagcttatgctgcccggatggatgaagcagcccctttaagcatgtatgtgttgcaagccctgcgagcaagcggtgtcttacgtttgctttcccaacatgagacagtagcttctcagctcgatctgcacgaacacttgccagatagagtgctagaacaaaaccgggcccttaccttaatcaatctatggaatcaagaaatgcgggaagaacaacgaatgctcaatgagaatggaaaggcggtagcagaggagggagctattggcgatattccgttaacaattataagcgctgaaacctctgagatggagggctggcataccagccaggaacggttactcaacctttcaaccgaggccgagcaaattacgctcgagaacacggatcattttctccatcatcagcagcccgaacgggtagtggaagagattttacggattgcagactaaacaagaagggggatgtgagttaaggcagcaagctacggcggcgctgatctatagaagaggtggccttgcaagcaggagagaccgggtcggcgagagctcgagcgcctctccacagttggaatctttttatcggtaaaaaaagagttgctgcatagctgcggcaactcttttataaacgttaagcttgtttggtgaggtggtcactaaattgttctctgagtgctcgtttcaaaaatttgccgactgacgttttagggagttcttcgagaaagatgacgtcatcaggaagccaccatttggcaaactgcggacgaattgaatcaagaatgtctttgtctgttaacgtttcaaagccatcttttttcaccacgcaggcaacgggtcgttcctgccactcctggtgaggaacggcgatgactgctgcttcaaagacaccttcgtgagccatgatcgcattttccaaatcgacagaagagatccactctccgccacttttcacgagatctttagtccggtcaacaaggcgaatagtgccttcttcatcaagagttgctacatcgcctgtgtgcaaccacccatcttgaaacgcttcggcacttcggtcatcttgatagtattcatcggcgatccagggcccacggataagtaattctcccatttctccacttccccaggcgacatcaccttgcgcgtttacgactttcatttcgactccaggggcgggtaagccttgcgaggcgcgaatctctagttgttccttttttgatagctcgtattgataactttttaaactagctacagaagcaagcggacttgtctcggtcataccgtatgcatgtaagaaaggtacgttatatttcacttcaaatgcttcaatcatagcttctggcgccgcggaacctccacataacactgcgcgcaaagagctcgtgtcataatttccgttctcccacgcttgtaacaaccccatccaaatcgttggcacaccggcagttaacgtgacattttcagcttcgatcaattcggccagtaaagctggggtgaattgtggccccgggaggatttgactcgttccaaaccaggtggcggcaaatggaatcccccacgcattcgcatgaaacataggtacgactggcatgcaacgatcttgttcggaaagagcggccgtatcagcaaggcctaatgcgtaactatgaaggacgatgccgcggtgagaatacacaacgccttttgggtttccggtcgtagcagatgtgtagcaaatccccgcaggatcttcttcacttacatcggtaaaaaaggaaaagtcagcgtctccttgattgatcaactcttcgtaatcgtagactgggtgtaacgtcgtgttgtattctttgctgtcagacatcatgatatatccttcaaccgtggataattgctcttgaatcggctcaattaaaggcagcaaatcttcatcaattaatagaaacttgtcttcagcatgattaatgacatagcgtaagtgctctggcgagaggcgcaggttaattgtatgcaagacccctcctgcaccaggaatggcaaaatagctttccaaatggcgatggtggttccaagcaatggtgccgacacggtctcctttgctaacgcctagggcttcgagttggctagcaagttttttggttcgttcagcgatttcagcataggtgaagcgttgaataccgtttagtgttctggagactacttctttttttccatacaaagcagcagcacgttccatcatagcagggacatttaaaggcacattcatcatagtgatcaacctcctagtttgaaatgaaaaatcctaacgtatgaaaattctttatttcgctggcattcgaattgccccgtcaaggcggatggtttctccattaatcattgaattttggaaaatatgaagcgccaattcagcaaattcccgtgggttacctaaacgtttagggaagggggtgagttgttcaaggtgacttcttgcttcctcaggcaacgccccaaataacggagtgtcaaacacaccgggagcgatagagacgactcgtatcccagcgttagccagttcccttgcggctggaagtgtaagtgaggtgatccctcctttcgatgcgctataagcggcttggccaatctgtccatcatatgctgcgatggaagccgtattaatgattacgccccgttcgcctgtatcggtaggatcatggcttttcatccgttcagcagagagtcgcagcatattaaatgttccaatcaaatttacttctatgactttttgaaacgtttcgaggtcgtggggccctttgttactgagtactttttttgcactgccaatgccggcacagttgattactccgtgtaatgcgccattcgattctatagcagcatccagtgcgattgtcacttcagtttcgttggtaatatcaacttgatgatagacttggttggtacccctggtatgctcaatgttttcttcacttttctggtcaaatatagtgacgttcgctccatgggcttggagaagctctacgcaggctgcacctaagcctgaagcgccaccagtcacaagaatatgtttaccgtttatttccacgacagtgcctcctttttcgtaaatagtcggaactttaaagtagcactacttccgcaattgcaaaggaagaggggaattcgagaaaagttcgtacaatagttacttggcaggtaatttcatttctttagcgatgatttgtttcatcatttcattactgcctgcataaatggattgaaccggcacatcacgatacctgcgggcgatttcgtattcttcaatgaagccatagccgccgtgaagctgcatgcaagtatcagctgttcgttttgcaagctctgttatccaccatttcgccatggatacttcttcagttaagtgctctctggccgcgtgccgttggatgagatcattcacaaaggtttgaccgatcgtaatttcagtgtgaagctcagccagtttgaattgcacgtgctgaaaagaaccaagcgactgtccaaatgtcttccgcccttgtacataatcccgggtcagctcaagcattcgtctgctgcctgcaatggagccgatcgcaagtatcaagcgttcttgctgcaattgattcattaaataataaaacccttgatgttcgtttccaattaaatgatcggcgggcacttttacgtcttcaaatatgagttccgcggtatcttgactgcggaggccaactttctccaactttttcccgcgcttaaatcctggcgtgtctctttctacaacaaagaggctcaggcctttgtggggtgctgaagcagcagcatccgtacgacaaacgacgatgatcaagtcggcatgaatgccatttgtgataaacgttttttcaccgttaatgatataatgctcaccgtctcgttctgctttcgtttgaatagaggcaaggtccgaacccgtctggggctctgtcatggcgatggctgtaatggtttcaccttttacacaagcgggcagccacttggacttttgcgctttggttccgtagtgaaaaaggtaaggaaccgcaatgtcattatgtaagctaagccccatcagtcctgtgcctatacgttcaatttcctcagacataatcgctgagtatagaaaatcagcctgcgcaccaccgtaagcttcatcaacccacggacataaatacccttgttcacccgctttttcccagagagagcgtggaatgatgccgtcgcgttcccactgagggaagaatggaagagcctctttttccaaaaagcgccgaaagctttttctaaacagttcatgttcttctttgtacatacgaacacctcattatttggtagcgctttcattattgttagcaaaataaaaaggagaatagtgggcttcaagtggatcaataaagtgcgttcctcctacaaagcgataggtgggttgatagttctgggatttgactgcgttgcttacttgggtctgagaggtcccagtcgctggattaaacacttcaacaaacatttcccgctcgtaaaaaagaggatcgtcgtgagcttcagctaacgtagccacaggttcaacacaagcatcagtctcagccaagatttctttccattcagctaatggtttcgttttaaagacgtgggtaagctcatctttgattgtttgcgcgctgagagaagaagacaacaaatcttctcgctttatcactttacacaggcgtttgaaaaagacctcttcgagactgccgacggccaagtaccgtccatcgcttgtttcataaaaatgataataactcccgccgtttaatgtttctgactcgtaatcaggcaccgttttgtcataaatatacctttggttcgccaaaggctgcatgctaaacatcgcatcggtcatgctaatatctagataatctccaacaccggaatgttcccgctgataaagggccattaaaatagccatcacactgtagtgcgcacccccagccacatctgcccagggcgtaccagcaagcagcgggccatctgttttcgttccgctgtatgaagctaacccagaacgagcataatagttaatatcatgacctgcttttcgcctgtctggaccagtctggccgtagccagtgagggaacaatagataatcgctgggttcacctttttcatatactcataatccaatccgtatttggccatcacccccggacgaaactgctcaatgattacatccgcatcttccacccagcgtttgagtacatgcaaatgatcgtcatcggtaaaatcaagcttagctaccgttttcgagcgattcatttcttgataaaaaacagacgaaccatcaaccttcggagggacctcatgcaaaagatccgttcgatgaggcgactcaatccgcaacacatcagcgccccaatcagccaaaaatttcgaagccataggccctggcagaagcgcagtgaaatctaacactttcaccccttttaacatggacatgtctttaccccccccacaaaaagaatgaacattcattcagcataaataattttttaaaaattctaaccctttgttcattttattattatttccttttttcggtcaagtagaaatattgacgaaaagacgtataagctgggaagtggaagtaagcacgtggccatatgcctaacgtaatagcataatgcaccaactagaccctgcacatttataaacgcaattttttgatcctatagctttttatagataaagagaaggcagataagtacatagaattaaatgagaatggtagatatatgaagaaccttaccatcagtcgcatagaataacttatatactattactaagtataaagctttcttcttctataagataaaaattcaggcgctattaaaagtacataaagcagtcatgtacacgcttgtaatcctttgcaaagggctaataaaaataccctggtcaaaaacgacc

SEQ ID NO: 396 - DNA, 21971 bp, synthetic construct
  source 1..21971: mol_type = other DNA
  misc_feature 1..21971: note = Synthetic
cttatctcagttatttcaatttcttctactttcttttcttttggataatgaagtttcccattcttttcaattcctaattgtttcaatacatataaataataaagtaattgcattgtatcagcttgtttcatcttgctactcgatttaacttcgccaacataatcatcatatatatctatacaaattaaattatcaattagtacttctttttgcttcattcgtggataagtacgatcgtgcaagattttcccttgaagaactttatcattatcttgttcaaattgaatatcgtgggcatgtaaccaaagtttccgcttacacacataataatactgtacatgtaatccttttgctttcaattgtgtaatatccatctatatctcctcctaaaagaagcagctattttgatcttctcgaaatataatcccttcctctgttgaatatttaaaagctacaactgcaatcgaactataatgatcaagattaatatacctttctattaatcgttcttttttggcaacatgaaaagcccacgtcggaatcacaacggtatactctttcattgtatttttagcctgaattttctctattgtaggcttacgtttatcttttaatatttgctctaattgttgaatctcttcttcattctcgcggtacacattacttggaataatcacttcattttcaatttcccttaaaggaatctctcccttttgcaattcatacggttttatttctttaaaaatgttaattgtatctctaatttttcgataatacagagatcctgttaacctcaactgtttagcatcatacacttcttctactagtttcatttttgtttcttcatctaaaatagtattatgatattttttcattatagctcttgataattgaaaaatagacggatctactactgatttcttactattaccaatgcccgatgtgaattcttgtcctaaaaacacatgaacatttgacccttctccatcaaattcacgcccacgaaatactcggcccattctttgtagtaagccacatacttctgataactctgtatatagtacatcaaagtcgatatctaagctcgcttcaacaatttgggttgtaatccaaataacattctctgtacactctcttttgccaactcgtaaaatctcttcttcttttcttctacgatcgaaaacagtaaagcggctatgtaataaaaacacttgatcatgagggacttcagttcggatctcatcgtataactcttgcgcttttttaacagtattcacaataactaatactttcttgtttactgaagattttaatatatgttctggacgtaaattatcctctacaacatttactttgtgccgaatgatgacttttccacttttatttttctttaaaaatggataatctgcttttttataaggaattgctagcttcttcataaaatgctcaaatactggagggaacgttgcagttaaaatcgtgaatttaccgcctatatctgttattttttttaatccaaccaataaaaatgctactaattctggattatacatttgaatttcatcaataactaactttgagtatgctaatgtagctaatttcatttcaaatcctgggtataaaaaaacaaaatcaatgagttggtcaagtgtacacaccgtcaaaggtaaagttaattgttttgttttatgaatatattctaaatcaaattcctctctcttttctgatcgcttcaaatattccgatgaagtatcactgtgcaacagtcctaattgtttaaattcaatttcatttattactcgatcatatatagcattaatagaaactttaagtggcaacgtaaagaatcctttatgatttccaatccaaaaaagtgctccttcggtttttccaataccagtagatgctacaataatattattattttcttgattgtctattaaatatttttgcagttcattcggttcaaacccttttttctgcataaaatggagtgttttttcaaaaagatttttatttgactcttctacagttatatggccactcgctgcataatcaattctgtttaacaggccctttgtcataatatacttataaaacaattcatttgagtcttcttcttgtgaaattcttgatttaacagtatacttcgcatacttatctgtgatcgttacatctgtccatccttcttgctttaataaatcaacatattggggtaagtccgcatttataacctttttaatctctttataatcatttgctggacgtgtatgatgataaaaaatactttgacacaatatacgtaactcatctctactgtataattcttcttccttccactttactaatggcaaaaaagccacacttaaatatccatgatgtatctctttgtcatctggtaatacatcaatcaacctattttcatttcctattgcctctaataatttgttttgaaactttgtatttactttcccaatatcgtgatacaagcaggctaaatacaataatctccaatctacaaaatcaatatttggatataaattttttaaaacctgatattgttcaattaaatgattggtatgtttcttgatggtttcaataggatttgattttgctaataataaattctccattaacaaagacctccatataagtaaaaggatagtaatctactatccttttatgctaagaaaagaatgtatccatcctcatccctattcacttctacttcatcgagagaagctgaatatgaggaaacgtgaaatacttttactttttcccattgacgtatccatgttccttttttgatttcaacttttcgatagactttatttaatctataagtagtccctacgttacccagttcacttttatcaagctgattcactggtatatatgcatcattcaataatccatattcatcttccaattctttttcttcatattcaacaacttttacttcatcaaaacgtactatatcttctctacgtcctaacgataaatactcagttggattttcaaactgactataaataaacggaataagagattcatcttctggtacaatgtgaagtactaattcaacatccactaatagttcagccgttgcaacaccccttattgctccatagcttttttgattttttgtagaatctaatttcacagtatgacgtccctcttcgtatgttgcaccagcaaattcataacgggtccataaatcattcacttttgaatgactcctaccctgtatactcactttcatcggtacatattctgtaaacccacaagcagcatgaaccattccaattacagttgaatagggtgggagtggataactttccttcaattgaaagcttgtgggcttttgataatttactaagttttgataaattttcaatcgaattgctttcattgttttcacctatacaccgtaatatgatgatgtggattcttgtagtttattaaaaaattcacccactgataacggatgtaacttttctttaatattgtgatcattattaaatacaccttgcacataaccaacaactgtattttctcgaacatggctatcaagacttaatacatcttcaattgtttccaccgaaagttgattgttattcacttttaaacggttttcaaaaaaaggatttttcttatcatacaccccacctatcacaaacagtggtgttaagttttcacgccgccctttaatatcacgatataagaatttcactgcatctaataagttttgtattcgaattattttttcttcattactaatttcaacttcatcattgttatcgattcctacacgatctaaatcaattgtgattgtatacgcataatatgatttgtgaatttcgctttgcgcaatattccctccatcctttttctcttcattagctgcattataacgatcaaatagccctttatttgttaaaaaatcaatatctgtttgaaaactttccaaagcgaccgcattcgataatcgtacaacagcagagcgtgtacgtgttggttttgtcgtcttcatataaccaaatagatcaatctctgcataattttcgattgttgcatctggatgaaattgaataactgtaccatctacatttaatggcgtatcatttactcccatttgctcaacaatgttataacgtaaagcttgacgagaaatataagaaaaactttcccctgtaccacgggaaatcttcttaagcgctgttacgttccctaccccttctccatagttcgcactttctgcttcaaaaatagcactaaatgttagcccctttttttgcatttttgatttcctctcctttttctaatttttgctgctcaccttgtaaccctaataaaaatgcataaccaattgtttgaaacttcatttcatcatgtaatgcttgcacaaagttcattggtatttgttgtcctttatacatatatgcattaacaagcgtatccataaaacgatgcgaatttttcaattttaaagcgtttaacaaacgatacgtgataccagacaatttattttcatttcccacatatgtttttcttaattgaaatccatactcttgaaattgattaatttgtttgtaatacacttgttctttcccccccttaaattgactattattgatataaagaatactcttcaatactgataacattttatattcattacccaagaccaatcggaagagtcgatataataagtcaaactgattttgattattatataaacgcttagttacttcttgatataatgaaatatattcttttccttcttttacaaatcttccgactaatctcgctaagtgtttcttatttttttccattatcaacaatttttcttttgaaaggatattaaatgcatatggtctacttgtatttgctccatcaaactttattatttggatgttttgaatttctttttttgcatgttggacacctgcttgccctaaaacatctacaattcggaaataactttgttcttctagactatctaaaccttgcacagattcgcctttatacaaaactagttgattcaaactgtgaagttcctttacatttgcggtttcatttataaataagccttttccattgataattgtaaaacctgcgggtatacatgcataaatcaaattacaaactgggcatacatatgcatcacttatataattccaaaaatgtgaggattttcgtgcggaatcaactcccgttttattaatccatgtaagttcatatgcacttccaagcttcgaaaatttattttcgcagttaaaacaattatatttgtactttgaatacatcttttcctcttctttttcctctatatagctaagaatgggatctacaaagtaccttttacattcttcatacatatcctttttgtttgcacttttatgtaaaaaactaaccccctcccaaaactgctgaataacttcatatacaacatttcgggccattatatatcttttagtatcaggatgctttaaacataaaataatttgttgcaatgttgcgattgtccttgaaatatcttcctgaatgtctacaaatgtttcagttttcttcttttttatcttttttaattcagtagctaatttgctgatatcatgaggactatttcgaattaagtgatatgtatttttataactattagactgaagttttttcttcgtgtcttcaatatatttatttaaagtattaaattgtttttcattcaatgtctttatatcaatttgatccaaaaaagatttgttgctaacaattttataccaagatgtaaatgattcgtatttttcacagaaatattcaaaataatattcactaaagtcttctaatacttcactttgaaaagtaatagcattcctgcttttttcataagggacttccgctctatcaaaaatattcattattcctactaatcctgcgttgtataaccaatctgataactctaaacgtatttccattctggcacctcctatccttgtatgatttcaatatttccaaatccttgcgatcttctcattcctagaccaatctggtacagtgtctgtaagtcttggacactcccctctaattcaaatgttcctcgatacgcttccacatataatgtacttttatcattcaatttgctaaaggcatcatgctgttgctttacaatcacctttttcatatctactggagtcattttaataggttctcttaaaggcattcctgttgcattcaacaccgtttgattacttatatattgaaatgctggttgaaaactatcatcataaggagataaggcttgaccttctttatttttaatatgaataggtgacatcgtcttacaaaaaatcttctcttttgttggcaacttctcaggaatgaggttaacttgtttcacatataaatcatagtctttatactgaaaatgctgttttgacattaatccattataaagatacagcataaactctggatcagatgacgatacaatccatttgacatgaccatccacaataaattcatcctgttttttcacatacttatgaacataaacagaaaaagtaaaatccttcgaacgtttgttactcttgtctttaaatgtatacaaatcttgtaccaatttttcatctatacaactaagcgattgtttaataacgcttacaaatagaaaatggtaactaatgggcaagcattttgtcttaagtgtaacttgaactctcaaaaaatcacttccttgccaaaaatcaatttcaataattaatccactttaatattaccatgaattggaactttttgggtttatcctatgtaaattcacttatatgtcaaaaaaataaaaagcgagatgtggtttttaaaaaaagtttgattaaaaatatctactctcacccttactctacggaatataaaaagaatctattttgaaaatagattcttttccagtagatttaagattggtttttataaaaatgtttgatttaaattacatatgttaacctaactatatgattctctgattaataaaacctataaaaaaattggggaaagtaacacctatacgttattattctccttttttttatagaaatggttcgaatcacaggcaataacccatcctataattattaatgttacagaaaataacttaagacacgtcttatatatataatctaaatctttaagataaacaaaggatattacccctataacagcaccaactattcctagaaccaaacccttatatttttgtaaaaacatcaagttacccctttcgtacaaacaaaaaattccatatataaataatactaaattatggaatctttttaaagaatcaaaacgtttttatattcagtttatacatcttcttttattaataaaaatatccccatagattagtaaatccaaagggataaaacggtacaatttttttataaacagtacatctttcttcaaaacggtacgactttatttcaaagctacagcatttctatacctatatgagtagactcttaatgtacatttttaaagctctaaattttctttacttacttttgcaatatatttcaaacaatctactactggataatgaatcaactgcttaggttgggaaaacttgatcccctctttttcaagcgaattgataagttgttcaacggtcatctctttacgttgtatcctattgaagtgttgtaccacaatgcttttccagttataagacggactttggaagtaaccttccccctgtactgcatgattataaatcatatccagtttttcttgtctcttcttcttttgtagatgtttttccatttggttcatcttcattcacctcattttttagtgaaaatctgtatttcgccccctctttaataaaataacgtgattctatttgttacacattagtttcagcaacaattagttttcttccctgtttgctataacctgtttcgagagagagtatccaatcgtgaaggtcattccaatcatatcccagatttaataattcggcaggggatttgttttcaaagtcatctcgccaagcatacattctttctttctaatgcattatctagccttccaaatttgtataatgtaatgtttttctttttcccgttatctctaagtgcttttgttaaatatacataaatcttccctttcgatcggttaaatgtaagaaatccaatattccctttcaaactgtccctcctcttcatattccgaccacaacaccgaaaagtggattgtggtcggaactatatttttagtatttattatgaaacttgtcttttacgaacacgaacttttttataacgaccatgctttacaacatggcgagtatctatttctttatatttcttagttttaagcattttcgaaatatccacgataattgtattcgttaaaatgtttactacataaccagttaatttgattgaaggattcttgcgatgcggaaattgtacaaagtcaccaattttaattgttggaactgaaacagtcttttccataaaaaagcctcctaaactgaaatgttatagattaacttttaaattactgagtatttctttatcctttgaaaacttatatgcttgtatatatagaacaaataaatctgcacttaatgtgacagtcattccatctttcatacgctttaaaataatgagatcttgattctcttgttcaaacatccttgcgtatcctaatacctgatacactcgaccatcttttctatgaatatagaattcaccacggttgggttttggtgcaatcacatctattcctcctcaaaatttgtttaaaatccgtagagaaatccggcaattaaatatgtagcaacaatcataaaagtagatagtccaaatgtaccgaagaaccaaatttgtgaggaaacacaattatctataccaaaccattcacaaatggcgtcatatcgcttttttaaagtgctttttttagtaaggttcattttttcttttatcgttaaatgtgttaaaatatacttgctgttaggagtttttagataggtatttgccatctagaatcaacctttcttttatagtagtgtacctggaaaagcccttctctacttggcggtggtgggggctttttcatttgtattaatttttttaggaaaccattcttgcatggcttcatctgtaactaaccaagaccgttgtactcgttgatatgttttatctggatcacgaggtggctcaaaatagcgaataataccccgttcaatcatattgtttaattgatcttggttagcacgagatggcttgacacgactttttaaagtttcatatgatacttcatatttcaaagcggcttccatcaaaaacatgtatttctcgatttccttcattggtgtactcctcgtatatgcacatttaagagttaagcattttcttttaaaaaacaaaatcctcaaagcgtccttctaaaatttgtactactgtttcaaaatcgtattcttatttaggtgttaattcttttaagtctactcgctcctttcatttattttattaactttctaattacattgtacctaaataggtacaataatacaataaaaaaacagaaaattaactcgattaattttcgacaaaataattcaaattaaaatgataaaattgttaattataagtgggctaacaaatggaatatattattgatagtgtttgtattagaaacatctaaaaatttccttttggagcacagttttttcttagcgtgatgggtatgcggctgtacccctatattcatacctctgtttatatattgagaaaaattgaaaaataacccaatttttgttatcatagagttatcatggtacagcaatggctttgatgtttctatgataagggtttcggcccgtggcgtcggggatcgcctgcccattccgatgggcttctccccatttattaaatgcgaattttacaaccttggctatcctaaatagctgaggttttttgtatatacatagattaaaaggggtggaattatgagtgagttggattaccgcatagggttagatattggcacgaattctattggctggggtgttattgaattattttggaacaaggacagagaacgatatgaaaaagtaaggattgtcgacaagggcgttcgtatgtttgataaggctgaaatacctaagacgggtgcttctcttgccgaaccgagacgtatagcgcgttcatcacgtagaaggttaaatcgcaaaagtcagaggaagaaagagatacgtaatttacttgttcaacacggagtaattacccaagaagaattggatttgttatatcctctttcaaaaaaatcaatggatatttgggatattcgtttggatggattagatcgtctgttgaatcatcttgaatggactcgattattaattcatttagcacaaagacgtggttttaagtcgaatcgaaagtctgaattgaaagatgctgagacggggaaggtattatcgagtattcaagtaaatgaaaaacgactatctctgtaccgtacagtgggggaaatgtggataaaagatgctgagtttagtaagtatgatagaagacgtaattctcctaatgagtatgtattttcggttagtcgtgcggatttagaaaaggaaattgttactctatttgaagcacaaagaaagtttcagtcatcatactcatcgaagaacttacaagaaacatatttacaaatttgggcacaccaacttccttttgcttctgggaatgcaattttaaataaagtaggctattgctcattattgaaagggaaagaaaggagaattccgaaagcaacatatacttttcaatatttcagtgcactagatcaggtgaatcgaacacgattaggacctgattttcaaccatttacgcaggaacagaaagagattattttagataaaatgtttcaacgtactgattattataaaaaaaagactatacctgaagttagctactatgatattcgaaaatggctagagttagatgaaactattcaatttaaaggacttaattatgatccaaacgaagaactgaaaaaaatagaaaagaaaccatttattaatttaaaggcattttatgaaattaaaaaggtagttgcaaattatgctgagagaacaaatgaggcattttcaacgttagactatgatgcgattgcatatgctttaacagtttataaaacggacaaagatattagatcttatttgaagaaatctaataatttatcaaaacgttgctacgacgatcaattaatagaagagctatttactctctcctatacaaagtttggtcatttatcatttaaagcaattaatcgtgtacttccaattatgcaagagggaaggacttatcaagaagcgatacaacaattaggatatgataccactaatcttaaaaaagaaaacagaagtatgttcttgcctcttattccagatgagataacaaatccaattgttaaaagagcgctaactcaagcacgtaaagttgtaaacgctatcattagaagatatggttctccaaattctgttcatattgaactagctcgtgagctttctaaaagtcatgacgagagaaagaaaataatgacggctcatgatgaaaattataagaaaaataaaggagctatatccattttgatcgagaatggaattttaaatccgacaggatatgatattgtacgttataagttatggaaagagcaaggagaacgatgtgcttattcgttaaaggagattcctccggatacgttttttaatgaattaaaaaaagaacgaaatggttcttcaattctagaggtagatcacattttaccgtatagccaaagttttattgatagttatcataataaagtattagtttacagtgatgaaaatcgaaacaagggaaatcgaattccatatacctattttttagagacaaataaggattgggaagcttttgaaagatatgtaagatcaaataagcttttttctaaaaagaagcgtgagtatttattgaaaaaagcatatttgccaagagagagtgaactaataaaggagcgacatttaaatgatacgcgatatgctagtacctttttgaaaaacttcattgagcagaacttgcaatttaaagaagttgaagttaatctgcgtaaaaaacgtgtacaaacagttaacggtgtaattacagcgcaccttcgaaaaagatggggattagaaaaaaatagacaggaaacatatctgcatcatgcaatggacgctatcattgttgcttgtacagaccatcatatggttactagaataacagagtattatcaaataaaagaaagtaataaatcagtaaagaaaccatattttccgatgccatgggagggttttagagatgaactcttatcacatttagcgagccagccaattgctaaaaaaattagtgaggagcttaaagctggatatcaatcatccgattatatatttgtgtctcgaatgccaaaaagatctgtcactggagcagctcataatcaaatgattaggagaaaaggtggtattgataaaaaaggaaagactattatcataaagcgtgtgcgcttaaaggatattaagtttgatgagaatggcgattttaaaatggttggaaaagaacaagatttagcaacttatgaggcgataaagcaaagatatttggatcatggaaaaaacttgaaaaaagcatttgaaacacctctatacaagcctagtaaaaaaggaacaggaaatctcatcaaaagagttaaaattgaaggacaaaccaaagcttttgttcgagaagtaaatgggggcgtagcccaaaatagtgatttagtaagagttgatttatttgaaaaagatgataaatattacatggtgcctatttatgtaccagataccgtttgttcagaattacccaaaaaagttgtgaaaagtggtaagggttatgagcaatggctaacactagataacagctttacgtttaaatttagtttatacccttatgatttagtacgtctcgtaaaaggtgatgaagatcgttttttatactttggtactctcgatatcgattctgaccgtcttaattttaaagatgtaaataagccatcaaaacagaatgaatatcgttatagtcttaaaacaattgaggatttagaaaaatatgaggtgggtgttttaggagatttaaggttagtaagaaaagaaacacgtagaaattttcacgagataaaaatcaattaatgttaaaacggtaaacaattttattttgtttaccgtatttttatgtctcttttcgcctagaatactagataataagtagagatatttaaggccttttttatgaaaaacaacaaaatgtaggataactcatcctatataggttaaaaaataaaaaacaagaagcctgtaagcgttgatattacaggcttttttgaatgcgtatcataaaatagcaatgactttcatggaactatgacatggggaaagttgcaatggcgaaattcattatcatagtacagcaatggctttaatggaactatgactctacatgctcgataaatacattaggttttatcatagtacagcaatggctttaatggaactatgacgtaatcttgctaattatgttcattttcaagatcatagtacagcaatggctaaaatggaactataactcgttgcaagtctcaaatgcttagttattgatcatagtacagcaatggccttaatggaactatgattttggagttatatggttttgaaaaaaagcctgcatcatcaaaccgaattattttgaacattgagcatatattttgagttctccttttttaaaatgccatatcaaaatttttcattaaataccctttcccttcttcaagaggaagcatttttgaatcaatttcttttgcgttccctgtttcaagatcagtctggtatgtcgagaaattccatatgccttcactattattatatgttgctgtcataaacttacctttatctaatcctttaaaatgaccgataattcctattccttgatctgcaccaagaatttttacttctataactttccccttattaatgtaaaaagcctttccagtagaaatgttagaagcttcacgttgtagtgctaggaaaaagtcaggtgaacctttactaacatagccacttttttgagaaccattaaacagaaattcaccaagttgtgcctcttgtagatatagtggagagtttttagattgtagtgcgatttgataggagccttggtatatctcatctcctgcctctgctcctgcccaagtatcagtttgtgtttcatgtttctcattatttgcaaagatatgcatcgtatacttatgtccttcaactgatgtcatttccgatgtataacgactttggacttgagggttaatctgtgagccctgtatttttcccacttctttttcggacgttttagtctcctgattggatttagctatttcattttctggcttattttctttattatctgctttagtctcttgattagaaggagttgttttgttttctttcgttgcaacactagttttttcatcgcatcctgttaataaaaaacataaggtgatgctccctaacaaaacttttttcataatatcccccttaaatagtttgattcaaacgcttttcaaattttttcatatttctttacaaggcggtaaaatgtagtttttgatagattcgcttgtttcattgcttcaacagcggttattgcacctgttttccaagcgttataagcagtgataaattcatctgtaatttctgtcttcggtcttccaagatgttttccctgttttttagctaattgaattccttcttgctgtcggttttttatttttgttcgttcttcttcagcaagccacgaaagaatttgaagtacaaggtctgtaatgaaattccctaagttgtcctgatacttagttgtatctaataaaggcatatcaattacaacgatgtgggctttaatatttttagtgatatccttccattcatttaaaatcgcttctttgtttctcccaaaccgatctaatgattctacatataaaacatctccttcccgtaacatcattttgacaagttgatatttttggcgattgaaatctttaccagattgtttatcaatgaaaatatctctttcatcaatacccacttgtttcatcgcttctagctgtctaccttcgttttgatctttactactcacacggatgtatccgaattttctgttattcaatgtatcagaatctccttctcttgatgttttataatacatattataacaaattagtttcaaaaggtatctatcttttagagacgtttcaaaaatcgatttttaaggttttggaacgtatatttcatgtaatttctacagttccaaaaggtgtaccttttgaaacgcgtagaaaaaggaacccgttatggattcctttttgttttgtaatgcttttatgaaacagctcactttcttaaaaagtatttttcaacttgtttaaaatatggaattaattcttgaaattgatttgaagactgtaatttttcttttatcaataaagaaaaaatctcacatgaaattaaaattatataagtttagcttaatgggcatggcgtaccgcccacattttaacgattttataagccaagagattctgatttaaatgatgcgttctgagacactattcttcttctaaaatagagtaataatattcatcccaccattcattaccatgtggtatacacttcctgaaatagccttctcttctcattccaatcttctccatcactcgatatgatggggtattctgtggctgacatgtagctataattctatgtaatttcatttccttaaacccatatttcaatgtagcttgtgctgcttcggaagcatatcctttattgaaatatttaggattgaacacccaaccaatctcataagtatgttcaccaaaatatttatgaaaaacaatatgaccaattaggatattgtcatctattaataccacaggaaagttcttagcattttcaccaatgttttcattcacaaagtttcttgtatcttcttcagtaaaaaccccttcgggtatgtatttcataacattgatatctgatgtatactcatggacagcttgccaatctttgaactcaaattttcgtatcaataatcgttctgtctttacaaacatttacttttccccctcaaaaaatcgtaactttatttcaaatccacatttaaccccaaaaacaaaaagaacttgtaggaatcactacaagttctttttaagataaggtgacaaaaaaggtaacacaaactatcttaacagacacaatagggaaactacttaatgactgatgtgacaatttcattatataacaaatattaacatttggagatttcaattttgaatattttgtgaattaagaaaatggaacgatttattgagtttgtattcctaaaaaatccatttgtttattttgtacaaaacgctttaaatcaacatcgatatcataataaattagtaaaaatatagttataggtaaatagagaagaatgtctcattattacctaacatactatatttatattcatgtttaataaattataataatatgaatttcatgttacaaccgactataattcttaaaaacatgtaaagcactgacattctggccatgtatttttgaaaaggtttggaattgtatattttttacaaaaataagatataattattattgaagagcaatttgtaagtcccattgaaatatgtggtaaatttacatgggatatgaaatgcatattcgaaaagagataatgcactaaaaagtgttcttatctctttttttacttatatgatgaagaaatcaattgtggaaaaattaaacaaacatttttttaaaacattttggctatgaggtattatattttcaattgtccactttgttcaatttcacgtttattatataaaatttatataacaaagaaaaaagcacccgttttggatgctaacatgaaggtttgttagatatgaaaaaattcataaactaaatacaaataataaaagtatatgctcactaccgcttactgtattatgttaaatcttcggatgaaattaatgagtgaatccaccgtcaagcctaaatatctacgtttatctcccaattataaagtaaatttcccaccatgataacaatagtaagtttctgctttaaggtttttaatctttcttaaagattgttgcgctttctcaacatttaaacaaaagtgtggattagcaatgattaattcatgatcctcattaacagctgcatcacctgtaattacactttttaaactttgaaaatacaatgaaatatgtcctgaagtatgccctggtgttgctactactctacatttgttatctaaaatcaaatcaccatcatgtaccttttcatcaatcgagacatgcttcaaattctttaattgttgtgtaaaccatttaccaaatttgatttctttgcttgacatattttctagcatttcttcagcttgaaccaatctctctgacttcatttcaccactaatgtatttcgattcactttcactagcaataatgttaatccaaggatacttctctttgaaatcatatagggaacctatatgatcatcatcatagtgagtaatgattatattttttatattcttcgcttcatatccatttttaaaaatttcattttcaattaaaggtaagaaatttgtataacctgtatcaaccagagttagttcatcattcaatataattaagctaggataaatgtaatttttttgtttattaaattcaaattcaattggtagctctattatcttcatttttcttcctccatacggtatgtttgtgaaacctttgataaccgaatattctatacacttattgtacatgatatgaaaaaagacgttataaatgtagatttgaaataaagtttgatcaaccatcctctcaccgatctatattttaatatagtaattttgaaattagggaggatataatgccgtatatatggcctttaggttgggagcacattaatttcttaggagaatataagtttgaaggagttcattcaacaagtttacattgcttacgttccgtaaatattaaaaggccaatttactcttaacggggtaagattcggctcttttttatccaaatttgcttagcgtgtttttcttccgaaatgctggcattaccccatacccatcaagctaagcttatacaaagtcaattttaggcgagattttttctattttctaaagggcaagtgtaggtgattgaaagatttgcatacgaaataaaccctaacgggtttcacttttttgaattaagcggcttgattatcagacatggtacaattgtaaacaacacctaatatatcaaagaccgtttttttttcatatcgatgagattttcgcccgttttgctgtaggagattgaacaggcgaagtaacacccttgatagctcttgggtgtttttttgtatagtttggaatagaagaagaaaatagtctttaatcatatatatggctttatactcactaagctctcgttttttcttcatgaggagtaattggcgcatttgaaacatgatagaagaacagagtggaatggcaatcaattgaccatataaatggcactccaatcgttctggttttattcttttacaatgatgaatttgaaagaatgacttccacgttttaaataaaatttcgatttgccaacgcaaagaataccagtcatgtacctgtcccatcgggacaatatctgtagaggtgtttgtcatatatacattgataccactgagtcgtttactacgaggagaatacttcattcctttctttttttctcttacagcttgatcttgtaatcgttgttgttcttttgttagccgatgaacaatcacacgagttggtactttatcagtcattcctacataagcatcagttatttcacatgtttgttctggttgaagggagttcattaagacctccaaatctatctgtatatactctgtacctttcttaattcttccatcttggaaataatcaggattgggatttttttgatatatacgtgtattcgatttgatacgtgagatataataagcttttttatcttgtatatgttgaagatctttcaaatgaaaataacctaaatctcggatacacaaatcattcgctgttacagttgggacacacagggaaccgtaggttcgatcatgttgtttacctggacctgtatgaatatgaaggaactgtccacttaataaatcatactcaagctgaatctttactcccgctgtatgactgcatcctcctgcacctggataaaccgatgaaaatacatctgggagttgaaatgcagttgaatctaaaatacgaatacgcttgaaaacagaagtgtatggagaagaaatcggcatagatgcagccaattttttgcttagtagttcggctagtaggtgttgtaaaagtttgacggccgccttattaaatcgttgattcagtccttcaggactgataagtactgctgttgatgcttctaaacagctagataactggtttaaagaagtcatagctacattttggctcacccatacacataaagctactaaatcttttgcttggtacttactggttcgttgtacaaaaccaacatctctagcaagatcgcgtaaggtatttggagataaaaaactttgaatctcttgagcaaatagttgtaattcgtcagacacagaaatagacataaaaaaacgccatcctttctatatatgcctacaaaaagtatagcgtttttttatattagattaaatgaaatattaaatcatattaagatccttatgtgttgagtgaacacttattttcctcatataacgtattaacatgctgttttaaatttttgatgaataatagaatctcttgactagacattctagcatgttgaagatgaaatatgttgccttttccgatttctaactcgtttgaattcaatgtaatagggatattcctaaagacatgccatggaaaatacaagtgtacaaaagtttctctaaaatatatacccgattgacaaattaaaacgccatccgaccctttactcaaattaccaaggacagaggtatctaaaaaagcaatgatttcttcttcttttgaaacaatatatcgagcccaaatttcctttagctttttgtctgaaatatgagtgtctacaaataatccattatcaggttctaataattcatcgtacgtctcaaacaaagagcagattgattttatctcgtcaatttttataactggatgtataacatttcgctttgaattatggaacgaatttgtaagagctataagtaattctttaaataactgcggtggataatcactgccgttaatattaaaacttttttgtgcatcaaaagataaaaaaccatctttatcaatttcgatttgttgcacttcatttaatttatcccatttcatatttcctttacctaataaccaatttttccaatataaacccgaacttgtaaaataaacaccatattttcctgagccaaataaattgcaacttaaaaaagcaataattcgatcatccgttggtatagagaaacgtttttttgcaattgataagaaatcttcaggtaatctagtaacataaaatctagactgctgatattctaaacaaatatcagttaaacgattaatatctatattcagcatgataattctccgtttcttatatatttttgatatataaattataatattatcaggtaaatattaacacttaaaattcgcttaaattgagaggcactctattggattctaaaataaatttgtattaaattgaaaaatttattatttatttttatcgttttggggtagtgtcttcttattagcttgatagcgatgtggcattaccccatgcccatcaagctaagattttaaagtaccccctaaatggaaattttgtgtttttatagtaccgaagtttatttttatcgttttggggaacaacagattttttaacttgatagcaatggggtcccatccacattttaacgaaaatatacgctaagcaaattcgacatgaaaaaacgttgattttactactctaagcggtatcaccaatctcaaaaacataggtatttgagacaaatgtacttcaatgtagaaggtactgaaaagagcctaaacagtgtctcaaaactcatctttaaatcaaaatctcaattcaaatcgtgttattgagttttgagaatcccttagcgtataaaaacgttaaaatgtgcgtgctaccccaaataaaaaaatccctcagataagctgagagaactcttaaaatttacattatttttctttatttgttaggtgattagattttttaataagttctattaattctttttcatagttagttttatgttttaaatattgaagaaatcgaagacttactaacactaagagaaaatatacaatgaacttagatataaaccccataattgataaaaggataggtgtataaaagaaaagtaaattccaaggcattactattaacaaagataataataaagctaaccatatatgatttttattcaagtatttccaccctttcgtgatgagtacctctcattacaaatttttctaataccaattattattatatgttcgacttggcttcatatagccctcctgtattttttattatcctcttgtttttgggtgtgagtgcaatggctagggtgaagccaggaactatccccttataaaaataaacataataatatcaaaaaaccgctcagttcgtctgagagattaaattttttaaatactccaatgtaaacttttgaatatttgtttacattcatttccccttaaatattgacttcaccccaattcccctgctatcatcaaaattagcaagaaaag

SEQ ID NO: 397 - DNA, 15153 bp, synthetic construct
  misc_feature 1..15153: note = Synthetic
  source 1..15153: mol_type = other DNA
attggtcattagaaagagagttgtagatccgatttcgattaagagttctttggattgtttggttgtcttttttgaaagttgacgttagggttcctttgatcaatcctaaccaatttcgatataacaaaaccttatcttctgcatccacagctgcaacggaatcttcgcaatccataattgtcgttatcgcagattctagaatgatatctttaatccctgcatcatctgtttttcctattgcatcagatctatcaatttgaacttctatatgaaggttattatttttaaaaagaatagatgttggataacttggctcgccttgatagccttttatcatattagaatcaagtaaagttgtaatgtctccatctctaatcgtggcaatgagttttccctctataattgaataggaagtaatgtccctatggcttgaattagctaaagggattatttgatcaaggaaatcttttgcgaatgttattactttcattccacgaatggggttatatgcttctcttttttttgcgtcgtcctcttcatttattacatctgtaccgtaaagagcatcataaagactgccccatcttgcgttggctgcattaattgcatatcggctattgctcaatgggacaactaattggggtccagattgtaaagaaatttcactatctatattttctgtagttatgacaaagtcgctacattctttttctaagtagccaatttgctttagaaattgttcgtattcatctgaattaaattgctcttttttctctttaaaccagccattaatttttgtttgtaaatcttctctcgtctttaataattctagatttattggagttaaatcatgaatgagtttgtcaaactctagccaaaagtattcttttgataaagcactatctggaagggcctccttattaataaattcataaagaatagatgcaaccttgagatttctgacattaacatagtttttcatatataatcctcctctaaagattattgaaaattaaatctttaaacttgtaatacattatatgatcaagagttttcataaataaaatacacaaaaagaatagtaggtatgcattttcgttatatatagataatacaagccaatgatttattagctctaataacatagctaaaatgcatagacaggattcctaataagtattattcatatttttgagtctgatatagaatagttagtgagatcagatcaaatgcactataaaaacgaaagggagattataggaaggtagttcagaatattcgttttattttatttatttattgttttctgttaatttatgttacagaaattaagacatgtcgtgataggaagtgtaacattagcccaaacaatatattagttgaaaattaataaaaggaggggacatatggagccaatagcgataaaaagtaaggaggggagtaattgtggcgaatgcgatagtgaaaaacaaagaaaataaaactaaggatatacttttaactttactaacctttattgtgatcttaattgtttgggagggtagtgttcgttattttgatgtttcaagtgctattttcccatcagcgatagacacattcactagtttcgtaagatttttttttgaaacagaaaacctaagacacttatggataacttttaatcaaacgatagctggttttttactagggagtattgctggtgctattttgggaattcttatttctgaggttccttgggttcgaaaacaaatctttccctacataatagcattaaattcagtaccgaaaatagctattgctcctctatttgtcgtctggtttggatttggtgcctcttcaaaaatagctattatcatggttacaacctttttcccagtactaatcaatatggtggtgggacttagtagcgcaagtgaagctcaaattaggttgcttcgatcatactcagccaattcatggcagatttttaggagggtaaaactaccaagttctctcccatacctattttcaggattggagattgccataatgctaagtgttattggggcaatcatttcagaatttgttgggtcaagccaaggtctagggtatttaatgttattctataaggctcaatttagaattccagaaatgtttgctgttttagctgttatttccatcatgggctatttattaatgttaagcattcaaatctgtacaaagaaggtggttttttggcaaggatcttcaaaaaagaatgagagttaaaatctattcacaaagtaggttactttcattgtatataatacaaaaaaggagcgagattatgtctaaacgtctattgagcatttttattttaatacttttcttactgttactgtcagcatgtaattcaagtacttcaggtggtgaaagtcaagaagaaccacaagataatacatctgtagaagaggtcaaagagggagaagaaaaagcggttgaagaaatgacaagtgtaaaattagttattggaacagctgatattaatcaaggatacccttgggctacacttccattggctatgggatggtttgaagaagaaggattagatgtaacgttaattcctggtgaatcctcaggggcggctgttcaaattttgcttgctgggcaggctgatataggggcattttcttcaaatacagcaatgttagcaactgtaaatgaagatgcacccctaaagtctgtatatccaattgctagaagaaatgggaatgtatttgccgtgcttgatgattcacctattcaagatatatcagacttaaaagggacaaaagtagggtttcctgatttaggaacttcgcaagtcccatttgctcatgctagatttcaagaatcggatgtacccattgattcagttgaggaaattggggttggttatggagtacaggcgtttgaagctctaaataatggaacagtagatagttacgtaacgttttcaagcttgtatgcgttgggtaatgctaatggttatgatatacgagcattaccaagggcggactggcaaaatgatatgtttgattatagtttgtatgttacagaagataacctagatagtgacatcattgcaaaggttggtcgtgcgttcgctaaggcaactgtattccttgctactaatcccgaagcagcagttaagattttctgggagcaataccctgaaagagcaccaattgatccaaatgatgaagctgcctttaatagtgactttgaaattttaactgggcaagttggggatatgagagctgatgaacttccaattgatttcccttgggggtcacaagatatggaaacctgggaatttatgcaagactttttatatgaaacaggaatgattgatgaaaaattagatccaagtatctattttgataatagcaacgaagcagaattcttagattttgaggtagctgaaattgtaaagttggcggaagattgggaataaaactttttaaataattaaggaggagcacaatgttaagtaatgatacctcagatattgtattgaataatgtgaacaaaatttataaaactcgtgagggaaaagacttgcatgcaataaaagatgtttctctttctgtcgaaaaaggtgagtttgtttccattcttggccctagcggttgtggaaagagtaccctactaaatattctgtgcggtttacttgatccttcagatggcgaagtgttaattgggggcgaaccaattaaagggccacggaaagacttaggagttgtgttccaacagcctttactactgccttggttaaaagtgatcgataatgtactaattccagtggatgttcaagatagaaagcgttcagaatacatgggacgagctatgcatcttcttgaaattgtagggttaaaggggtttgaaaaaaaatatccaagtgaactgtcaggtggtatgcaacaaagagtgggaatcgtacgttcccttgtccatgatccatcattacttctaatggatgaaccttttagtgcgctcgatgcaatgacgagggagtctatgagtgtagaattacagcgtatttggaaagaaacagggaaaacaatcctttttattacacattcaatatctgaagctgtttttttaagtgaccgagttgctgtaatgagttcaagaccggggagaatagctcgtattataaatgttggactccctagaccacgttctattgagattatgaatactgatcaatttggtgtatatacaaaacaaattagaagagaaattgaaggtgatggtcaggggatttcccctaagttgataagtgctcagcaagcgtgacgaaatttaggaaagaatattacagaggctctctagtctctgtaatgtttctactatataaaaacgaacaatagaattataaggagtgaaaagatgcttaaaataatcagccaaaatagaccttgggacctaaaggatttaagcatcaggatacttatttttattgcgattataactttatgggaagggatagttgttttatttggtgtatccgaaagaatttttccggcgcctagtagtgtatggacaattttattagcaaatttaacaaatggaacatttcttaatcacttttatataacatttatccaatcactaattgggttcatcattggcagccttgcaggggtcattttagcggtatttgtgtcagaattttcgttgattagaaaattaatctatccatatattctgggacttcaagctgttccgattgtagcattggctcctttgtttattatttggtttggatttggtatgtcatcaaaaattgcactaactgtaactatcgtattttttccagttttaattaatactgttactggtttggagaataccaatcaatcacaagtgaaacttctaaaagtctattctgcctctgcatggcaaatttttaggcgtgtaaagttaccgaatgctcttccctatatttttgctggccttgaaatagcaattgtattaagcgtcgttggagccgttatctcagagtttgtaggttcagaagcaggactcgggtacttaattattatttataataatcaacttaacatggctgcgcaatttgcggtattaattgtcttgggcgtattaggtattttacttagttttatgatcaagtggctttcgaagaaaatgatattttggcaacaacctattcaaaatacaaagggtctttagttcaatccgagcatagtaaataactaaaaaacaggagtgttttatatgtatggagagaaaatcaatactcgttggccagatctagggataatagattgtgatattcataaccatatgcctttaatagaggagttgtcgccgtatttgtctagtgattggcgtgattactttatagaacgtcagataccagggtttgacccgaacttttaccctaaaaacagcccgttatcaactagaccaggagtaactcctttttcaggtgcggcaacagcttcccaagttgaacagataaaagaacatttagatttatggaatgtgcgctattcggttcttaactgtatcaccgtggtccaatcattacaaaatgaatatttagccgtggaactagcaagagctattaacgattggcaagaagcggaatggttacagaatgatagtagattaaaagcttccattataatagcagaccaaagtccaatggacgctgttagagagattgagcgtctaggtgatcatccaggtttcgttcaagttcttttacttgttcgttcaagaatgccttatggaaaacggtatttctggccaatttataaagccgcagaagctcatggcttaccgatatgcattcatgctggtggctcggcagggaatcccacaacacctgttggctggccttcttattatgcagaagagtacattaataactcggctgcatttcaggagcaagtgattagcatggtaagtgagggggtatttatgaaattcccaaacttaaaagtagtcctggctgaaggtggatttacatggatgccacctttaatgtggagattcgataagaattggaagggattaagaagagacgttccttgggtcgatcggtatccatcagaaatcattaaagaacactttaagttaacgattcaaccattagatgaaccagaaaatccaaagtatttagcagaagtaattgaacatttgggttcagaagatatgttgttgttttctacagattttcctcattggcagtatgatcaatcaattgattctatgccaaaaggtatctctgaatcattagaagagaaaatattgcaagggaatgctagaagcatatacacgaaactgggggtgcattatgctaaaccaagcagttagtcatttgaataaagaattatctaaaaagaaacaacaacactatattatagattgtgatatccatcatgactttccatcaccagatgttattttaccttacctttcagacagatggcgggagcaccacctcacatatggattcaaggaacatcatggatttgttcatagtttcgggctatatccaccagtaagtccatttgcctctcgacaagatggatggcctcataatggagctaggccaggtacagatcttgaatttatgaaagcccaacaccttgaaagcaataatgtaaagtatggaattttaaatactctatttcctgtacaaacgcaattaaatgatgaatatgcaagagcgttagccagagcagtaaatgattggcaaatcaaagaatggttagaaaaagactctcgtcttcgtgcatctattattgttccttatgaaaacccggaatttgccgtagaagaaatagagcgggttggaaagcatccaggttttgtccaaatcatgcttctttgtagaagtaaggagccacttggaagaagaaagtattggccaatttatgaagctgcagaagcgtatggactacccataggtatgcatattattaacggggggatgcacggcaatacgtcttctggttggcactcttattattcggaagtacacacgtcactctcgccaggtgcacaagtgcaggttgttagtcttgtttgtgaaggagtctttaagcgttttcctaagttacgagttgttctaattgaagcaggatttgcatgggttccatctttaatgtggaggctagataaacaatacgttaaacttaaaagcgaattgcctcatttaaaacgtcttccttccgaatatattagagaacatttccgttttactacgcagccaatggaggaaccgactgtaccgaaacatttctatcatattttagagcatttaggatcagacgatttgctgttatttgcaacagattaccctcattgggattttgatgatccactcaaatcatttcctgtaaaaatcgagcaagagctaaaacaaaaaatatattataaaaatgctgaatctatttatgattttaagaagggagaaatcaggtaatggctcagtatattgtagcgaatgttgatgaaattcctccgggtgagagaaaagtaattgatataaaaggacgatcaataggtgtgtttaatataaatggggatttttttgcaatccgtaataattgtccacaccaaggagctcctttatgtgagggtggcatctcaggaattattacttctcaagagccaggtgaatacaattatagtcgcgaaggcgaatttgtaaggtgtccgtggcattcttgggaattcgatattaaaacgggtcagtcttattttgatccaagaaaaacgcttgttaaaagttacaaaactaacacggaatcaggatgtaccgtccagctaggagaaacccaaggaactgaaaatagattagaaaaagggccgtttgtggtagaaagttatccagtgtctttagaaaaggagtatgttgttataacagtttgaataggctaggtgcatagtcactccggctggatgtggatttattataatctactattcaggtgggtggataacttcctctttatacagagggttatccaccttttttgttatacataacagatctgcagaatttatcgatattctaggtagatttgccctggcgaattcttttatgtggaataagaaactggtgggacgagtaacctgtcccttgtgtcccttggtgggacgaggaacctgtccccgacgtccctaaatatttttctgaaaattctatacaggtaaacgtctaatgtgctatatttaaaataggtaaaaagtcgttcttttttttgagcgtttacctaatgaacattagttaggtaggagaaatgagatgtctacaaaagaaagcattatcgaggcagcaacagtaatctttgcaaataagggctataaaggaatgactatgaaggaaattgcaagtgaagtagggataaaggctccttctgtgtatgcattttttagaagtaaagaggatgttttcttgcatatttatcaagaggttctaaaaggtcatttagaactaactatgaaaaataacaaacagtctcatcataagtccgtgaaagagcagttagatcatttgctatatcatgtccttgattttcagtttaaggaatcactgaaaatgaaagtctacctgcgcttaatgctatttccgccagaatttatgaaagatacaatcaaagaaggtctattgcaagtggaccggcaggagcatgcgatgttttgtagcatgtttgaaaaggggatggaatcgggtgaaataaaacaagcggatagcagcaaattagcgacttctttgatttgtatgatggatggactattctgggagatgcaacgttatgagaaagaaacactttataaccgttttgaggtaatctgggaacagttttggctgggtataaaaagttagcattactattgggtatttagatgatagactctttatttctaatgattaaaatgcaagaaaaggcaaactaaacgaaagcttaggacgcaaagccacaggtctaaggtcgagtgactatgacagctgggttgcctcatacatggagggattagcgatgcaaggtcaatcaaatgagcaatcaagtgagttagataaggagtggatgaaacttatcgaaagtgctcgtaatatagggatgacgatagaagaaattcgagaatttttagcaaagggcaaggagtgaagatgcggtgtgttactccttgagatgaagggtttttgctgggagtgtttaaacgctcaggtgaacgggaactaaagaggtgttcagatacataaagctagggtgtcggttcgatataatactagcttttatgataagcggaaaatgtcgaataataacagtaggatatctaataatagagtgataaaattaatttaaaattcaagtgaatgtctagttaatatcagatttgtatttttgtgggaatttttttgacgtgagatatggagagaagaaaatgagtgaaagcaaagcaatggaagttttaaccgagcagcatttaaagaaaatcctagaggatgcatataaaaaaggatctgaatctaccagtgtgacaacaaaacaactagtagaggaaatttccaacgtgttaaagccttttgtgccattgaataagaacaattctattgaacgctaagcaaccgtacttgtacgcaggtcttgttgcttagcgttttttttgttggtggaccagggggacaggtacgttgtcccagcgatgagatgatttcatgctgatttgatacgagattaaagataaagttaaagaaggggacgaggaacctgtcccctgtgtccccttgacaatggtaaataattcaattattatagttatatcgtatcacagcaacggacatgatgttgatatgataagactgctttttaagcagttgtggcgttggggatcgcctgttcatctataaagatgaacttctccccactttatatattactatacacctcagttactacgaagatcgtacgtataactgaggttttttattttataaatcaatggggggaaaagagtgaccgatacaagagattatagaattggcttagatataggtacgaattcaataggttgggccatcattgagttagaatacaatggtgaacagtatgataagaagggtcttattgatgctggggttcggatgtttgataaggctgaaataccgaaaacgggtgcatcattggccgaacctcgtcgtcttgcccgttcaacacgtagacgtttaaatcgccgtgccgatcgaaagaaatcaattcgccgattgatagtggaacaagacattctaaatgaagcagaattacaagtgctttatcaagaaaaggaacttttagatatttggacaattagggtagaggcacttgatcgaagacttagccgtaccgaatgggctagattgctcatacagttggcgcaacgtcgaggctatagatcagcccgaaaatcggaagaaaatgataaggaaacaggcgttgttttacaaaatatacgagaaaataagaaattgattgacgggtaccgaacagttggagaaatgtgggtgaaggaccctcgttttcaaggccgccgtcataattcacgatctgaatacgtatttaatgtcacaagggaaatgcttgaagaggaaattcgaacattatttcatactcaaagggagttgggtttatcgtttgcttcaaaagagatggaagaatcttatctatcgatttggggaaagcagctaccatttgcaagtgggaaagatattttaaaacgggtgggtttttgtactcttgaggaacaagagcgccgttttccaaaagcgacgtttacttttcaatattttatggtattagataaactgaaccgattaaggatcaaaccaagcatgcgtcctttaacagaagaagaacgtaaaagtacattacattatttatttgatcgagatgacttgtctaaaaagaaaacgccacccaaagtaatgtataaagaaatccgtaaacaattgaatctagcagcaactgaaacgtttaatgagctgacatatgatcctaatgaatcgatgacgaaaaacgagaatgttctctttgtgaacttagacgcctattatcgcattaaacaacaatgtgatttacataatgaaagatatggtccgcgtgactatgatgcgctaggttatgctttgactgtttacaaaacagacaaagatattcgtcaatatttacgtaataaaacgaatctagctaataggatttactcggaggaacttatatctaatcttttatcgcaatcatacgctacttttggacatatctcgaaaaaagcgttattagctattcttccatctatggaaaaaggagatacgtttaaggtagcagctgataaaatgggctatgatacgaccgggttacaactagtaaaaaaagagttattattgccagttattcctaatgatataacaaacccggttgttatgagggcattgactcaagctagaaaagtggtaaatgcaattattaaacgtttgggagaacaaccgctttctattcatattgagttagcgcgagaccttttaaaagggcatgatgaacgccggaaaatctcaaatgaatataaacaaaatcataagcgtaatgcgggggcatataccattcttaatgaaaatgggattatcaacccgcgtggttatgatattgtcagatataaactttggcaggagcagaagcaaaagtgtgcttattcagggaaagtcattccgtcagaaactttttttggtgaacttaaaaaagagagagggcaaggggcacccactttggatgttgaccacattattccttactcgaaatgctttaatgattcttattctaataaagtactagtttatagcgatgaaaatcgtaaaaaaggaaatcatttgccttttgactatttgaaagaaagccctagtcgatgggaagagtttgaaacttatgtactgactaatgaatttccaagagcaaagcgagaacgattgttaaaaaaacaattttcagaggatgaagagagtgtgatgaaagagcgtcatttgaatgacactcgctatgcaagtcgatactttaaacaatttgtagagaagtctttacaatttaagaaatcaaagaatcaatttcataaaaagagggttgaaacagttgctggaagagttacagctcactttcgtcaacgttgggggtttgaaaagcatcgtgaaggcacgcatcttcatcatgcccttgatgccattgtcgtcgcctgcaccgatgcagcaatgatacaggccctttcgttgtatcataaacagaaggaagaagggaaaaaagggtatattaaaaggtttccgctcccttggataacgtttcgcgatgatgttttgaataagctgtcagaatcagccatccctgaacaaatttattctgcgttagtttctggaacaacattgccatcgtatatgcttgtttctcgcatgcctagacgatcagtaacaggtccagtccataaagagaccatttctaaagatggcggggtggatgaaaaagggaaaacgcttattgttaaaaaagtccagcttcaggacatcaaatttaacaaaaatggtgattttttaatgtatatggaagagaccgatccagcaacatataaagctattaaagagcgatatctttcttttaataaagatgctaaaaaggcgtttcaagacccactttacaagccaagtaaaaaggggaagcccaatcaaataaaaagtgtgaaagtcattgttgagaagaaagcacatgtacgaaaagtgaatggtggtgtcgctgaaaatggtgaccttattcgaatcgatttttttcaaaaagagggtaagtttttcatggttcctctttatacttatgatacgattcaatctgacctaccgaatcgttatgttgtaagtgggaaaggttatcaattatggcctcaattaacaaatgaacacaaatttatccaaagtgttcatccatatgaattattaagagttgttaagcgttcgggtgacgatcggtttctatacttagcttctattaatatttcaaataatgtattgaaatttattgagcctaatttccctcataacgattatattgaaatctcattagggacgattaaacatatggagaaatatgatgtgaatgtactaggacaagtttctctaaaagcaacgggaccaagattaggcttcaataatatgaaagctcaaaaaaataaagttaaaggctagtagaattttactagcttttttgtctagttttctacttatttggtcatactgtttactagaaaggggtgtatgatatatgagttggaggcatgtaatgattacgaagcctggaaaactatcaatcagacataatcaattggttgtcaaacaggaggtggaggtgaccattccacttcaagatatttcaacaatgacgattgaatctcaagctattgtactcactcaaaacgtcttaagtgcttgtgcggaataccgtatcgctgtcatcatttgtaacgacaagcaattgccaaatgggatatttacttcttatcatcaacattcgagacagttaacggtgctagagacacaattaaatttatccaaaccactaaaaaaacgaatctggcaaaaaattgttaagcaaaaaattgaaaatcaagcaaggtgtctcgaattcctaaaggtagaaggggaagcaaaattaagagggctggcaaggcaagtggactctggggatacaacgaatcgtgaaggatacgctgctaaattatatttcccactaatatttggatctgattttacgagacgttcgaatcatccaataaatcgaatcttaaattatggctatgccatcatgcgagggaatgttgtcagggcgttagtcagttatggttttactccttgtttagggattcaccatgatagtcagaccaactcgttcaacttagctgatgattttatggaagtgttacgcccacttgttgaccttcatgcggccaaccttgaccccgaagtttggaatgttaacactcgcgctagtcttgttaacttagcaaacatggagttgaaaatggatcaagcgacatactcagcgtcagcagctgtggatgaaatgatcaaaagctttgtggccgtctgtcgtcaaaatgatctctcttacttgaaattaccacaaatattacctttaacattacatgaagcagtatgaggcagtttatgagaattgttttattttttgaccttcctaccaaaacagctaaaaataaacgagattacattcgttttcgaaagtatcttttaaatgaaggatttgaaatgatgcaatggtccgtctatacaagaatctgcaacaaccatgaatcaatggaaaagcgaatgaatctagttcaaaaaaacttgccccctaaaggatcagtccgtgccttgcctgttaccgaaaaacaatatactaatatgcgacttatgctaggtgaaaagacttctaacgaggaacatttaaaaattaatcaaatgacgttattttgaataaaactgacaaacattggagaaaatgatgattttgtgtatatgcaaaaggttttaggtgaatactataaataattagtacaaccgaacgggcttttttgaacaaaagataaaatatatccttaatgacaatgtaatcctttgtttttaaaagtcaaaaaagccccatacacttgatgtaacggggttttttgacggtgtatcatatcacagcaacggattagatggagatatgacaaacaatccatttgatatatgcgattcaatatcatatcacagcaacggattagatggagatatgaccctatacccgataagaaagtaaaaatttctatcatatcacagcaacggattagatggagatatgaccatgataaagagttacagaaggattagtgatcatatcacagcaacggattagatggagatatgacctatatattagtgcagaaacagggagagaaatcatatcacagcaacggattagatggagatatgacagaccaggacagaaccgtgaaacgatttatatcatatcacagcaacggattagatggagatatgactaacttatgaagatctataccagagtaataatcatatcacagcaacggattagatggagatatgacaacctagac

SEQ ID NO: 398 - DNA, 13611 bp, synthetic construct
  source 1..13611: mol_type = other DNA
  misc_feature 1..13611: note = Synthetic
aagtattataagatgtaagagagcatagggaaaaacaataatggtacttgcaaaatagtggggatacaagaaagaacctttttagtatttttattgaattatttacaaaagctacattacgtaatataataaaacatatcatagttcagcaatggcaattgtgtttctatgataagggtcgtaccaagtacggctcgtggcgtttggggatcgcctggccctcacgcagggtctctccccaccttaacaaagtaaattatatacataaaagcaaaagaccaaagtgaatgcaacaactaactttggtctttttatatatctttttagaaaggggaaaatttatgaataacatggattaccggttgggactagatattggtactagctctattggttggggattagtagaaatgaagtgggatgaagatgacgaactttatgatttagtgggtattcttgataaaggggtaagaatgttcgatcgtgcggagattccaaagactggtgcctctttagctcttccaagaagaattgctcgctctacacgtagacggttaggtagaaagtgtgaccgtaagcagaaaatccgtcaattgatcataaagaatggattaatatcaaaggaacaaatggaaaaactctatccacttgaacatggcagtattgatgtctgggatttaagattagatggattagaacggctattaagtggaaaagagtggacaaggctactcatccacttatcacaaaagcgtggctacaagtccaatcgaaaatcagaggaaaataataaagaaaccggagtggttttaaacagtattaaagagaatgagatgaggctaaatatataccgtaccgtgggtgaaatgtggatgaaggatgaagtattcgcctcacatgataaaaggagaaactctgatgattcatacttattctctatttcccgttttcaacttgaacaagaaattcgaacattattttcgtgtcaaagagaatttgggtccacaattgcttcgattgaactagaagaagattacttaaagatatggaaccatcagcttccctttgcatccagtgatgatattattaaaaaagtaggacattgttcaatttttcatgaagaaaaacggataccaaaagcaacttatacattccaatacttttctgcattagatgccttaaatcgtgtacgtgttggaacagaatatcgtaaacttactattgacgaaagagatgaggtacttactaaattatttaaccgaaaagattattttaacaagaaaagcttgcctgatataaagtattctgatgtaagaaagatgatttcattgagcacagaggaaaaatttaaaggccttatttatgatcctaacgcaacgctcaaccaaaatgaaaatcaaacctttctgaacttgaaagattattatactatccatcaatgcctatcttgttatggtaaacagactggtgtatcgtttaccttcgatgattatgacatagttgctcatgctcttaccatttataagacggataatgatattaggaattatctattaagcaatcgcttcaaaaataaatttactactgaattaatagatagttttttacatttatcgttttctaaatttggccatctctcctcgaaggcaataaaaatcttgcttcctgaaatgaccaaaggactaacctttaaagaagcagcagatgtattggaagtagatacaacaggattaacgaagaagactaaacaaaagcttttacctccgattcccgatgaaatggcaaatcctatagtcaaaagagctttatcacaagcgagaaaagtagtaaatgaagttattaggaaatacggttcaccattatcaattcatatagagttagcacgtgaattatctaaaaaccatgaggaaagaaagaaaattacaaaaggctatgatgagaatcgtaataaaaataaggccgctattgctttccttttggaaaacggtatcaagcagcctactgggtttgatattacaaggtataagctttgggaggaacaaaatcaaacttgtgcctactctataaataagattccaatagatgtatttgttaaagagcttcagaaggatcgctctagtgcgccttcgttagatgtcgatcatattattccatatagtcagtcctacatggatggatatcagaataaagtactagtttatagtgacgagaaccataaaaaaggaaatcggctcccatatgaatatttatccactatccctggtcgttgggaagcatttgaggagtttgttgcggtaacttacaatactaaaaataaccaattcaaaaagaaacgagatcttttgttgaaaaaggagatttctgaagaggcacttttcgatttaaaagaccgacatttaaatgacacaagatatattactcgttactttaagaattttattgagcaaaatttgttatttaaatcatctatggacaaccgtaagaaaaaagttatagccgtgtccgggcaaattacatcctatttacgtaaatggtggggacttaataaagaccgtaatgcaacattccttcaccatgctatggatgcaatagtagtagcatgtgcagacgaccaaatgattaaacgaatcagtgactataataaacagaaagagaatggatataaaaaattcctaactcgttttccagagccttggtatggcttccgtgacgacatttatactattttaacggagcaaccaatcccagaagagttgctgaaaaagattcagtttaatttggataaagattatctccttgtatcgcgagcaccacgctattcaatcacaggggaagcgcatgaaatgacagtaagaaaaaaagtcggagtagataaaaatggtaaaatactaacaaccaaacggattcacttgcgagacattaagtttgatgctaatggagattttgaaatggtcggaaaagatacagacttagcgacttataacacgattaaaaatcattacttatcattcaacaaaaatgtaaatgtagctttttccgatgaaaatcttccttttaaaccagtcaaggaagggaaggatcctaccaaggcaaataaaattaaaaagataacagtaatggacaccgcaaaatcgtatgtccgggagattaatggcggtataacaggtaatggttcattagttcgtgttgatatttttaaacgagaagaaaaatatatcatgattccaatttatgtagcagatactgtactatctcaattgccaaataaatatgtaaaatctggcaaaggatttgaacattggccagagttagatagtctttgtgaattccaatttagcctgtatccatatgatatactgtgtgttgaaagggaggcttctgttgagttactgcattttgtatctgcggatatttctggtaacaaattagaatgtaaattaataaattcaccatctgataaaactgagcatcgcttttccatagggacagccaagaaactagtgaaaatgaagagtggtatacttggagaactatatattgttaaacaagaaaagagacaaagctttaacaggaaagaaaaaataaaaatgctgaatgaaaattttaattaaacaacatggggtggtaaagaaagattttctttactgctctttttttattttttgtattaaattggtatttttggtaattaatataacaatagatatggggagggtgaatttgtgagttggcgacatatcataatatctaataacggtagactatcggtgaaaagaaaccagttagttattcaacaaaatgaaatgtatacagttcctttgcaagacatagcttcaattctaatcgaagcggaagcaaccactattacaacaagattattgagtgaatgtgcaaatcaaaaagtttctatcatttcttgtgatgaaaaaaagctgccaaacggaatttggcttagctttaatcaacattcaaggcaacttgcggttcttcaaatgcaattagcattatcaaaaccttttaaaaaaaggatttggcaagcggtggtgcaacaaaaaattactaatcaagcattatgtcttgaatttgtgaagaaggaaggaatgaaagaccttaggtctattgcaaaaacagtagagtcgggggataaaactaatcgggaggcatacgctgcgaaaaaatactttgaatatctatttgaaaaggggtttacccgcagagctgacgaccctataaataggatgcttaactatggttatgcaattatgaggggggcagttgcccgtgtgttatctgtttatggttttaatatgtgcctcggattatttcatgataatcaattaaatgcctttaatttagctgatgatttaatggaggtttacagaccgatggtagatttgtatgtaagttataatgtaacagaatgttgggatataaaagtaagaacggggttagtaaatctgctaaatcatgaagtgttaatcgctggggagcgatgttccattacaacttccatagatagtatggtcaagagtttagttacttcatttcgggaaaatgatttaaaatatatgaagctaccagaacttttgccgttaaaattttatctcaatgagtaaatggatgagaacaattattttctttgatttaccggtgaagacgaaattacaacggaaaagttatactcaatttaggaactttcttctagatgaggggtttatgatgatgcaatattcagtatattctagaatctgtaataatcatgaatctgcagaaagattagtggctcgaatatcaaaaaatctcccgcaaactggctctatccgctctctaattataactgaaaaacaatatgagagaatgacaatacttttaggacaaaagctccctaatgaaataaagattacaactaatcaattatcattgttttgaataaattgtatcttttttggagattataatttaatttgtataatttctaaattacttggagaaactaattatatcaagggttattttttagaaaagtaaataaatcaataaaatatatctgttaataacttagtttttttacacaaaaaagccattaatcccttgagattaaaggcttttttgcatacgtatcatagctcagcaatggcagttatggaactatgacacgaacacccacaaaaagggtgttttgccttatcatagctcagcaatggcagttatggaactatgacttattttgaaatgccaaccaatgtagttgatcatagctcagcaatggcagttatggaactatgacgggttatgatgagaatatggtcgatgttttatcatagctcagcaatggcagttatggaactatgactaggttatacgcttactggtgacacaagcgatcatagctcagcaatggcagttatggaactatgacaatatttacagagataaaataattaaaagtatcatagctcagcaatggcagttatggaactatgacgtatttttcattcactagcattttgtcaatatcatagctcagcaatggcagttatggaactatgacttgaaaacgtaatggaagttaaagaaattaatcatagctcagcaatggcagttatggaactatgacgacatttggtacggcaaaaggattcttagaatcatagctcagcaatggcagttatggaactatgacgaattattctgtcgatgcaaaaggaaatgtatcatagctcagcaatggcagttatggaactatgactcattgtgaacttacggaagaaaacaaagcatcatagctcagcaatggcagttatggaactatgacataaaataatgaagctgtttgtagtaaattatcatagctcagcaatggcagttatggaactatgactgctgaaacggtcatgaaacattatgtcaaatcatagctcagcaatggcagttatggaactatgacggctaatgtcataatgttagacgcaaatctatcatagctcagcaatggcagttatggaactatgacttgttccgtgttgcctatctaattttaaaaatcatagctcagcaatggcagttatggaactatgactggtatagatgtgaacagtagttatgccagatcatagctcagcaatggcagttatggaactatgacgttaggggtagtagatgtaaatcatattttatcatagctcagcaatggcagttatggaactatgacgattattatgacttatatagcgtttattttatcatagctcagcaatggcagttatggaactatgaccaaaacccttactctacgattacaagcgtaatcatagctcagcaatggcagttatggaactatgactgcccaatgattgtacatctaatattcatcatcatagctcagcaatggcagttatggaactatgactcattcccgcgggagaacgaccgaataattatcatagctcagcaatggcagttatggaactatgactaggtagaactcatggaacggtattaacaaatcatagctcagcaatggcagttatggaactatgacagattatattcattaaatctacttttttaatatcatagctcagcaatggcagttatggaactatgacgaaacattagaagaacaactagcgaaagctatcatagctcagcaatggcagttatggaactatgactaatattaaggtcttaaactaaaccatacaatcatagctcagcaatggcagttatggaactatgaccacctacacagacaaatagcaaacattctgtgataaaataatagtagcaagttgtatgtattatagagaattggagggaattaaaatgaattggcatgatgttcaggaaaaatatcctgatcaatgggttgttgttgaagcgttaaaggcattttcagatgaaaaaaaaagaacgattgaaacagtttcggttattgaaaacacatctgaccaagattatgcatggaaagtatacaaagagctttcattacaaaatcgaaatagggaactttacatggtccatacttctaatccttccattatagttttagaacaaaatttctatggggtacgagcaagacgatgaaattttatattgaagatcatttgccgtttgttacattgactgtcgaataaatataggtaggtgaaatactatggctatccgaaaagaagaacttaataaaatgtttgattccttaagaaatgaggataaaaaagcagcttatgattttatgcaatttttaattgaacgttcaaaaaagaaacctacaccatggaaaaaaatagatgagttagagccagattgcgagccattaaccgaagatgaattagaacaaatgaatagtaaagaaggctatatttcaggggaggatgcaaagcgtgagttcggactacaaattgatttaccataagtccgcggttaaattcatagctaaacaagataaagcctcccaagaaagaattgctgctggattgaaaggtcttctgaatatcccatcagaaggagacataaaaatcctaaaaggatattcaggattatacagactaagaatcggaaattatcgaattatatttgaaataaatcatgatgaacaagttgtatatattcaagcaataggtagtcgtggagatatttacaaataacattttatggattgatgtttaagtaacaaaaaccttgccaatatgtaataattttacatgggtataccatggttaactttaccaagcaacctccacagcactcttatgtccgcctacaaaaacatcaccgatgaaaaattccgctattacattttaaaacaaaaatcagacgtatataccgccatgcgcagcttttttcgaaaggaagatgcaagtaaggcatttgcgtaaatccctgttgaggcaggattttttttattcctttcgaaaataaggtttatagcataattttctaacaactgaagaaaatactcctgtgactatataagaaggagtagataataatggaacaaacactttatgaaaaaattggtggagaagctgcaataggaaaagtagttgattatttttacaatgaattggtccttaaggatgatactgtcaaccatttttttgaaaatactgatatggatatgcagcgtgagcatcaaacaaaattcattagctttgcgttgggcggtccgaatcaatattcaggtcaatctatgtccaaagcacatgaagggatgaatttgcagccagagcattttaatgcgattgtaacacatttgcatgatgcccttgctcacttcggagtcgaagaagaggacatagatcaagcgttaagcaaggtcgccgctctaagggatgatatattgtatcaatgagcatatagaattatttttaacacacaatgggcatccaatagtcgaaactcgatttggacaaccccttgcgctttttattatttctacttctaaaaagtatattgaggttcaattgatttttttggtatgcacttgggctaccaagttttcttttttcattaagagataaaacaattcgtaggtaaaaagtcatagatatatacaaaagtcatatgaaaagtcatgaaaaagtcatgaaaaagccatgatttgtaaatataaggttattttacgtttataataaatttataaaattgttggggaaataaggtataaaggcaaaggaaagggactctttataaatagtggaaaggttcaagcttgaagggggggtgtgagaaatttgctaagtattgcaacaataaaagcggaaaatgatgaagcagcatttttatttgaagtttatgcaagttcaagaatagatgaagtagctgcatggggttgggagaaagagcaaattcatcagtttttacaaatgcaacatctctgtcaacaacgttcctacgagctgcaatatcctcacatggaaaccaaaataatattttttgagaatgaaaaggtaggtcgtttgttgttagcagatttcaaagacaagctagtgctagttgatattactttgctgtcaaactatcaaaataaagggattggtacaaaagttttaacagatttattgcaatatgcaggccaacaaaacaaaatagttcagttacatgtcttttctaataatgaaaaagcaaaaaaattatacgaacgattagggtttcaacaagtttcaatgaaggatatgtatgtacaaatggaatggtcaggttattgacaagttatcaagattccttcaagtaaataaaaaaaggtttacatcaaattttttaaatcgtttattcacaaaaatattatagaggtgatttgtatgggagaaagttatgtaggtgaaattcgtatgtttggtggaaattacgctccaagaggatgggcactttgcgatggctcggttcttaatattgcagaaaatgaaatactttttagtttaataggaacaacatatggtggggatggtgtaaatacttttaaattacccgatttaaggggacgtattccaattcatcgtagtcaaactcatccattagggcaattaggcggtgtagaaaaggttacattaacaagcggtcaaatgccagtgcatacacattcggtaaatgcagttgcggttgaagctgataatgaatctccaaaaaatatgctttgggcaaaaaataagactagtgagagtacgacagattataaaaactattctaatgaagctcaaacgaaagtttctatgaatgctagtgttatttcacacgaaggtggagggcaaccacatgacaacatgatgccttcattagctatctcttttattatttcgttatctgggatttatcccactcagccataacaattctaaattatagtcaaaaaggaggattttagatggatccatttttaggagaaattcgtttatttgcgataaattttgcaccaaaaggttggctgccttgtgaaggtcaaattttacagattaatcaaaaccaagcactttattcattattaggtgctgtgtacggcggggatggtcgcacaacatttgccttacctgatttacgtggtcgtgttcctatccattttagtctaacaaaaccactaggcacttataagggtgaggaggagcatacattgactattccagaaattcctatgcatactcacactgcatacgcttcatccacaacagctgaccaaaaatatcctttaaataacgtatgggcaaatgcaaacaacttatatcactcaccaactgcgctagtgcagatgaatccgtccgcgttatcaaatgctggcggtggacaggcgcataataatatgcagccatttacagttttaaattttcacatcgctacaagtggaatttttccatcaaggaattaaaaaggagcattcctgttagaaggattttgggggacttgaacaaaaagagccctcttggtatgatgcggggtgtcaaatcgtcgacgaaatgacccctaatttgttaaccaaggaggactccataatggattttaaacaaaaccagaaaataaatcaagtcactgaaaaaacactcgttgtagggattgatattgccaagcgcacacattacgtttgctttgtggatgatcgaggacgagtgctccaaaagtcattctctgtttcccaatcgcatgatggctttgaacatttttatcatcgaattcttacagcaatgaaagagaacgggaaaactgaagtcattgtgggtgttgagcccacaggaccctattggctcaatttagcctattttcttgatgagcgaggcatccccctcgttgtagtaaatccaatgcatgtgaaacgttcaaaagagctggatgacaatttaccaaccaaacatgaccgtaaggatgctttagtaattgcgcgccttgtaaaagatggtcgattcagttatccacgaattttgaaagagatagaagccgagcttcgcgttggttccacctttagaagcaaattgactgaggaactaggtgcagtcaaaaacaaaatgattcgttggttagatcgctatttccctgaatttacacaggtgtttccgtcattcggaaaaatggctttggctgcactaaaatgtactccatttccaagtgatctttatttgaaacagcctgatgaattacttgaggaatatcgcaaagttgaggggatgaaagctccccaaagaccgaaaacagtgcaacttattgatgttgcggccaattctattggcataacagaaggacttgagatggcccgttttgaaattgccacactggtccgccgttatcaccaactagaacaggaaattcaaacacttacagagcaattagttgaacttgtgaaaacgtctgtagagtacgaatggctatcaacggttccaggacttggagatattacgattgtagacctgttagctgaaatcggaagtttttcacactacgaggatccacgccaattaatcaaactcgcgggattaacgttacgtgaaaattcctctggcttgcataagggacaaaaacgcatctccaaacggggcagaagaaagttacgcgccctcttgttccgggtaatgatgccgatgattcgccataacgaggctttcagaaagctacatgagtattacactaaccgtcaggttaatcctttacgcaagaagcaatccatcgtggttttatgcggtaagctattaaaagtattacatggaattagtacgaagcacaaaacgtttgacgtacagcgaatgatgagggatattcccagtctagtggaggctgcataaggccctatatcccctttattaagacctagacaacaggatgatacggagaagctggcaatatattcaccattcgacttagagtccctaaaggagcttcgctagcctctgccttatgactagaccgaacgaaggaatgtaggcacttagatgcccagagacatgggagggtacgtcatcataagttacgcagagatccattgtgcatcgcataattacctatcactactttccactattatccagtagtgaccgcgtagcgtacccatgtgttggaatagtttcacataatatgaaaatagtgttaagaggcgtgtcgaaaaatatttttttgacaccccaacaacgggtcaaaccgttgataaatcaatatttatagagggaggattaataattatgtcagaagcatatttaggtgaaataagaatatttgcaggtaattttcctccaagaggatgggcattttgtaatggtcagctcatgtcaatacaacaatttcctgcactattttcaattctaagtacacaatatggtggtgatggaaggacaacttttgcactacctaatttaagtgataaggccccaatgcatcaaggtataggcccaggattgacagaacgaaaagtgggcaaggctgttggaaatgagacagttacgcttatcacatcacagatgcctattcattcgcatgccccaatggcaataaatagcccaggattatctaatgatcctaataatgggtattgggctacctcggttggagaaggaaaacagcttatacctaagtatccactatttagcggaaataatgcagatgtacaaatgaatgcacaggcgattaacccaactggaggcagtcagccacataataacatgcagccatatttggcattgaactttattatttgcatcgaatacggggaatttcctgcaagagattaatatctttataaggaaagggtaatcatctaatagggagatgttaagcctatgaatctattaaaggaaaataggaaaaaaataaaaaggaatttacaaaaaaaggcttattatatggctcgtcttgtaatcttatttatatttgtttttggaacatttgctcatgttattccaaatacgatacatgcagctccaccaagtacaggaactagtaatggcacctatgattttagtgatggatttggtgaagctgttggaccaggttttataaaacagggagataaatttgttgttagtgatatagtacaactttatgatactgcttatggaaaagccatatacaacccaagtcaagtaccttatgcagaggaaaccattattattaaagctgaaaatgggagtgtatgtaaaacattcacatttaaagacttaggtttaagtagcagtgtgggtgcagtttatcttgaaattaaagtggtcttaaagaacatcagtgggggtgagattgcgacactctccaattacggaaatccctttgaaacgacttacctgaatatttttaagttgagtgaaattcttggaaatggaagtgaatataactataaaaatgtagcatcagtaaatataacgtttaagttttcaaaagttcgtaatagcgctgctgatgattattcttattggccagaaaatttaaatatcgaaaatattacaattgcagatgtaagtaatacggtaaatactgccccaacagcaacgaatgttgaggtcgatggtacacttgaagttggtagcgtcttaacagggaattacgattatgatgatgaagatgatgacgaagaaggtacgtcaacgtataagtggtatcgctcggatgatggtagtggaacaggaaaaacagcaataagtggagctacag

SEQ ID NO: 399 - DNA, 13496 bp, synthetic construct
  misc_feature 1..13496: note = Synthetic
  source 1..13496: mol_type = other DNA
actttgaacttgatcagttagaattaaatcgcatttccgagaatagaaggctgtaagaaatttattaaaggtggctatactatgcgtacctggttcaaaaaggttaagtaagatatttgtatctaaacataaagccgtttttgatttaatatagtcaagtcccttcatgttacacactcttttctatagtattatcttcctatgattgattttaacaatccttttgtaaaaccatctgccttttcttccatatcattaagttcttgttttatcttatctatccgttcataccatttatcaattctttcttgattgtaatcttccttagcttcttctttttcaatattttttattaagttattgaagtccctttgcagaattgcccttctatcctctctaattttctttttttcatctcgatcatcatcgttccttccttttatcatttctatggcaactggtactactgctttagcaatttctattgctgctgtagctgcaaattcttttccaattgacccattactggcattaggactattatttgaactaatacgttcaactatttcacaatcattggtatcgactttaaatatatctaattttgcaggttctgatttttggctcatattgttcccccattacatctttaatttattcactccttatgtattgaatattaatattcaaatctaccaaaacaattttagttcctgtttacacaataacacaataacacaacgaaaggcccaattcatgaataagcctagaaatatgttattgcggtttttcttcgttatcatcgaaataagcttgtagttgttcttcagatatccggtatttctgaccaatctttgatgctctcaaaattcctttcttgatatggcgataaacggtcattttagagattttcattatttcagcaacttcttctggtgtataaaccttcattattcaccctcctaataatgaaatattatagttcaattaacacttaacatcaatgtttatcacatgtatacaaataacgtaaacatgtatacattaatgtaaacaagtgttaataagtgttagttgttgttaattgttgttaactgtttttttggttttaaatatagatttaattgtgtcattgtgttattgtggtatttaacattaaaaatataatattgtataataaggagagatatcgttatgaatctaaataatgtactattccgttcaaatgtgtttttacttgaagtggcacagaacttatatcgtactgtgaaaaactttgttatcaagggaggtaatataccgatgacagaaaaagaagaaaaagaattaaacgagatgttagatcggattgaaaagcagcatgaaacacttcgcaaagcaaaaggggaggaatcaccctataaacatctggcaaaacaagataaagtcactgtctatacaaatgataaaaaggctatgaagttctgggaggaataacatggagaaggaatctcaaatatcaaacaatgattcccagaatgaaaaggaattacctttccttcccattggaactattgtgaatgccaggttagaatttaagcatattgaaacaggtgagtctatacaatctcgtccacgtcctgtacttgtgcttagagattatggtgatggcgctgtcaaaattgctacaattacttccagaatagaaaaaaagcatgtacaagagtatggtcatcttctggaaaaatcagaagaatacggtcttaagaaaaagtctgctgtactttgtacaaggtttaatataggtgttctggctaaagaaaatctgtctgaaccctatgcacacgttccgtttacagaaatgaagaagatacttgaaaaagccgaagcattgaataaaaaagagcatggcttgcagataagattagtaagtgaattagaacgataaaacctacttccttaagtatgacaggaagtaggatttttcgatgttagtacccacagattaaatcaaaacttgaaagtagtctggggaaatcgcataatgtaattaagttaaaaatgctaaaggtgctacaacaccttaagccgccacaagggcaataatagaaacaacaagtgcagtgagcaaactgcaactacagtatctttatccatctcatcatcaccaccatttcgaaaaagccattcactctcccaaagtgacttggcttttttattataatctattttagcattaagattttccattaaaaaagagaataatccacattattgcataacggtactaaagaaaagtgcaatatcttaataactaggcgttatttgcccctttaaatgggttgcatattttcattctcatcatccttccagtcaaggaaatgcggcgatataccaataattctagcgatttttaatgctccttttcattgagagaatcaaaggatattaaaataaaaattcatgccccataaggattcaaagccccatggccaactttttgaccgtatggtgcaagcaaatcaattataggcttcttttgcaaaaagtattttacaaccttatgtttctctacaaaaatatggacaagtaccctagctgaattcattttcataattggcaatggtttgggttcacgtgtcaactgcagttccacttgttcaagatggttagagtagatatggacatccccaaaagtatacaatttcgtcaacttccaaatcacacacctgggcgatcatcatcgttaattgcgcatagtttcatacaatatccttctgaaactagtaagtgaattagaacgataaaagcctacatcccgattaagggtgtaggcctcttattattaatattattgcattaatttaaatgtataagttatttttttaccactcgagttttcaaatttaacacggtagtcagcttttttattatcaaccgtccaattcattgttgtagtgccatttttagcaggatattttgttttgtaattcttccagacaccatctgtctttttttgcagtcttgctgtgaatgttccagatgcagagctacttgcttttacagtagtccaaatttcgttgtcataagtcatattatacgcagtacgttggtaaacataattgtagaatgaaccagaatgataatatgaagtccaaatacttcctgtagaagtccaatctgctgcctcagctttttgagtacctccgaagcttgaaaaacttaaaacaagtgcaagtgcaagtgaagcaatgatgctttttttcatatgtattccctaccttcctaattttgtacattataattctaacacaactacacaatagtacaattacacaatttcatattttttctttatattatagatagtcattcttgttacacctgtttttttacttatatttttaactgactcattttcattgagcaaacggattatttcattataaatcagacgatctttcgggtcttttgcatttgcatgatattttgttggacgccctttaaactttcctctttctttggcaatagctatcccttctttttgtgcttccttaatacgtttccgttcttcctctactgtccatgaaaggacagtaaggaatatatcagacactaatttccctatagccttagattctttatattgtgcggtatttaatattggcatatttaacactgtaatatcagcttcaagttccataatttctttccattcttggagtatctcttccttattacggccaaatctagaaagatcatgaataaccagctcatcatcaaaacggagtatatttttcattttttgatactctgtacgtttaaaatctctgccagaagcaatatctataaaaattttatcgcaaccatattcattcagttctttaatttgtctatctacattttgcgtttttgaggagatccgggcataccctatttttttaccttttcccataactaactcttcctttcaatctacttatctacttcatttattatacaacttaaattttacaaacaaaatccacttaaaatagcatttttaattgtctactatgagtgtactcaaaatttacatttcggacttgtgtaattgtgtgattgtgttattaaatgactctagggtggatttttacttgttcaactaacggggcaggttagttcattattgaccgtatatgccatttccaatagatggtaatataatgaatggattattcataaccttaaaaaaagtgatttatttttaaggaggaatgatgaataaatttcaaccattaatgtgggtagttcttacaatattttctgtaattttagtagtaccttctcttttagtagtttcattttcaaacaatccaaaacaagattctacaaaacagaatattgttgcttcaactgacactaaagaaagtaaaaatgataaaaattcgactaatccatccctcgacgtgtcagtctataggacaaacactaaagaaattgaaaatattcctttagaagaatatgttgtaggtgttgttgcttcagaaatgccagttacttttgaattagaggcattaaaggctcaatctttagcagctagaacatttttagttaaacaaatgctttctaattctaaaattaatttaccagacggtactgatataactgataatattcaataccatcaagtatataaaaataaaaaagaactagctaatgagtggcaagaaaattacaaatcaaatatatctaaaattcagaaagcagttgacgctacaaaaggtcagattttaacctatgatgagaaaccaattgatgcttctttcttttcgaccagtaatggatatacggagaattctgaggattattggggtaataaaacgccatatctaaaaagcgttgaaagtccttgggacatacaatctcctaagttccaataccaaacaacaattcaagtatctaaatttgaagagttgctgggaataaatttgaataatgacgttaatatcggtaaggttatctcaaaatcaacagggaatcgtataaagcttattgaaattaatgataagaaatttagtgggaaaacgatcagagataagctaaaacttaattcatccgatttcacatttaaaagggatggaagtaagatcattatttatactaagggtaatgggcacggtgtaggtatgagtcaatatggtgctaacggattggcacaagagggtaaaaattataaggatattgtaaattattattatcaagatgtaaccatttcttctgttgatccctttataaacaaaatgtatgtaaaaaggtaaaaaatacacctctactaaaaggtgcattacttcaataagggagttgcttcggcagctcttttcttaatgaactaacgggtgcgttagttcaacaaggagtataaaaaaagcctgtatcaatgattactcggtaatctaagatacaggctttatatttaggtaactaattattcttatatatatttaaagaatagaggcttttttaacggaaagttactttagcaaacgctggaacaacgttattttcttttgctaactgactgacaattttgtcaatattttttattgtttcaacctgactttctccaggttttttctgaactagtaattcaactattacataattcacatcggactcacctgtttgagtatatcttttataaccatgttcttttaacttttgatcaactttattaaaaaaatcagtcttaactaactgtttaacaactttatcctgttctcttgttaaatctgtttcttttataatttctccttcttttaggttaacgattttatcttttggatccatttccttcgcttgtactaatccctcagaattaagtaaaacaaaacctgccaaaaaactaactaacactagttttaatgtgtgtacacgatttgtcatataatttctcctttagtttcaattttttttattatttgcagaaatacatatactaattctgttttctcttaaaatcgacgaaaacaaaataaactgtttctcatttcatccttgcttttgatgttggtcgatgactttggtgctggtatagccccacatagtccataaaaaggagttttagcatttcccaagaatacttcaagaaaggggtgaccttatgaaagacgatataaaccaatctgaaaaagcatactggaccaaggaagtcggtgaccttttaaggtttttgtggccaaaggctaatgtttttaaatggtaaaaaaagtaaagatagaatacataaacaaattcaaaatttttctttatgcaactatcggggcaggatagttctacaagcacagtgtagtcgaactgtgacgtaataactttttcttaaactaaaataaataaaggaaacgactaaaaaacaccacatataataatattgaaggagttgataactatggaacttgttgtcggactacttttatttgttggtgaaataacaacggcatgggcaatttcagctttgagttattaccaagaaaaatttggcaacaattaatttcttcttcatgaggactaatcaatttggttagtctttatttttttcgcaagggagcagtttgtgtcaactctgcgataaggttcattaacaggggttgctgcggcagccttttgcttatggtactaacggagcaggatagttccataaagagtaagaatttagttgaaaatatattgcattaacctgaccacctcaccaaatactatggtgggaggctaaatatgcgaaaacgtgcttttttatttattttagtgttagttgttgcttttgaggatgttcaaatatctaaagctaatgaaagacctccgaaaaaagtctgtatccaggagtatgaagagagatggacaaaattcgaagataaaattttaggtgatattatttccagttttgatttgaatttagagggttttaaagaagtaacatttgatgatttacacaatgatatgaaaattggtgagaagaacgaggacattcagtctttacagcacctctttgtaggtaatagtcttggaaatatgaaattatttttaaaagataatagaggatatttcctttataaaagaacagatggtaataatgtatttaaagaaatatatcagatgtcttatggtggcatatggaaagttatgagtgaacaagaggtggaggggaagaaaatcaaatggggaaaagaatttgattgggcaaagtgcaaagaagaataaagttcactttttattggtgagctttatttagttcaaaataatcttattcaactaacgggtgctttagctgacgattagagctgtctttaaaaggcagctttttcttatggaactaacggggcaggttagctgaataggttattatcaactccaaaggatttatggtaatatttaggtattgtagaattggtggtgaaataaatggaacctaaatggcttgaatgggcgaaacaactccaatccattgcacaggcgggattaaattattcgaaagatgtatatgacttggaaagatttgaattggtaagaaatataagcgttgaaatattatcgcatcaaacagatatgaacaagacagtaataaaagatctgtttgccaatgaaactggttatgcgactcctaaagtagatattaggtcagttgtctttagagataataagattttaatggttagagaaaacactgatggagattgggctttaccaggaggttggggcgacataggattaactcccagtgaagttgcagtcaaagaagtaaaggaagaatcagggtttgatgttaaagcaattaaattgttaggtgtccttgataagaagtgtcatccacaccctccttcactttatcacgtttataaaatgtttatcctatgtgaaataattggtggacaacctaaagaaggaatagaaacgagtgcagttgagttttttgctgaaaatgaactaccatcattatcaatagctagaaatacagaatcacaaattgaattggcttttaaacatttacataatccacaagaacctgtctattttgattgatttttcaaattgccagttatgcaactaacgggtgcgttagctgaagatcagagctgtcttaggcagctctttctttatggaactaacggggcaggttagtttaataacaaatcctacctatacttaccagtaacaagtcaatccgagggaagttaatatcgttttaaaataagaattaccgtgaggtagaatcgacttaaatgattagaatcatattttttttactaggaataatattaatcttactagcatcatacttatggaaaaaaggagacccgaaagtacccttttgggaggttttaaccgactttgtatttgatataatgtctattcaattatttaatctttttagttctcgtacttgggctgtgttgttgtggctaattggcttttcaattttaatagttgttgtaatagctcaaataaattcttaactaaggttacttttagttttcttgttaaactaacgggtgcgttagctgaaaggagctgtctttaaggcagctttttcttatgcataacggggcagtttagttgaagaaataaattttaaagtaacataattttagttatggtaaaatatgttattgcaacagttagaattattgggaggtttttatatgaaagggaaattagttttaacccttggttttacaggagctttagcattatcaatcggttttgcgaaagatttgcaaagtacagaggcatttgcacaagatggacaaccaaaagtagaagatggacaaacaagtactaataacggagatcaatacagatttgtaacaagagaggaacaagaccgtagagaaggtatggtagctgaaggaaaagatgttaccacagttataacagcagaagagcaaaatatggtagaaaatagttcagctcaccaagggtttgttccacaagaaaatgggacaggtttctatttcgtaaaagagaaaaaaaataagtttagttattaaactaacgggtgctttagcttaggatcagagctgtctttaaggcagctttttctaatgggcaggttagtttaatgaatgctataatagccttaatttcaaaacgactttaaggagttaaactcttatgattatacaaattaactttggtgacgattttattcaatacatttattgttcaacaaaagtaggtaggaagatgaacagtattcaggaggactttctaaattggatttatgacgaggaaaagaatacagaatattgggctttagaaaatggggaaagaattcaccctaattatgatgctaatgcaattgttgaatggttaaacaatgtaagatttaagcgaggaatagcgaaagcgaaattaatcacgaatcctcaattatctgttaaaaagaaattatatttttagagtgtttcttaaatgtttaatgttcaaaccataagattgtgaaaaaatgtacttaaactaacgggtgcgttagttcattaaggatgacaaaaataatcaatctttttataaagtaatcaagaagattaaaaatatatgttgttcgaaaaaggggagggagtagatattgccttcccctttgtgtttacagataaatttttatgactgtattgtttataatgtactcgattttgtatctcaaaacagttagagattgaataggtgcggtttttagtggattaataactctatgtactcaaattcatgtccccaatgtacttatctttgtgtcttcgtacagagaacaggaaaacaaaggaacttaagggaaagtttgacgagacactaaaccagacttataattaacttatcgtagttcagcaatggctttgatgtttctatgataagggcttcggcctgtggcgttggggatcgcctgcccatttcgatgggtgtctccccatttaatctacgagtacgaccttaactattattaatggttaaggtcttttttttctatagaaaacgatttaagggaggcaaataaatgagagacttagattatcggattggcttggatattggaacaaattctgtaggatggagtgtgatcgaccttcggttcaatgaagacactgggcgttatgaaaaatccggaattattgatttaggtgttcgtatgtttgataaagctgaaatacacacaggtgcttcccttgctgaaccccgtcgccttgctcgttcttccaggcttagattgaaacgaaaaagtcaacgaaaaagcgagattcgtcaattacttataaattacgggattgttagtcaggaagaattggatcagctttttccccttccaaaagattttgttgatatttggacggttcgcttggagggcttagatcgctatttaaatcgttttgaatgggctcgtcttttacttcatttagcacagcgccgcggatttaaatcgaatcgcaaatctgaacgtaacgaaacagaaactggtaaagtgttagaaagcatttacgataacagaaaccgtttaggttcttatcgtactgttggcgaaatgtggatgaaagatgggaaattcacacagtatgataaacgacggaattctcctaatgaatacatatttaatgtaagccgcatcgatttagaaaaggagattattactctttttagagcccagagacacttttcttcagggtatgcttctgaacagttagaagaagcatatttgaggatttggaatcatcaacttcctttcgcatctggaaatgatattttgaagaaagtaggctattgttccctagaagaaaacgagcgtcgaattcccaaatcgacgtatacgtttcaatattttgctgctcttgataaactaaataacattcgtctaggtaatgatgtacaaccattaacgcaggaacagcgagagcttgtattaaaggaaatgtttgaaagaactgattatatcaataagaaagcaatacctaaaatcacttactctaatttgagaaagtggctaaagcttgatgaatccattcaatttaaaggtttactttatgatcctacagagaaaataacaaaaacagaatcgaaagagtttattagtttaaagccttattacgaaatacaaaaaattgtaagtctccatcccaaagaaaacagccacacctataacaaaactgatttcgacacgttcggctatgcgttaaccgtttataaaaatgataaagatattcgctcttatttacggaacacgaataacataggaaaaaaagtgtacgatgaagatttaatcgaggaattactggacctttcgtatacaaagtttgggcatctatcctttaaagcattacataaacttcttcctttcatggaagaagggaaatctttttcagatgcagcaaaggaattaggctatgatacgacaggatcgaagaaacttgaaagatcccgactactccctccgatcccagacgacatcacaaatccgattgtaaatcgatcattaacccaggcacgaaaagtggttaatggaataatcaaaaaatacggtcctcctctttcggttcatatcgaacttgctcgtgagctatcaaaagatcacgaggaaaggcgaaagctttcgaaagcccaggacgagaactataagcgaaataaaggggcgattgaagttttaatagaaaacggaatcattaacccgacagggtatgatatcgttcgttataaactttggagagagcaaacggaatgttgtgcgtattcgttacgaaagatacctgccgatgtctttttttccgagcttcgaagggaaagagggggttctccaattctagaggttgaccatattctaccttacagccagagttttatggatagctatcacaacaaagtactcgtatacagtgatgaaaatcgaaaaaaaggaaaccggattccatttgattatttaaatgaaaacaagcaaaaacgagaagagttcgaagcatatgttcaatcaaatcattcttttccaaagaaaaaacgagagtatttattaaagaaagaatacacgccaagagatagcgatatcgtaaaagaacgtcatttaaacgatacacgctatgcaacacgatttttcaaaaatttcattgaacagctgctcctttttaaagaagcaaaggtttcaatggaaaaacgagtacaaacggtaaatggaatcattacttctcattttagaggtcgttggggattagaaaaagtacgtgaagatactcatcttcatcatgcgctagatgcagttgttattgcctgtacggatcagcatatggttacccgagtcacagaatattataaaacgagggagagctctctaaaaccgaaaagacctttcttcccttggccatgggaaggttttagagatgaactgttaattcgtttagctgcccaacctgacccgactaaaatcaatgagtcacttcaactaggtatacctttaccagattatagaatagtctctcgaatgccaaaacgctcggtgacaggttccgcacataaagaaacgattatgataaaaggcggtgtagatgaaaaaactggtaaaaccattaccgttaagcgtgttgcattaaaggacattacgtttgatgaaaacggcgattttaaaatggtgagaaaagagcaagatagagcgacttatgaagcgattaagctgcgttatttagagaatggaaaagatactaagaaagcgtttgaagaacctctgtttaaaccctgtaaaaccggtaaagggaacccaataaaaaaagttaaagtggaatttcagacaaaagcatttgttagggaagtaaatggtggagttgctgaaaatggagatttagttagaatagacctctttaaaaaagaaggaaaatattttgttattcctatctatgttcttgatacgacctcttccgagttaccaaaccgtattgtaacatctggtaaaggctataaacattggaaaactcttaacgaaacatatgagtttcagtttagtttgtattcttatgatttagttaggcttattaaaaatgatgaagatatatttttatatttcagctcctttgatattgattcaaatcgagtcttgtttaagcatgtgaataaaccctctgtacagtcagaatatcgttattccttgggtacaatcaacttgttggaaaaatacgaagttggaatattaggtgatgtaaatttagtaaaaaaagaagtcagaaggtcgttccgtcaacctaagaagcaagaaacaacgctttagaaaaaatctaaacggtaagtgtataaaacttttggctattgtcaatattaatactttaacatgtataaatttctctcagtttgaccatactaacagtaaagaatttacgtgagatatttaaaaaacaagataaattatgaaaaaaaacagttaatacaatttaaaaattccaataccaaaaagcctgcaagtgttgatacagcaggcttttgatgttacgtatcatagtacagcaatggcttttatggaactatgacgc

SEQ ID NO: 400 - DNA, 23351 bp, synthetic construct
  source 1..23351: mol_type = other DNA
  misc_feature 1..23351: note = Synthetic
acgctcagtcaagtcgtcgaactcacacaagccaagcccagcaccgtgaagctgcgcctcaaggaactcgtcgtgaaaggctacctagtgccgaaaggacaaggacgcggggcgtattatgtaagaatgacctgtgatacaccatgagtagtctgcccggcgaagaagcactgaaagaaccaccggcctttgagatcaagtggtcagttcgaggatcatacagcgaatgaaatcttcacaaaatctccgcgaacttcgcgtttgatctaacaaatgcaatccacaagcaatcacgccagaatcttccggatcaccttcatcggttcgactcctgttagacgctggtcaagcccttgatagcgatagacgaaacgctcgtgatccactcccatacaatgtagaatcgtggcattaatctcattgatatgcacggaatccgccaccggattgtaggaaaaatcatccgtttcgcctaaactcacgccgcccttgattccgcctcctgccatccacatacaaaagttgcgtggatgatgatcccgaccatacgtttctttggtgagagtgccttgggaataaaccgtccggccaaattcaccaccccaaatcaccaaggtgtcatcgagcatgccgcgctgctttagatccgttaccaacgccgcacaggcctgatcggtgtcacggcattgactgctcaattcacccggcagattgccatgcgaatcccatccacggtgcatgatttgcacgaatcgcacgccacgctccaccaaacgcctcgccagcagcgcgctcgcagcgaaagaaccctcgcgcttcacatcatctccatatagggccaaggaagcgggcgactctttgctgagatccgccaactctggcacactcgattgcatgcgatacgccatctcatactgcgaaatgcgcgtctgaatgtcggggtcgcctatttttgcaaatccccgcgcgttcagttttcccagcgcatctaacatcgccctgcgatccatcgcatccacgccaggcggattttccaaatacaacaccggatcgctgcccgaccgtagcaccacaccactgtgcttgcccggaagaaatcccggaccccacatccgactgaacaacgcctgcgcgttcgatccgttaggaaaggtcggcatcaatgcaacaaacgctggcaaatcactggtctccgcacccaagccataagacatccacgaccccatgctcggcttccctggcacttcggaaccagtcatggcaaacgtacaggccgggtcatgattgatcgctttcgtgtgcaccgttttcaccaaggcaatgtcatccacgatcttcgcggtatgcggtaacagttcgctcacccaacgaccacattggccgtgttgcgcaaaagcaaatttcgagggagccacaggaaatctgccctgcccgctcgtcatggtcgtgatgcgatctcctaagaaatccttcggaagatctttattgaactgatcctttaggttcggcttgtaatcccacgtatccaactgcgatggcccgccattcatgtgcagataaatcaccgcctttgctttccctgcaaaatgcggcatctttggcaaggctggatgcaccgcagacgctgcacgtgcaagatccgcgctcagcattgatgccatcgccaaaccacccatgcgtattccggtttgcccgaaaaactgccggcgcgtttgtaaaatttgattttcgaaaaatggattcataaaaaagtgattagttgcggacgactgcttcgtccaagttgagaatgagattggcaaccaaggtccaggacgccaactcccgctcggctaagcctgtactcggtggcgtttttccgaaagtcacagcttttttcgcatcttcgggcatggcctcatacttgcgcatctgccgttgatagagctccatgaccaccgccatttcctccgccgcaggaggccgcgacaacaccgtccgatacgcaaatgtaatccgcgctgctgcctccgtggatgacgtcatcatccgctgcgccaatcctcgcgccgcctcgtaatgctgaatgtcattcatcaactgcaaggcctgcaacggggtgttgctccgatcccgcttgatgcatgactgctcacggtttggcgcatcgaagtttgtcatcatcggatgcggtgcggttcttttgaaaaaggtgtaaagtgtccgacgatacaagccatcattttccgactgctggtaaaaccgcgtgttcgatccaccaaatcctactggctcccagatattcggtggctgatagggattgacgcccttgccgcccatatccatccgcaacaatccacccgcaaataaggcctgatcgcgcaactgctcggcagccaatcgaaaccgcggcccccgccccaaatgcatattacctgggtcagcctcccacatctttgcttcagcctcgcttcgctgacggaacgtcgcactcgtcagcatcatgcgcatcagcttcttcacatcccaaccgttttcttgaaaccaaatcgccagccaatctaacaattccggatgcgtcggcaacgcgccttgcgtgccaaaatcatggctgctcgccaccaagcccgtgccaaaaacctgttgccagaagcggttcaccgccacccgcgccgtcaacgggttttcccgcgccaccagccacttcgctaaatccaaccgcgtcgctcgctcacccgctttccccaagggcggcagcaccgcgaacgtattcggatctaccttttcacccggcttattatactcaccgcggatcatcacaaaactctcacgcggctgtggcaaatcgcggaaaataaaggtcgagggaatcatcccgttaaagtccgttcgctccttcaccaccgccgccaactccgcgcgtgacgcttcgaaatgcccacgggttgtcgagcaaacctgctgtaaataaaaatcccgcaagcgcttcagttctgccgcacttcttggtttctccggcccttcttttagccagccattgagatcgcccggaacacccggagtatccttgcctgcctgtgccgcacgccatgccaacaacgattgctgcggatcactgaccggatctacccgaccagtcacgcccattttatcgaaataaaccgtgcctccgtgcaccgtgaacgcaaagcccacaaccttcatccctggcaccaatcccattctcgctcccggcacttccagcttcacccacttgcctgcctcaggtagtccaccggccacaaaacgctccgttgttcccttcgtcccgaactcaatcacatccgctccccacacggcccgatgtttccaattatccgtgtgaaattgaatcatcacctcctccgctgcatccgcagtatccaaaaacacattcacgaaaaaaaccggatcctgaggcacctccaagggctgcgctcccgcctgataataatcctgcgccattcctgctccgctgcgcttcaacgacttcgttccactgaacactggcgtttccacataggtcgtttcgtgccccgatactcccacctgcgcacctaccggaaatgcatcatcaaaccacaactgctccgtcgtggtcactacaggccgcggctgcacttccgccggatcctgatagaccaccgttgccattttttcctccatcgccttcgccactgctgcctcccgcgccgcaaactccgccatcttggcatcataaccttcaggcttcaccttgatcactggttccgtcaacaacacgttgccatccattgccgggtccgcattcgaatggaaaaacgcatagaacgaataaaaatctttggccgtgatcggatcatacttgtgatcatggcacaccgcacaacccgctgtgagacccagccacgcctgtgccgtggtgctcgcacgatccaccgcatagcggaaaacgaactcctcattgatactgccgccctcgctcgtggtcacattgcagcgattgaatcccgtcgccactagctgatcttgcgtcggattcggtaaaagatcgcccgcaatctgctcaatggtaaactggtcataagcaagatttcgattaaacgccccgaccacccaatcgcgatacgcccaggtctgccgctcgttatccaaatgcaggccatgcgtgtccgcataacgcgccacatccagccaatgccgcgccatctcctccccatactgcggcgatgccaaaaaccgatctaccatccgctcgtaggcatcgggagccgtatctgcaagataggcatccacttcctcgattgtcggtggtaacccacgcaaggcaaaactcacgcgccgaatcaaagtcggacggtccgcctccgccgaaagccgcatccccagtttttccaaaggcgctgccacaaagcgatcaatctcattccctggtcctaccggaacttcaggtttcaccggaggcacaaatgaccagtgcttttcatatttcgccccctcttcgatccagcgccgaatcagatttttttccgcatccgacaacaccttgttagacttcggcggaggcatgatctcatcctcgtcatcagacatgatgtgatcccaaatcaaactctcatccggtttccccggaacgatcgccgccgtcccatgcttgtccggcttatacgccgcctccggctcatccaaacgcagatccgcctcccgcttctttggatcaaatccgtggcacgcaaaacatttctccgaaaggatcggtcggatgtcccgattgaactgcacactttgcccgaaaacaggcaatgcaaacaacccaaacacacatccacttaaaagtcgcatctgacaccatacgctaagactactttgcctctgtcatgaaactataatccatcgacctaagtaaattgatcttgatggagcgcggacttcagtccgcttcttcccacaatcctaacgggtttgcgtcctcaggggtaagaacggcattcgatgcaacggactaaattcaatgctccaatatcattgacgacaggaagggcataccgtagtcgtaacgcatagattactttcctttcaacccatgaaaccacgcaccattctcttcacctttgctctgctcgcttccgcatgggcaggtgaatcaaagccccaacccaatgtggtcatttttctcgctgacgatgcgggctggggtgactacagtcattcgggcaacactcaggtggcaacgcctcacattgactcgattgcaaaagaaggtgtctcgctggaccgtttttacgtgtgccccgtttgcgcgcctactcgtgccgaatttctcactggtcgttaccacccgcgcggcggggtaaagggagtttcgactggtctagagcgtctcaatctcgatgaaaaaacgctcgccgatgccttgaaagcggcgggttacgccacgggagctttcggcaaatggcacaatggcagccaatggccatatcatccgatggcgcggggatttgatacctacttcggccacacttcggggcactggggtgagtattttgatgcccccttggagcaggacggaaagatgattcgcaccaaaggttatatcgtcgatgtctgcacggatcaggcgctcaagttcatcgacgagaacaaacagaaaccattcttttgttatgtgccctttaccacgcctcattccccctgggccgcaccagagaaagactgggctcgtatgaaaaatctacccatcacccagcgcgcgactgagtcgaacaaagaagtggccgatgaaacacgttgtgctcttgcgatgatcgagaatcaggacatgaacgtcggtcgtgttctaacaaaactgaaagaacttggtctggagaaaaataccatcgttctctatttttccgacaacggccctaattccctgcgttggaaaggtggcatgaaagggaaaaaaggaagcaccgatgaaggcggtgttcgctcggtctgcttcctgcgctggccagaaaaacttcccgccggccacaccgtgacgcagattgctggtgcgatcgatctactgccgacattgacttcactcaccggagtcaaacgggtgggtgacaagccgctggatggacgagatctcacaccgctgctcttgaaggaatcgcccgactggcctgaacgtatgattttctcgacgtggggaccaaacgtcagcgtgcgcacacagaggcaccgactcgacaataatggcaagctttttgacatgatcgccgaccccggccaaaccactccgattaacgacaaagcacctgccatcgccgcgcagctcaagggtgccgtggacaactggcgcaaggaaatgtttgcaaaaaatgacggtctaaaaaacaaaaacatgggaaatgaaatagacccgcgcccgattcccgtgggctatcgagaattccctatcacgatgttgcccgcccgcgatggcgaaccgagaggaaaagtaaagcgcagcagcggagcgccaaactgttcttactttgtgaactggaagagcacggacgacagcctcgtttggctgctcgaagtaaagacggcgggtcgctacaccgtcagtatcgactacacctgcccgatcgcggatgccggctcttctgtagaattgcgtctgaaagaagcccacctgatcggcacggtcacccccggctgggatccgccgctttacacgaaccaagacaccctccgccgccccgatggagagagccagatgaaagagtttcgcacgctaacattgggtgagatcgaactacccgcaggcgaagcgcctctgaccctacgagcgataaagatccccgggaaaagcgtaatggatttgaggcgattgacactgacgctgatggattagaatgtaagttttttatcacctgagggtagacgaacaatcgccctggccttgcagaaacatccccattattttacttgaataaaatcatcatcagttgcatcttagctttggtaagcaaacgggggcgttctggtttcgacgggatgtctgaggtgctgactgcacgtggaggttgatcggttggcctcctaaatagccgatcaaaacaaataaatgcaaactctaacgagctcgcactggctgcttaattgacagtcacgtctgaatcctgacgcctgttggggaggaaggcgaaacttaacaggctgggtatgatgtcggggaaccggacggattactgagaaactacaggttcctaggatcacgacgccgcatgagagccgagtgcatccgaaatactgatcgcatgctaaacgtgtagaagtcttcgccaatggcgttccggacaggggttcgactcccctcgcctccactgcttattccataagggatggcggcggaatttcagtatttttatactccttcttataccagaggtatccattttcaccctatcgcaggggacgaatgacgggaagctgtgaccccttttctcttagaaaataaaactgtaacgattctggcagggcagcgctttttcgtcaggctttttaccagtaatcttcattcgtgacttgagcgaagacccaccacccgtccaccccacatgccccaagccaccaagattcttgcgctggggcgtcgggtaaaaaaatctccacacggaactgaaatgaaatacagaattgcagaactccggataattcgtgggaatttaggggaggatttaaatcgggtattttggtatggattcactacgaaaattcatcccgcgtggggtgtatgggcgttccgtttgcgggcctgccgcattgctacttcgctttctctgcctagcctgtgtgcggtggaaccctaaacaagcggctttcgtgcgggcggttctcccgatttcttacctgcccgcttccgcgcttcagcaatgaccttttctagcgacatactaagagtatctgcccagtcgatccagaacgccaatgaggggatacgatcgcccgactcggcccgatggagggcagcgcggtcgagatagcttgccgcagacagagcgttcatggagatcccggcggatagtcgccgctccttgagtacgtttgccatttccacaaccatcttgtccgcttccttgctggccatatagcagtatcgcatacgctgatgcgcgggtgaatgtgcggtaatagtgtagcggattcgcaacattaagcttgtgatacgggtaaattctaggaattattgtaacatccttgatgaccggatatgcacaatgagccagcaaaagcaaatcgtaccgaatagggttctgctggctacagcggtcttcgcctttattgcatcaaaccaaaaaccagaggattcagtcttgcctgaattggttttggtgattttctatgctcttttttttgttcacaggcattatcgtcgggatccaaaatcaccgaaaacacagctagggaaaatctggcgctccattgaaacgagattcctgaacatgccggaaagcacaatcgagcgtgaggtgcgggtagctaaggagaagcaagagcgtgaggtgcgggaagctcagaagaagcacgaacgagaggcgcgggaagctcaggaaaagcacgaacgagaggcgcgggaagctcagaaaaagcagctgtggatagcgaagcttgaggagatcaaatcacagttgaagatggagagggcagagcgggatgcaagggaagctcaggagaagcaggagcgggagttgcaggagaagcaaaaaagagaggccgcgcgggaagcttttctggtgcagtgggcagcagagcgaaaggaacaggaagcaagggaaaaacaggaaagggaggagagagaggagcgggaaaaaccggagcgagaggcgcatatgttacggcgggagaccgagcgcttagagcgaatacaggcaaggcgtttagatcgacaggcgagtaccgtagcgcgtcgagcaaagggcaaagtaatgaaggataaagagaaggagttggccaaattggtaaggttggaagcggctccactcgataaaccgtctgaaacgattgccgatcccattccaaatcagtctgcacgcaaacggctttctcggtcattccctcgcgaggatatttctaacatatctgacccatctccagcaagcgagggaaaacgggtcttgaaaactaactatgcagtggtccgaaatccgaaactacggaaaattgccattcatattcatgggcgaaattgcatagtctgcggattcaacttcgacaggacatttgggcaggagttggcacaaggatacattgaagttcaccacttgaagggtatcgcgaggggtgagcgctctactgatcccgaaaaggatcttgttccgctctgtgcaaattgtcatgcgatggcagatcgcctttccagtcgtcacgaatccccaccgaggagcatcattgaattaaaaaatctgctatttcctgcgcctttccagtcgcaatatgagacaccgcaaaccgacgctaacgacgacgattaattccttccaccgtcgccactccagcctctttttgtgagtgtataactgcgtcgccgccagtccggtttcctccatcacccgcttctgccactccgtcacagtatcggtcggaaaataccccaccacccgtatcccccgcatgccccatgccaccaagactcttgcgctggggcgtcgggtaaaaaaatctccacgcggaactttaattgattacgttatagttttttatcaaaagattctcagagggtggtaatgttggttgcgaataaacgattatggtttcttgaaccctcgatcatctatactaaacgggaacatggcattaatcgcgctcgggcagaagaaatgaggtcggtttgtttacaataggcatccctgtccattaaacagattccccccgagacaccgaagtgctcgaggggtgactttacagattcaaaccaattggtaaaaatctttaccgtggctgacctcctgatttcgcgagaagattgcttgccatctcgaccgaggtcaagcatattttttctaacatgaatacgaattaccttgtgggcaaaaattcacctctgaccaaacttccccaaacgtttccaacgcaagttgatgatgagcttttttgtggcattgatattggtgtgggttcgtgcggagtcgcactggtttcaaccgcatcgaataaacacgtcattcgtggatttgaggggcttccgggacaattaacatttatgggcattagggcttttgatttgccagaggaaaaaaccactgctgggattagccttaaaaaccctgatcgacggcagaagcgacttatgcgcagggtgctcgagcgaagagctcagcgcatacgatcaatcaaaaatttacttgtcgaatgcaatatcttaccaaaagaatataacttcaaggatgacgaatggcgtggacgacatgagtccgcgactccttggcggtggcgcgtgcaagcacttactcgcaaactaagttcgtgggaatttgccgtcatcctcatccattacgccaaacgccgtggattcaaaagtgctaaaaaaagtgatttagaaagtaagggctctgaaggtggcactcttcaaagttcacgagccaatcatgcggcattagagcattatgataccgtcgcagagatgttgttgaatgatccgcgttttgcaatttccaagaccgatgatcagaccactgaaacaaggcaacgcaatcatgatggcgattacatagcgatggttacacgtgctgatgttgtggatgaaattcacaaagtctttagccaacaacgtgcctttggcaatgaacacgcgagcgaagaatttgaacagcaatatttagagcaactcaacaaacaacgggcaatgcaagatcctatcaaattgcttggagattgccccttcattccttcggaaaagcgagcaagtgtgatgtgcccctcgttcgaactcgcgagagccttacaaaaactcaatgcattacaaatcatttcatcagagaatcagaaaacaatgttttcggaatggattctacagaatggcggatatgcatcgtttgtctctgactttggcagaaaagcaaaaataacatggggggatttgcgtaaattttggcagttaccctcaacttaccagtttgccgatttacgctcactcccgtccaaacgcaataaaaatggtgaatttgagccagagcttagcccagcagaaaaagaacggtcggatttctcaaatcgatcaaatgcgggagcgtgtgcgcaaggttctcacgcattgaggaaagtgttaggcgataaactttgggcacagtgccttgagtcagattttgccgaactcgactacgcagccttttgcctaacattctatgaagtcgtggaagaagagggtagccaaacaacaatgttaggagctatttctgctaacgccaaaaaccaccaattatttgaagccatagcccaagatctccgttctgagaagcctacgcttcataaattcaagggttctgccagtacgtctgccgcattaatgcgcagactcattccgttcttgatgcaaggtcaggtatattcaacggcaatggagaatgcaggctttaaccatgtcaaaacggacttctctcttgataaaattaccaatccaattgtgaagtccgttttgcgggaggccatgaaacaaatcgcgcatgtatttaacgaagtcggtcgtctgcccggaagaattaacatcgaagtcgcacgcgatgtaggcaagtcgattgaagagcgtaacgaactagaacgaggtttgaaaaagcgaacaacccagaaaaacattaatcgggaaacagtggccgcacgcaaaggatgcaatgaaagcgatgtgacagaggatgaattaatgcgctatgaactctatatggaacaaggaggtatgtgcccatactctgggctatcactgccgaatgtagagaatatctacaatgcggacttgcagattgatcacatacaacctcgcagccgtagccacgataatagctatgacaacaaagttcttgtctatgcatctgcaaatcaaaacaaaggcaatctaacaccctatgaatggctggctacctctgcgagcggatggcaggaatttcaaacacgcattgccgcaattcgcggtatccgcaggggtaaaaggaatcgtcttttgagtgaaacatttgcaacgcaagaacctgaatttctggaacggaatttgaatgacacacgctatattagtcgcttactactcgcttacgttaatgatttttatcgcattgttggcgaagaaccagaaggaaagggtgctgttcgcagagtttattcaatcccaggcgcattgacgtcacttgtgcgcaaagcatggggtttggaaaatctaaaaaaagatgtggatggcaaccgcgttggcgacaaacatcacgctgttgatgcgctcgtttgtgcatgcctttctcacggacgtgctcaatggatcacgcgcctttcgcaagcctatgcttcctctgttcatcttttgacactgaggaatctgtccacaccatggcagaattttcgcaatgatgttgtgagtgcgttaaatcaaatcacggtttcgcgtagagagcgatgcggagcgggaggtgctttgcatcaagaaaccaactacggagtcgttattgacgagcacggtaaacaaacaatctacaaacgccaaaatatcattgggaagaacagtgctaataagcttgaagcgagtttcaaaactctagcagacttggagcagatacgcgggattaatgaagagcgttcagcatggttaaaaaatgcactaagtgcttggatcgcagctggttctcctctagaaaccgagcaattgccccgtgatcctcaaggctgcctaatccgtaaagttttcgtggcgcaatcaagagttaaaaatgtgcgcaaacaaaatcaagggcatgtgactagcggcacattagttcgctgtgatgttttctcaaaagctgggaaatactatctcgttcccatttataattatcaattggcatcggcgacacctccaatgcgagcaattgttgcgatcaaagatgaagacgattgggtaattatggatgagagctatcaatttgaattcagcctatggaaaaacagcagatttcaatttgtggagaaaaagtcaaaatcaacctttattggttgttactctggagtgaatcgttcaacaggtttggtagaatttaatttacctgatgactttggcgacaaagaaaagcgcggagtatctccaaaatctacaattacaaatttccgtaaactcaatgttgaccgattagggcgtgtcttcatggtgaaaaatgaaaaacgtgtatggcgtggcgtggtgtgcatctgagcaaagccgcgcacttgcggatcgagcatcgtaacctagtgattgatttccgcgaggaggttaaatctgtagctcgtctcccactggaagacatcgcatatctcatccttgatagcttagaaatcactctaactgcttcactactagcagccatgagcgaaaacgaaataatggttctgggcataaatgagcagcatttacccgcatggacttcctttccttgggggctccattatcgacaagggggtgttaccactctgcaaatggaatgctcacagccgcttaaaaaaagattatggcagcatatagtagagaaaaaaatttcagctcaagcatgggcattagaatcgtttggactacgccacgctgaaacactcaagagtttggcgaactctgttttatctggggatagcagtaatattgaggctcgcgcggcagtgatccattggggtgaattttttgcgccaagaaattttcgtaggcacgatgatgacctgccgaacactctgttaaactatgggtatgcgttgattcgcgccggattggctcgacatctctgtgccgctggatttttgcctgtgctgggtcttcatcactgctccatgaacaatgcttttaatttagccgatgatctcatcgagcctttccgtcctatcgttgattactttgctcgaaaacttttagcggagcgcccttccaccgatgcattcgttaccgatgatcgcagggctctaacgcaaatgctagaggctaccgtgataatggagggcaacgaaatgaccttattcgcctcaatcaagctagtaacacaatcattaaagcatgccattcggcagcgagaccctacgcttctcgttttccctcaactcaagcaatgaaaggagatctaaaacgtatgtgggttatcgtattttttgatttgccagtgggtaccaagacacaacgaactgcggctacacgcttcagaacagaattgctgaacgatggctacatgatgttgcaattttctgtttatgcgcgtctttgccgagcccaagaggccgtggacaaacacattaagcgcattcagggatttttgccagccactggctcaatccgcgccctccaagtcacagacaaacaatacaatcgcatgtcaatcctcctaggaaaacgcatccaagaagagtgccaaggcgaacagcagttactctttttctgaaaaataatactggtaaacctatacagaatataggtttgccagcattagattatagcgacttgaaatcaggaggtcaaccacggcttcttgcccgtgttggtttagcgtttcttgattatagcgacttgaaatcaggaggtcaaccacggcacataagctgtgcgtgacgttcccattcgattatagcgacttgaaatcaggaggtcaaccacggctgtgattgcgccttgctgtcatcatcccgcattatagcgacttgaaatcaggaggtcaaccacggccgcgtggatcaatggtaatgcccaagccgcattatagcgacttgaaatcaggaggtcaaccacggcctaagtctgctgtgacttttgccaattcctattatagcgacttgaaatcaggaggtcaaccacggccgcaaacgtgccacggtgcgcggagcgtgaattatagcgacttgaaatcaggaggtcaaccacggccttacgcttccaatcgactggcgcagattattatagcgacttgaaatcaggaggtcaaccacggcgatgtgaaatcagaaggttctgccgttgtcattatagcgacttgaaatcaggaggtcaaccacggcctcgaagttagtcgcgttggtctgagtcgtattatagcgacttgaaatcaggaggtcaaccacggcctcgggagatgccctgccagtcagggagtattatagcgacttgaaatcaggaggtcaaccacggcagacagtcagacctacatagtaatcatctaattatagcgacttgaaatcaggaggtcaaccacggccaaacgggtaagctgtctcatgccggaacgattatagcgacttgaaatcaggaggtcaaccacggcctcgacccgatggactacggcatagagagaattatagcgacttgaaatcaggaggtcaaccacggcccgtttttactggcaatgaatcatctttttattatagcgacttgaaatcaggaggtcaaccacggcataccgatcgccgtatgcttcgaccgcgtcattatagcgacttgaaatcaggaggtcaaccacggcttcttgcccgtgctggtttagcgtttcttgattatagcgacttgaaatcaggaggtcaaccacggcagcattttgcctgtgcaaagccgcagcaatattatagcgacttgaaatcaggaggtcaaccacggcctagccaagaccgacatcacctctcgcgttattatagcgacttgaaatcaggaggtcaaccacggctgagtagttcattagtatcgcatctgcataattatagcgacttgaaatcaggaggtcaaccacggcaacgctgccccttccaagcgatgggttaaaattatagcgacttgaaatcaggaggtcaaccacggctccctagggccgcgcgtaaattcacttgcaattatagcgacttgaaatcaggaggtcaaccacggcatgacagttgcgcttgtaaatgatgacctgattatagcgacttgaaatcaggaggtcaaccacggccgctgaatttgccccgatctacaaaaacggattatagcgacttgaaatcaggaggtcaaccacggcatcgctgctgattgcggcaggttgatttgcattatagcgacttgaaatcaggaggtcaaccacggcttgcgcctgacagtcgagtggtcggtctgaattatagcgacttgaaatcaggaggtcaaccacggctgtaaccgtggtgtcgttaggtagtgatgtattatagcgacttgaaatcaggaggtcaaccacggcatcgagtgatgcatcggaataacataagccattatagcgacttgaaatcaggaggtcaaccacggcgttgcacttggcaattgttacagatgcttattattggattgacgggctaacttaaaatcagttggatagctttttaaaacaagaaatcgaatttataggaatgagaggcctacttgcactctaacaaatatttcaaattcaactcagcatgtccaaagagaatcaaaattggcttcctataggggtagtagtcgcaagcgcaatcttatgcttcgtggcgattgcagatctcccgtatggattttataaaatacttcgttgggtagtctgttccgttgccgtcgcgtctgctttgcgcttgaaagaacaaagcgctacatgggtctgggttctggtaattgtagcattgatcttcaatcctttgtttcctgtacactttgacaaacccgtgtggaaggtcttcaacattggcgcgggtattgtatttctaacagtcgcacggaaacttcggaaatagtcaaaatttgaacttcatatgaaaatatcttcagcaaaacgaaattgggttatattggcatgggctttcgtttttttatctttgagcattttttatatgattcataatcgagtcgagtggcactcgtttcgttcagctgctattacgacgagtggcactatcaccgaatgttcgggtggctatagttcgagagacggtggagagcctgcctatagcaaatacgaattctgggtaaatggggagcgcttttttggagggtctgaaaagtatattagcaacggcaaatctgtgatgattgcgtatctaccaaacgacccgagccgtaatgacctcgcggatgacaaaagtggatacaaaagaggattttggttcgcgacagtggtgtgcatattcggcacttggatgtttcgttctgggttgaaggtatcacggagtagtgaatttgaatcaacatcatttgcactctttccccttatcgtggcaactggtttctcggcctgtttaatagtgcgatcagtaatttacccagtaatccatgaaggggcactccgagcgttggtgatttttactgttcttctgctgtcgttacgtgcgattcagtggggatcaaagtttatggcctgggcacttgttccccttcttattcggtataacccaattatcccaattggcttcgattcttctttcttacacgtgttcgatttattgtctattgtgggattattatccatagtggcgaatctctgtcccccgtctgaaatacacgacgaatctaggtaatctactaccttagctattgattcttgtcgcttcgttttacttataatctgttcgtaattacgggggatgatttgcaccatcttgaaataccaaagaatgggacattcccccccttatacaaaggggggaatatacctgtcccgattctaggcgggacaattcacagattgtccagtttttgtcccaattgtcctggtagattaattgcccaccttcccacatcattttttctaagaacaccaagagattcagccctttgcatcctctttttcatcgtgcctggtgtaatgggctttttagtcccgttaatgtctcgatgtattgcggcagcctccacgtgatttagatcgggacaaataggatttgtcgcggtttcaaaggcttttttgaagattttctcaaaatcaatctggtacttttcagtctttttgtctatctgctttgccttttttattcctaccgccatgcccttaaacgtgtgcatccttgcaacatcgttccaagcgaaacaaaacccgtgttccttgggaatttcccgctttcgcatatccaaaccgtaaatggtagagatgagcgtttcggcgtccttatcgattcgtaagttggcgaatgctttccggttcaactcgctgccaaggtgaccgcgtgtcttgccggcatcggttgaaggattttcgtgaagcacgcaaaacaaaggcgtgtcgtatttgtgactcaatgccatgattttggaaactaattccaacgcctcggcttcgtcatttggactaacgcaaagatccgcgattccgtcaattatgaccgaatctatccttccttgtgtagtctgctcgtattcgagtgattgccgcagtatctccaaacgctccgaacggtcgaataagaccagaggaagcgagacgaggcgagatgatacatcagccaaaccggaacgaatgacgctccgcgataccaacgcatgccaatcagatggagactgttcggtgtcgatatgaataattgtccctctgcattcgcccttccaagacatgcagagagtgtctcctatgttgttagattgaccattctgtgcgcatcccaagacggcggaaatcacagcggatttaccgacttttgattttccctgtatgacagttaaattgccacgcgcagcaattggaatatccccgatcatcatacaggtttcctcagctggcggggttttcgcggggtcaaatcgtaaggcgtatgctcgctctctgagagactgttttaccaatttctccattttgatgaattcatcctctaattcagaaaaatcaggcatgaaagagagtaagtattctggatcggcggcttgtaagttggaatcatttaggtatgtattcagcgtgccccatggaatgggcttgatttttgcaagtttttcatattctccctctttcacttctggccagaattcctccaaaagagcgactcccatctccacgccaagacccccaaaaactgctgaagatattttgagccaatcggggtaagctgggcggtcatacaatcgcttcagctctatcaaaaccttccgcgcatgttctgaactaacatgactttcactctggtcgtagaaattctcatctcgtttgtccgccgcttgaatcggcacgatctctaacgcatcttgattgtagtgtagattttgatcatgcgaaacgtaacacaggcgagttacatcttttgtagctctatcaagtatgagtcccttcagacgaaagtattcatctgcagcaaaccaactattcttgtgatgtgtaaaatcagcaggacataaagcgatagctttcaccccatcacctgaaagtgaaagaaagcatgccatcacgaacggtgccgcgaaaacaatttgctggatttctgtaaccgtcttgtctgggtgatctttggaatcaaaatcaagctgaagaagccccgagtgaatcgcacccttttgctgaagagtagtccgagcttttctgtgattgagaaatacagatagagaaacagcagggacatctccccttgatttcttgtaagcatccacgccggaatccatgagaatccctctgcatttcgccacttgtttttgccaacgcccttccttaattccagcaaccaactcagggagtgtaatgtgctcctgaggcatgttcgcttcgtgattactaaacagagaaaattttgcttcatctctcatggctttcttcctccttccgcgtctattccattccaccctggaacagagatgctgcttagacggatcagtgcttcgggccccggaggctgaggccagcctttcggggctatgccacaacagcgcaaagactctatgattttcatcaataattcttctgatgttattgcgcactctggcatttctccaaacttcgggaatttcgttgagctaaaagctatgagtaaattccgtgtttgcataactatgtgacgatgttcttcaccttggatcgttggtaggactcgatcaatttctcgaaggaaatctgtgacttcaaaagctttgtagatatatttctgtttcatatgatggattacttgcatccgccacgagctgaggtacattgaagcagttccaactgccttcaacgaacccccagccgcaagcgggggtttcgttttagatggtgaagggttgctcagcatagctgtctagccatgcgaggagagaaggcacggaaatcatccgtattcctcgggttgcgcccctcttgcgtatcgacgcggtcttaatcgctccgcctgccgtatcaaaatgggcgtaaagtgtagagcgactgaccgacgctatcgcgcaagccgcagggattctcgcccattcgctttgtggttttgatgcttggttatcctcgccggatttccggggagccgtcctgtgtttgcttgcagttgacatacacccgcaacatacaaaaccagcacctacattcggttagctttcaaatattgaaaaatgcagttagcacgccaaaatcagaagtttattacagcagttgacaaatcatactatgactttcggcagctcaccgtttaagtctgaatgtaaaactacagatttttgatcaatcaagtgggattaaggcggtcaaataaaaagttcatttattttctacgacgttccagtttgtagctctttacgctccttctttttttagaatgaagttgctttgcctcttttgctaattgctttgtatcatcccactttcgtagttttgcagtcgtaacaactaagcaattccactcgtcgatatcttcaatgtgatctgatttcttgccgcttagatcagaaatatccaacacctgcgtattgaaaaatttcacccgatcatcagcgctatactgaggaagtatcccgtgaataaaatccttattatcgaggggaaagctctcaattgatggaggataaactccaagtcctttatggattaattctgctttttccgcataatctgctgcgatgtcaggcatattttttaacatctcttcacgccgtcgctctgagtgggtttcaaatttcaaaacttcttcttccgcccgtgcaaagaccgtttttgccattttaaatgcttcggcctcacactttccagaaacaataaaagccgttgctaaagtagctaattcgaaagcagttggaggcgtatcattgtgtatcggcaaaccatcgatggcgtgatttttacggttcatggtattactttagtgacggaagtttagatgcagcggagcgcatggcttcctcgccgacgttgacataaatcgaatggatgtccgcgctatcgtgaccgattagcgccatagcaacactttgcggcacccctgcttcgtgaagataagtagctgtgctgcggcgaagcgaatggaaggaaagaccgttagttacacgtttggcactgcggcctttgcctgtgctcttgtgagtggtgatttttcttaatcccgtcttcgcgagaatagccccgaactgattcgacaagtgcccagtcttaccctgtgctgtaacgatctcaaaagcgttcgggtgaattggttgttcattgctgattggcgatggtagggatacaagatgcttgtgaagatcatcaggaagcggaatgttcaattcctttcctgtcttggaagtgactagggaaatactcttctttttcatatcgacatttttccactggaaacgagctatgtctccgagtcgctgccccgtgtagaggccgaagagaaccatagagcgccattcgacatcacaatgcacaagaacggcgcgaacttcatccatggtgaatggtcgcctctctaagaccttgcgactcttcactgtcttcgcaaattcactgggatcatcaataagcaaggcgcgatcccgggcatcgcgaaataccatgcgtaagaccttcacatgatgattcactgtctttggcgcaagacgttccgcaagatcatcacgaaaggcttcgatttcctcccgagtgatttccccgatttccttgtcagcattttcgccaaggtaagagaaaaatttctcacatgccccattgtagaaatctactgtcttctctgcaacggaggtttttttacttttcaaccactgttcgacatggagccgcaatgttatcacgggcatgtcctcgcctgttagttcgcggtgaaggctgcaaattgtacggcgcacttgttgagctgatctcttgttgcgtcctgcggactcatattcatgcgcgattgtctctgccttgcgtttgtttttctcagtggagagaagacctgtagagcgattgcgtcgtttgcctgttgcatcgcggaagcccgcgatccagttagaagtgtttggatttttaaatacgaatgccatggctaaatgaagttatacctgtgcttataccatgacccaggaagtccgtcaacgtccatttaaatttttattgtttaataaaggaataattggattttatgacacgtcaaaaaacgtcaaatccgaaacaggggttcgactcccctcgcctccactgcttgatttatatttcgccgtgaatggtgccagtccttggattaggtatttttttggaaaaatgataacttaatttcatcatattaaccgattcacgattcttgtatgtctctcttatgaagaaatataagtagccaataggcaaaaacgaacccaaacataattgcacgaatgaaaaacacgcggttgcaggaaattaataatgcctccattaacgtattcaagtgccctaatgatcaacacaaaacacttgacctcctctcaacgttaattccacactgaatccgcacactcaatcccatgaacaagttcactcctagcattctttcggccctcactctattcgcagccgcaaaccctgccgacctcacctacaccaaatacgccggtagtgatctcgctccctcccccgcttgcatcgccgcatctgccaacggcgaagtctacgtcggtgtggaccttctcggctccctcggaaaaggccctggaaaaggccgcattgtccgcctcgtcgatgcagacaatgatggaattgccgagaaacataccattttcgccaccatagacaacccgcgcggcatcatctccttcggtgacaaactttacgtccttcacactgtcatccccgccgacactggtatcctcacaggaatgcacctgtccgtcctcgaggaca

SEQ ID NO: 401 - DNA, 23213 bp, synthetic construct
  source 1..23213: mol_type = other DNA
  misc_feature 1..23213: note = Synthetic
agcgcgcgtgggccgcaagcgagcccgccgccgccagcccagccagcaggccaccgaccccggcgaccaggtaccagtcccccttctcccagaagcgcgggaccagcggctcggtcatgggcagggcgtagccggccacgccagcgcccagcaggatcgccagccccagtgtgcgcgcccgggcctggccgtcctccgcgggcggcacgcagatcgagagcagccaggcgccgaccgcgccccagatgggccagtcgaccgagctctcgaccggccacggcaagccaaagctgagccaccaaccggcgaagactccggcgatccaagccgaagcccccgcgcggcgcgccagcggactgaccgggccggtcttccacgccaggatggccaccgtcaggagggcggccatgcccggcgcgaacaccgacttcaagaagacctcgaagcccatagaacggaagtcctactcggcgaggatgccttcgacggcgatgacgacctcgacttccttgcccagaccttcgggcatgtaatcgacaccgtaggccaggcgatcgaccttgaactcggcttcgaggccgacgcgggtgttgccccacggatccttgccggcgcccagcagcttgccgctggcggtcacctgcttctcgaccccgtgcatcttcagcatgccggtgatcttgtacttgccttcgccggcagcctcgatcttggtcgacttgaaggtgatctccgggaactccttcaccgagaagaagtccgcgccgcgcaggtgcttatcgcggtcggcgttgttggtgtcgatgctggccgcgtcgatcgtgaccgagatcgagctgttggccggctgatccgcgtcgtagaccagttcgccctggacgtcgcggaactggccataggccgcgccgatgccgaggtgcatgacccggaacatgacgaaggagtggcccgcgtcaatcttgtagctggcggcggcggcgatgggctgagccggcgccggggccggagcttccttggcggtgaaggccgaagcggccagtccggccagcagcagggccggagcgagggtgagggtggcgttcatgatggtgcagaagtgggttgaggatggcggatgggtgttcagccgtctgcccgcgcttcctcgtcgggcagattgggtacggattcaaggccttgtggaagggtgaaaacgaagcggtaggccttgtgccgaactgccttcggggattcggactcgaataggcggcccgtggcggggtcgaactcgagaaggacgaactgcggatcgccgcgtgcctcgatcaggccatcttcgctgatatacaaaaagaggccgctctccggatggagttcgagatgcagggtttgctcatatccaccctccgccctgagaaacagcgcacggggaatctcgccgaccgtccccacccagatcgcccggaactccccgggagatgagcccggctcaaactccagttgagcgtacccgttcaccgcgtctgcgtcctggtaccagatactcggcggcgcgaccgcgcgcacatcgaagacacgcgtttgaaccagtccacagtcgcaagctgttgccgcaaggagcagacaggaaaggacgccaacttgaatagagcgcacggacagggagtctagcaggagtcatcctgaggctcgcgtggcgctccgtgtcgctcctacggggacggatcgcctacaaagcccgccagccattcggccagctcgtagtacatctcctcccaggattcagcgacgtaaaccacgggctggtagtccgttgggtcgtagtcggtgactgccatggtgggcagatcgaaggggcgcagttccgcgcgctcggcgaagctgccgagctccccgaagctggaaagcaagccggccccgaaggccttgaccgtgccgtcctcgcgcagggcaccgaactccatggtccaccagtagacgcgttcaaggcgttggatgccggaatcatccgccacccgggccgcgcggccgaaggcgcgattgagctcgacgatcatcgggtgggtgaagctggcggcgtgcccgatgagttcgtggaccacatccggctcgggggtgtagagcgggacggagtggtgccggatgtactgcgtcgacaggaagacgccgtcagccaggtaactgaggaaggtgcgcgcctcgatcagaccggcgaccggaagcatcttgaagccgcagacttccattagccgctggttgaccacctccagctgcgggatgcgctcgcgatccagccccagccggtggtgcagcaccagaaagccgcgcggcgcccaatcctggtgcagcggctcgagcgcgcgccagacctcggcccagaccgcgtgctcttcctcggtatagggcacctcgggcaccggccctccgccgtactcaagcgccgcgcgcgcgatggtgttgcggcgcgcccgataggcggcgtcgcggaagcccgggtgatcctggtcgaggtcgaccaggctgtcggctcctcctgcgtgggcggaatcagtcatgacagcgtcgctgcagcggcgacgatctagaatcgtagccatgcaggccaagctcgcccacacgatgatccgcgtccgcgacctcgatgcgtcgatcgccttctacaccggcttcctgggcctcaaggagacgcgccgcgcccacttcggtgaggagtgcaccctggtctttctcgccgacgcgtccgagcagcactacatcgagctgacctgcaaccacgacggccgggattacgagctgggcgatcagtttggccacctcgcctttacggtcgaggacctcgacgcggtgatcgccgaggtcgaggacaagggctggtggtaccgcggcaaccgccccgaatcgagctcgcgctacatcttcgtcaaggatccggacggctacgacatcgagatcctgcaggccaagtgagcgccctcccccgggtcgaagccgccgggctgatcctcgatccggcgacctatctggcgccgatggaaggggtgaccgaccgctccttccgcagcctggtgctcgaacagaacccgggcgcggtcggcgcggcctgcaccgagtttctgcgcgtcgcgcagcatccgatcgcggccgagcgcatcgcgctggaactgggcgacccggtgcccggcgtggcggtgggcgtgcagctgatgggcaacgacccggccgtggtcgccgagaccgcgcggcgggcagtcgccgtcggcgccgccttcgtcgacctcaacttcggttgcccggcgcccaaggtctttcagcactgcgcgggctccgcgctgctgggcgagccggagcttctgggtgaactggtgcgcgccaccgtcgacgccgccggggtgccggtgaccgccaagatccgcgccgggattgagcacgatcgcgaggtcgaggagatcgcccggcgcgtcgagcaggccggcgcggtgctgctgacggtgcacggacggctgcggaccgaacgctacaccctgcccaccgactggtcgcggatccggcgcgccgttgatgcggtgtcgatccccgtgatcggcaacggttcggcggagtcccccgctgacatcgatcggatgatggaagagaccggctgcgcgggggtcatggtcgggcgcgcggcgatcggcaatccgtggatcttcgccgcctggcgggctcgtcggctgggcgaagcggcgccgcccccgccggatgcgatcgcctggttgcgcgaatatgagacacgcatgcttgctggcggcgcgcagccgcgccaggcgctcgggaggctgaagcaggcggccaaggcgatgggaaacgcgggaacactgcgcttttccgaccgaactcagctgctgcgcagccaggatgccgccgcctacttcgcgatcctgaagcaggaaaatcagccgaatgcctcaaagctagacacgggtagtccgaaatgagtcatgccgggccccatccggctgcattttcattcgatgtcaccctcgtcaaacagggagacgattgagagcgcgctgctccgcagtgcgctctcagttttgtttggccgcgatccggccggctagttgagcttggtcgggttgcccgcgtggtcccagaccggcaggctctcgtcgcaattgccgccgcaatggccttcattgcagcagtagccggtgggcgtgtagcagccgccgccacagcaggcgcccagctcgtagacctcgccggaggccgcggtcaccgactgggtttcgacctgggactcgggttggggctcctcttccgagccacaggccccaagagaaagcaggaagattgccgaaaggaggatcgagcgcatcgaatctgggcttaaacctagcaacgggcgttttccagggtcatcctggacccacagcccacaacatcttagcattgtcatcatgagcaccgctgcgcgtttcggattggctgcaacgccctgcccccgccagaagcagagcatccgtgattcgttttcgcaaagcgagaacggggccgaccccgctttcgctcttggtcaggtccgtggacccaagtccgacgtctttgacggcggctggtcctttgattccagccaagagtccgtcagcgcggtcctcaacgacggccagtccgcattcgacgccgccgtcgccctgcaggaggcggtctggccgcttcgcctgcgtttctcgatggtgtccgcccctccgggtggcgccgccggccaggacgacgcgatccgcgacaaggcgctgcgcgtgcttggcaaagccgacaagcgcgagcgcttccacttcgaactgtcgggcaaggccgaagccgagctcaccctgggcgcggcgatgggtcgcctgcacctcacgctgatggacgagtggaccgatgcgcgctgcaccgcggtgcgctcctaccgccgcctcggcaagcagtccgaggtcgccaaggaactgggcgtcagccagcaggccgtcagccagatgctgctcggcgcgcgcttccgcgatctgcaggccgccgaaggcgcaatgcgcgaatggctctccggcccaaagcgcacctcgctgtggccgctgcgcaacgtcggcacgacgccgtcgggcgtctaatcttcgctcggcaggccacgcagcagctgcgtgggttgggcccaggctgcaagcgtgagacaggcctgcgccgtggtgtaggcgcgatcgccttcgatcgcccacgctgaatccggcgcccaggatccggccagtgccggcttgccgtcgagcgcttcctgccgcgccagcagcaccgacgccgcggccgattcccaggccgcgcgttccggaccgcccagcgcggccatcgcgtgcgcggcgtgcgcccagtagtagaggtcgtaggcctcttcgtcctcgactggcggctgggccagcatcaggccgatctgcttgaccgccagttcgcccaacggggcgggtgcgccatcttccgcggtgcgccccagcgccgcccatacgctctgctgcgcgtgaaagccgatcgcggtcagcgattcgctgcgatgactcgggaagcggccatgcgtctcggcgaggcgcgccggcagcccgcctttgccgccgcgctcgatccacaggcagtatccgatccgcccggtctcctcgctggcgagttcatcgagcaccatcgccccgcgccgcagcgcatcgtcatccgagggcagcccctgcgcgcgcgcggcgaccaggcagagcagcgcccagctggtgatcgaggaatcccaacgctcggcttcttcgccgcggctgacggcatagctccaaccgccgctcggcttctgccattgcaggatcagcgtgagggcatcgtgcaacccgacttcgagcgcggccggcacgccgacttcgcccttccacttggcgcggtaggccagcagcgcgcgcgtggccaccagatggttgtaggcggtcgaacccgcggccagcggcccgaacacgccgggctgcggagtcgtgctgttggcgcggtgcttcagcagccaggccgcggcccggtgcgccgccttctgacaggcctcctgcttctcgccatcgagcagcgccgaaccatccaccagcgcgtgcagcgccaggccgacgaccccgaactggttggcggtgttgccggtggccggcgcgatcgtccagccgccgtcgggatcctggttatcgatcagccagcccaggccaccggcgaggccggcgcgcaagtcttcggcgaccggggcgggccgcggtatctccgtggccgcgcgccaatgcgccagggccaggggagccgcgggctcgagcggatcatccgcctcgaggctcttgaaggccttctcgaagtcgcgccgcgccttgttgaaggcatcgtcgttcgcggcgatcacgaagaagcccagctcagcgccgggcgcatcgacggcgtacagcgcgccgctgcgaccatcgcccagctcaaacggcagccgctggcctttgaacttgccgaccttgccgctgcggatccggccgatctcgcgcgagaccgtcgggtgccaggtcgtcaggatcagatccagctgcgcggtgatcgcacccagcagtggcttcttgtccttccacggcagctcgggcagctccaggaccagcacttcgtacgccggccgatcctcgaaggccgccacccgatgctggcgcaccagggtgaaggccagttcgccctcgccgcccgcgcgcagctcgcccgcctcggcccggtaggccgcccaggcctcggtcgtctcgaccgccgccttcgtgtcgagctcataggccgccagagcctggccgtgggtgtagaccacgggctctgtagcagcttgtgccccgagcaaagagaggagaatcgaaacccacatcgcggatccccgagtctagccgtcgcaccacaggcgccgagcctgcgccccgggctcgtaccccatttcgtggctgaggcggtactccagccaggtccaaaagtcgcgttcaagcatcgaagccgccggaatagatcccgggaatggatagaatatgcggccgtaccgagtacggagaacacagcatgcccaccatcgaatctacccctgaaatggtcgcgggcgtttatgcccgcatgcgtcagaacctggaagtcgtgcgggggcgcttgggccggccgctgaccctggccgagaagatcatcctcggccacctggacaatgcccaggcctcggatatcgacccgggcaaggcctatctgctgctgcgcccagaccgcgtggccctgcaagatgccaccgcgcagatggcgctgctgcagttcatgatggccggcaaggaagaaacggcggtgccctcgacggtgcactgcgaccacctgatccgcgcgcaccagggcagcgagaaggacctctacgtcgccaacgacgagaaccgtgaggtctacgacttcctggcctcggtctcgcagcgctacggcctcggcttctgggagccgggctcgggcatcattcaccagactgtgctcgagaactacgccttcccgggcggcctgatggtcggcaccgactcgcacactccgaacgccggcggcctgggcatgtgcgccgtgggcgtggggggcgccgacgccgtcgacgtgatggccggcttcccctgggaagtgctgcagccgaacgtgctgggcgtgaaactgacgggcaagctcagcggctgggccgcgccgaaggacatcatcctgaagctgcttggcatcctcaccgtcaagggcggcaccaaccggatcatcgagtacttcggtgaaggcgtcgagtcgctgtcctgcaccggcaaagcgaccatctgcaacatgggcgccgagctgggcgcgacctgctcggtcttcccctacgacgagcggatgggcgtctacctgcgcgcgaccaagcgcgcggagctcgccgacctcgccgagcagaaccgcgacctggtcatcgccgacgaaggcgccgaggcgcactaccaggaagtgatcgagatcgatctgtcgaccctcgagccgcacctggtcggcccgcacaccccggacctcgcccgtccgatctcggcgatggacgacgcggtcgcctccgagggctacgaggacaagctgtcctatgcgctgatcggctcgtgcaccaactcctcctacgaggacatctgccgcgcggtcgatgtggccgagcaggccaaggcgcagggcgccgagctgaagtcgccgctgatggtcagcccgggttcggagctgatcttcgagaccatcaagcgcgatggccagatggagcagctcgagagcgtcggcgcgacggtgctggccaacgcctgcggcccgtgcatcgggcagtggcagcgcgacgacatcgagatgggcgagcgcaacacgatcgtcacctcgttcaaccgcaacttccgcggccgcaacgacgccaacgccgagaccctcggcttcatcggctcgccagagctggtgatggcgctcgcgatcggcggtcggatctccttcaacccgatggaggacacgatcgaaggcccgaacggtgagtggaagctcgaagctccgcagccggcgccggagattccggagaacggatttgtgtttgccgccgagggttaccgcggcccgaccccggaaggcgcatcgactgaggtcgccgtcgacccgaatagtgagcgcctcgagctgctcacgcctttccagccgctgccggccgaggcctaccaggccatgccgctgctgctgaagacgaagggcaagaccacgaccgaccacatcagtccggccggcaagtggctgcgtttccgcggtcacctcgacaacatctcgaacaatatgttcaccggggcgatcaacgccttcggcggtccggcaggcaccacccgcaacccgctgaacggcgagcgtgagctgccggtgccggcggtcgcgcgcgacctgaaggccgcgggcaagcattggatcgtggtcggcgacgagaactacggggaaggttcgagccgcgagcacgccgcgatgtgcccgcgtcacctcggcgccggcgcggtgatcgtgcgcagcttcgcgcgcatccacgagaccaacttgaagaagcagggcgtgctcgccttcactttcgccgatccagcggactacgagaaggtgcgcgaagatgacaccatcaccctcgaaggtctggaccagctggcaccgggcagcgaagtcttcgccgtggccaaccacagcgacggcagcagcgatcgcttccaggtcctgcacacgctgaacgacgagcagatcagctggtggaaggccggctcggcgctcaactcgctgcgcgacgaagcggtcgcttaaggcggcagcccgcgccccccgtcgggctgtgtcccagagcgcccgtcaatgcgtgcgcttcgggttgtttctatcggcagggccttcgcgtaggccacgcgctgcgcgaacagtcttgccaaaactgcaggcgggctaaactccaattctggcaccgtcgcgcagtcccgcatcactgcgtcgtactgaatcaccgacaccgtgcgttgcacgcacgacccctagttgccgcaacgcaatctcgcccgctctcgtgtgaaggaagacacgatgccattcatcacggcgcaagggttggctctccctctgccttcgatgccgggctgggtcgcgactatctgcttgtagatcgaaagagccttgaggttcgtcaccggctaggccgaccctccctgactgctgactgatctacatatgtgtcttgatgtggtgagccaggacggcgtccagatcctcgactcccaccagcgaaacctgacgactcagctctagcctcaatcaggcagcaagtgccccaaaaagcggttgcgccccgatggcaagccatcggggcacagagcctgcggatctgagtccttagtgaaaaaagggacgaactctgaccagttacacttaaaaatattctactcttcgctcaatgcgaagcaaccatttacacttcgtttaaggagcgaatatgcctgatttcgtactcggtctcgatctcggccccaactccatcggatgggcacttcttactgctgagttttccacccaagccgggcatgagtcctattccgtaacgggctttctggacacccaatctgccggccacccgcccgtcggcgttcgcgtcttcgaagcaggcttgcagaactttggcacggcaaaggaatcgtcactctgtcaacagcgacgtaccgctcgcgcgatgcgacgcaaccacgcacgccggaacgcgagacgctatgccctcagacgactactcacccgtggcggtctccttccaaccgagcaagctgagttggatcgagttctcagcgcaaatccctacgcactacgagcccacggactggacagtgcgctctctccacacgaacttggccgcgcgatctaccaccttggccagcgaagagggttcaagtcgaaccggaagtctggccagtccagcgaggaaaagggaatgctcaaggagatcggcgatcttcggtcggcgatttctgcatccgaagcgagaacgctcggtgagtacctataccacctatccaagaatcaggtcgatggtcgctgcccattgacgcgcggcacacttaggttgcggaatacgcatacgcgaagggaaatgtacgtgcaagagtttgaccaactcattgctgcacagcgtgcttaccatacagaagtattgaccgacggtttcgtcgaggacctccggcgcaccatcttctttcaacacccattcgaagtcacagaagagcgacgaagaagcgcgtcatcacgagcaaatctccatcgatcaccacaagcgaagcgatgtctacttatccctgagcttcggcgcggctcgcgcgcagcctggtgcgcgcagcaattccgcattctgaaggaggtaaacaaccttcgtgtctcagaacatttctcgaccgtcgagcggccccttactgcgaaggagcgtgagttgattctggctcgcctctatatttcccagaaggtgacgttcgaccagttgcgcaagatcgttgcgaaagtcggaacggatccctatgccgtcttcaacctggagcgcggcgcgcggaatcacctcgatgggaattccgttgaatcgaagctacgcgcctgcttcggcaccagcacttgggattcgctcgccgacgctatccgcgatgagcttcgagactctctcctcaacaccgaagacttagagggattcaagaatgaatgcgtccgccatggggcatctccggacaaggcagggaagcttgctgaatggtgtccctccgatgggtatttggcttattcacacacggcgatccgccggctcatcccgcatctaatgaatggaaagggcgaggacgaggcaatccgactcgagttcccggaatccgctgagccggaggctctcgcagtacttccatctcttgtcgaccccctacttccagacaacctacgggagatcacaaaccctatcgttcgtcgcgcacttggagaacttcgcaaggttgttaatgccatcatttccgcgcacggacgcccgcgcaaaatcgtgattgagctagcccgcgagatgaaagacgggccgaaaggacgggccgagaaaagcaagcgaaatgctgcccagcgcaaaaggcgcgaggccgcgcgcacacgtgctgaacagctaggaggtaatccgaacagtcgcaaggatgtggatcgcatcttgctctgggaggatcaggggggagtatgcctctactccggtcgcccgattcctcagagcgaactcttcggaggcgaatgggaagtcgatcatattcttccgcgctggcgttcattggacgactcgtacatgaacaaagcgctggttcatcgcactgagaactccgctaaaggcgatcgactcccgggcgaatggctgagccctgatagcgagcagcaccgccaactcctgcagcgggcgaggaccgctttcgctggcaagaacctagaccccaagcttgcacgcctcggccagtccgaactcgccgccaacgagtttgcggcgcgccaactgaacgacacgcgctacatcactcgcgctgtctgcgcataccttgagcttctctaccccgccgaactgcgccagggcgagagcgccgtccagtcgacacgcggaggcctgacggcggaactgcgccggaagtggggcttgaatgacatcctggctccactcctggacaagcatggagaactcgtcctgtcaggtcagcaggatgaggacgggcaaccgcgaaagtcacgtgcagatcaccggcatcacgcgatcgacgcaatcgtcgtcgcagcttcgtcccggagtatgctcaagcgctatcaagacttctggaaggctcgtgaggcgcatggcgatttcatcgccttccctcgtccgtgggaggacttccggttcgactgcaaggaagtcctcgatcagatcctggtttcgcatcgcccggctcgtcgagttcgcggcgcgctgcatgaagcgacgttctacggacaggctcgtgaccgcagcggcgagcttgcggggcaggtcgtcacgcgcaagccggtagctgacttgaagccggccatgatcgataggattcgtgatgacatcgtgcgcgagaggatacaggaaaggctgcgtgagcgcggctggcgcgaaggagataagaccctccccaaagattggcacaacccggagattacgaccttgtccggaatcccgatccgtcgagttcgcgttggttcagcaatgaaagcggggcttccactacgcaaaggacgagtcacgctgggaaacaaccaccaccttgcgatcctccgcgacccagacggcaatacgaaagtcgaagtcattccggccttcgaggcgatccagcgcgcgcgcaagaattgtgggaatcccgttcttcggaagcgtgaagacaaccttgaattgatttgctcgttgagccggaaggaatcggtactagtacagtgtgcgggtgatgagtcgccccgactagccgtcgtccagatgatgagtgggcaacccaagcctggaagcaggctagacctatacctccgcgacgcccgagatgctcggccagcttccgagggcaacaagtccccactggtccggattcagtccattggagcgctgacgtcccttcatcttaagaaggtgacgattgacccattaggtcgagttcggccggctggagactaaaggcgcgccccttctccggacgatgcgtaaggcacgccctgcgctctgttcgcatgaaacgcacgatcgctattgcaacaaaaggggtttctctttctattcgcaacgctcagcttgtcgttcaactcgaaggagaaaccctcagtcaagttcctgtagaggatattgggctcgtcaccctggaagggtctggcatccgaatcacttccggcgcactaaacgccctagcatcgtcaggcgcagctgttcttgcctgcgatgcgaagcacctaccaagctctctagcgctacctgtcgtcgggaacgggcttcatgccgagcgaattcgctatcaatttgctgcctctcaaccactccgtaagcagttatggaaacgaatcgtggtcgcgaagattctaaaccagcggcaactcctcaaaggaaagccgggacataggcgcttacacacgctggcacagcaagtatgcagcggagatgtctcgaatgtcgaggcgcaagccgcaagatcctactgggccgagctctttaccacacacgatcctactcttcaattccggcgtgatcgacacggagcctttccgaatgctgtccttaactatggatacgcagtccttcgcgccgccagcgcacgtgcactagttggcgccggacttcatcctggacacggtatccaccatcacaaccgctatagcggcttcccgcttgctgatgatctgatggagcccttccggccttgggtcgacgccgtagcatgcaagatcatcgcgcgcggatgcacaaggctcgggcgggacgagcgcgcattcgcgcttgaagttttgactcatgacgtggggacggcgcaagggacgaggcctctttgggcgagcctcgatcacaccgctgcaaccctggcagaagcactacgcgcttctgttgcggagcagctgcgcgcggtcgatgccgcagggttgctcgcacttccgcaatggccgacgcacggcgcatgatgagactaagtgcttatcgcgccatgtggcttctcgtcctcttcgacctccccgtgaaatccaaaccgcaacgaaagttggcaactagcttccgcgaatacctgctaaaagatggattttcccggatccagtactcggtctatactcgaccttgcccgtccgaagagaatgctcaagtccaccgacgccgtgtgcagcaggcagttccgcctgaggggctggtgcgcatcctcgtctttaccgacaagcaattctcacgcatggattgctaccagggcgcgattccggttgccccggagtcacagcctcgtcagcttgacctcttttagtttcctagaaaaaacgcaagccactattccagagtgacttgcgtttgttcgagtgtaactggtcagagcccgtagccgatctccaacgggaactcccggccctggacgagctggactagtgtaactggtcagagcccgtagccgatctccaactggtgggacgaagggcgcgtggtcgtgcacagtgtaactggtcagagcccgtagccgatctccaacaccgctaggggattcaccatccacactcccagtgtaactggtcagagcccgtagccgatctccaacaggtagatgtcgccctggcggacgatctgagtgtaactggtcagagcccgtagccgatctccaactccctcgccaagctcgacccgccgccgtgcagtgtaactggtcagagcccgtagccgatctccaacttctcggtctggttctgctcctgctggttcagtgtaactggtcagagcccgtagccgatctccaacttcaatggcgatggcccgggagaccacttcagtgtaactggtcagagcccgtagccgatctccaacgcctgcatgccgtagttccagtagaccgggagtgtaactggtcagagcccgtagccgatctccaacagttcgcctgctactacaccgacaacccaagtgtaactggtcagagcccgtagccgatctccaacgtcagatgaagtcaccgcagggccgagctgagtgtaactggtcagagcccgtagccgatctccaactgcgacctggtcgtcgtcgatccaggcacgagtgtaactggtcagagcccgtagccgatctccaactgcttgctcggccagcagttgatcgcgagaagtgtaactggtcagagcccgtagccgatctccaacaaggacggcatcttccagcgagcgatcggagtgtaactggtcagagcccgtagccgatctccaactgctggcactggatgaagacgaacggcggagtgtaactggtcagagcccgtagccgatctccaactcctgcagctgcttcgaagcctcggcggccagtgtaactggtcagagccagtagccgatctccaacactgcggcggggctgtgggcgcgaatgccagtgtaactggtcagagcccgtagtcggcgcgtttcctcgggcaggcgcagcgcgatttcgccttccttggtgatgaagctgaacatattgccgttcatcgaggtgtaggggttggccttgcccttgcgttcgatgccgggctgggtcgcgaccatcttctcgtagatggcgacgattctcaggtcggtcatgactgaatgcgagggcgaagaggaatatcgacgagcttcatctccgggctgcgatcagcgagctggatcagcgcggctccgcttgcgtcgcaagccatgctttgcccgcctacgacaaagcccttccaggggccgtcgtgcagctgccccgtcgagtcgacgccgatcgtgggtgcctggcagacgcgcgcggtgttctgaatccaggcgtgcaggctcttgccgtgctgcggccactgctcggcaggggcggcccagccgtagggaacgatcatgagatcgggttgctcggccgccacacgcgcgaccgtctcttcctggaaggtgtccgcgcagatgagcaggcccacccgcccgaagcgcgtctcgaccacgaccggctcgccgtcgcccggcgcatagggcgggtccatcagctcgctcagaatgttgagcttgcgatgcttggccagcagctggccgcggtcatcgatgagcacggccacgttgtgcagcgcgggtccgtcccgttcggccatgccgatggccacgtgcacttcggcgcgccgcgccgcggccgcgatgcgatcgaagatcgggccggggatggtcgccgccgcatcgtgcgcagccgagttgacccagccgaagacgcaggcctcggggaagacgacgagctgagctccgctgtctcctgcttctgcgatcgacctctcgatcgccttcaggtttgcctccgcgtctggcccgacctccatttgacagagcgccacagtgaccatattcggcagcgcttcctgatccggcatcacacaggaacacaagacggccaggacagcggcggcgcggatcacgccccgattctagaccgaatgcttcgcgatcttgtgctagattccacgcgatgcgaactggcctattcatcctgacgctcggggcgatcgtcgccctccctccctgcatttctgcacagggattcacgcgccgcgtgaacgtcaactccttgggcgcgctcggcgaccgcggcagcagcgatgtgcgcatctccgccgatggaagctgcgcggtgtttagctccgacgcactcaatctcgatggagcgccgagcggtttcggggacgtctatctgcacgatctgctgctgcaccgcaccgaacgcgttagcctgactgacggcggcgggctcgcgaataagctgagcgaactgccacgcgtctcgggcgatggtcagcgcgtcgcctttgtgacctacgccgacaacctggtcgccggggataccaatagtgcgcgtgatgtctacctgcgtgatcgcgccgcaggcagcacgcagcgcatcagcctcagcacctcgggcgaacagtccaataacgactcctacgtcgccgggctcagcgcggacgggcgctacgtgctcttttcgacgcgcagcgccaagatgcatcctgacggcaacacccggaatcacttctatctccgggataccctcaacggcaccaccacgcgcacgacggaaacgtcgctcggcgccgccgccaatcaggactgccgacacggtttcctttccgcgcaggctgactgggtcgtgttctcgaccatctccaccaatctgcccggcggcgcggggaattcgcgcgacgatgtctatatccgcaacctgaatacgggagtcaccgagtggatcagcagcacgtccaccggcggcgagccgaacagtcactgccgttacccgagcgtttccgcggacggccgctgggtagtttttcaatccgccgcgaccaatctcgtgccgggcgacaccaatggagtctccgacatcttcctccgcgatcgccagactggctcgatcacgcgcatctctcagcgctgggatggcagcgaggcggcccgcgagtgtctctccccacgcatctcggaggacggaaacacgatcgtctatcagacgacagatccatccatcgttcctggggacaacaacaacgctggggacgtcttcgcctacagccgcgtgaccgggctgacgcagaacgtcaacctcggcagcggcggggtcttcggcaatgacagcgcctccgacgccagcatctcagcggacggcaaccgcatcgccttcgccagctgctcgagcaatctgatcggcggcaccacgatgctcaacggagggctcttcgtgcacacgcgtacgcctgtgactagtgacccgattcagctcaccgggccgacgcaggcggcgtccggcgacagcgtaagcttctactggtccaacgggacaccgtttgcgactgagtggttcagctacagcctgtccaacgccgggcgcaaccagtacggacacaactttgacctggggcttcccgtccaggtgctcttccagtccacgctggatgccaacggaggggacctcatcgacgcagtgattcccgcagtcgccgctggacggaccttctatctggaggtggtcgcctacgacggaatcacgattcaggattccaacttgcggagcctccagatcctgccctgagcgattccctgttgaattcttggttgacagcactgattcactcattacacttcgctcccatgcaacagtgcagcaccctgaaaaaggcgaaagccaagcgcggcccgcaaggtccggctggggtgtccctgttcgcctaagaaaccaaggcaaaccgaatcacccgccgggccaaacgcccggcgggttttttctttgccacgcacacaaccgagaatcgatgaaccgcaacgctcaaccgatggaggccaagcccaaaccctggggctcggcggcgctgcgcgtgctcttctcgtgatgagtcgacgaagcggcccggcctgagccctgcctcgacctcttcccaccggcgctctgcgtgcggtctgcgggagaggtctgcccggacaccaccttcttttcccttcacttcaccgcaaaccgaacatcatgaacgacaccactctgaccacggcctcctgcccggaatgcgccgccgaactggcgctccccaccgacctgctcgccggcgaggtcctgccctgcgacgactgcggcgccgacctggaagtcctttccatctctccggtcgaactcgcgctcgctcccgaagtcgaagaggactggggcgaatgagcgacccgctgctctttctgcacacgcgcctgcgcctggaggagaagctgctcctccaggtgctcgcgcggcgcggggtcgacttccagacgcaggatctgcgcaagctgcagctgcacctggactcgcccgccgagatcgcggccagcctagtttgggaccgctcgctctcctttggccgctcgctggccgcgatgcaggtcttcgcatccaacggagtgacctgcctgaacgacccggcggtgatcgcgacctgcggcgacaagctgcggacgcagctcgcgctgaccgagcacgggctgcccacgccgcgcacccgcgcctgcttctcgccggaggcggctctggaggcctgcgaggagctgggctacccggtggtgaccaagccgacggtcggcagctggggccgcctggcctcgcggctgaatgaccgcgacgccgccgaggccgtctttgagcaccgcgacaccctgggtgactggacccacggcgtcttgttcctgcaggagtacgtcgacaagccggggcgcgatctgcgggtcttcgtgatcggcgatgaagtgatcgcagccatcgagcggcgcagcgagcactggatcaccaacaccgcccgcggcgcgcagaccgccaaccgcgcgcttgagccggatctggtccgcctcgcgcagcaggccgcggcggccgtcggcggcggccaactcgccatcgatctgatcgaacggcgcgacggcgaactgctggtgctcgaggtcaatcactcgatggagttccgcaacagcatcgaggtcaccggggtcgacatccccggtcgcatggtggacgacgcgctgacccgcagccaagagggggtcccgggatgagcgcgtcgtccccggcaccatttcgggtcgcgatcgccggcgcttcgggctacgtcggcggcgagctgctgcgcctgctgctcgcgcacccggacttcgaggtggtgcaagccacctcggagagctcagccggccaaccgctgacgcgcctgcacccgcatctgcgcgggcgcactgctctgcgcttcgtgccgcttgccgagctgcagccggtggacgtgttggtcagcgcgctgccccatggcgcgctggccgttcgcctgcccgaactggaatcgctggcgacggcgatcctcgactgctcggccgactttcggctgagcgagccgcagcactatgaacagtggtacggcgaagcgcacccctgcccggagcagctggggcagtgggtgtacgggctgcccgaggcacggcgcgacgcgttgcgcggcgcgcgcagggtcagcggcgtgggctgtaacgccaccgcggtcaatctggcgctgctgccgctggcgcgcgccggcttgctgcccgcggacgggcgggtgatcgccgaggtcaaggccggcagctccgaaggcgggcgcagcgcgcgcgcgagcagccatcacccggagcgctcgggagtgctgcgcagcttcgcgccggtcggccatcgtcataccgccgaggtcgaacagctgcacggcctccgccaggtgcacctcagcatcacctcgatcgaccgcgtgcgcggcgcggccgccacggtgcagctcttccccgagcagctgcccagcgaacgcgagctgtggaccatctaccgcgaggcgacggccgaggagccctttctgcgcgcggtgcacgagcgcagcggcgccttccgtcaccccgatctcaagctgctcgacgggaccaactacgccgacctcggctgggcgcgcgatgaaacgaccgggcggctggtgctgctctcggcgctcgacaacctgggtaagggcgccgccggcagcgcggtgcagtgcctcaacctcatgcacgatctgcccgagacacgcgggctcgactttgccgggatcttcccggcttgaacttcagcatcatgaccaccatcatcaaaatcggcggcgcctccgggattatccccgacgcgatctgcgacgacctgcgcggccgccgggctgttgtgctggtgcacggcggcagcgacgcgaccaatcgactctcgacgcagctcggccatccgccgcgcatggtgcagtcgccctcgggtcaatggagccggctgaccgaccgcaccaccctcgagatcttcgcccaggcgacggcgctgcaaaaccggctgctcgtcgagcggctacaggcgcgcgggatcccggcgatcggcctgtccggcatcgacggccgcgtcgtgcaggcgcagcgcaaggaatcggtgcggatcgtcgagaacggccgcatccggatcgtgcgcgaccaatggacggggcgccccagcggagtgaaccgctcgctgctgcgcaccttgctcggcgaaggctacctgccggtgatcgcccccatcggctgcggcgcgcgcggcgagaggctcaacgtcgacggcgaccgcgtggcggccaagatcgccgccgagctgcgcgcgacgcgcctcttgctaatgaccaacgtgcccggcctgctcgccgacccggaggaccccggctcgctgattcgctcggtccgtgccgatgcactcgagccggcgcgcgccgcagcccaggggcggatgcgcaagaaggtgctcgccgcggaggaggcgctcgaagcgggcgtcgagcaggtcgtgatcgccagcagcaatgcggcgagcccggtcacggacgcgctcgccggacaggggacggtgtttcgtcaggctgccccacgcgccgctgcgcgggagctggaagcatgatcgccgccgctcccgacacccacggcctggtcggctacggcagccgcggcgtcagcctggtgcgcggccagggcgccgaggtggtggacacccacggccgccgctacctggactgcacctcgatgtacggcgtcctgccgctcggccacgcccacccggcgatgctcgaaacgctgcgcgcgcagtccgctgagctcagcaactgcttcgcgagcttcggcaacccgcagcgcgaggcgctgatcgaggagctgggtgcggccttggcgccgcagctcgcgacggacggctcggcgctgcgcttcttcttctgcaactcgggtgcggaagcaatcgaggccgcgctcaagctggcgcgcgccaccaccggccggccgcgcatcctggcggcgagccgtggcttccacggccgcaccctgggcgcgacttcgctgaaccatcgcgccgcctatcggcagcctttcgctccgctggtgccgggcgtcgagcacgtgcgcttcggtgatctggccgcgctcgaggcggcgctcgacgaagaggtcgcggctgtcgtgctggaaccggttcaaggcgaaggcggggtacacccggcgccttcgggctacctgcgcgcggtcagcgcgctgtgccgtcaggccggcgcgctgctaatcctcgacgaggtgcagaccggcttcggccgctgcggcagcttgcttgccggccctgccgacggcgccgaggccgacctgatctgtctggccaaaggcatcgccaacggcttcccgatgggcgcgctggtcgccggcccgcgcgcgggcagcttcccgccgggcagccacggctcgaccttcggcggcaatccgctggcctgcgccctggcgcggacctgcctgcgcgtgcttgacgaacaggacatcccgcagcgcgtcgccgccgcggccccgagctggcacgccgagctggccgccgcgtcttccacgcggatccgcagcgtgcgcgggcgcggctacctgatcgggatcgagctgcgcgaggaagccgggccggtgcagagcgcgctgcaggagcgcggcatcctggccctgaccgcaggccgtcaggtgctgcgcctcttgccgccgctcatcctcagcgcggcccaacgtgaccgcgtgaccgagaccctgcgcgaggtcctgcgatgaatgacgaccaggccatcgagctgctggagcagatcgtgcggatctcctcggtctcgaccgaggaagccgaactcgcgcactggctggcggcggaactcccgcgctgcggattccgcgcccatgtggatgcggtcggcaacctgcgcgcgagcatcgggcgcgaggatgcgccgatcgacggcgtgctgctcggccatatcgacaccgtgcccggcgatctgccggtcatgcgcacccgcatgcccgacccgcgcggcgaaccctggcaggagcgcctgttcgggcgcggcgcggtcgacgcgaaaggaccgctggcctgcttcgtcgccgccgcggtgcgagcggtcgcgcaacgc

SEQ ID NO: 402 - DNA, 17586 bp, synthetic construct
  source 1..17586: mol_type = other DNA
  misc_feature 1..17586: note = Synthetic
acagtctatgtacagtaccccatgccagggtcgccggcagagcgtgcagggctccgtatgggtgatgcctttttggagatcgatggggtgtcggtagtgcctggcacaccctccaaggtgagtagtaagctaaaaggccctgctggcactagtgtgcgggtgaaggtactaaagctggggaaaagtgatccagaggagatggagattgtgcgtggatctgtggtggtggatcaagtggtgagccgtggcctttaccaagatagcattggctatatccgcctcaatagcttcaccactaagagtgctgaggatgtgaggagagcctatgccgagctcaataaggggggtaagatgaagtcgctgatcctagacctccgtggcaatggtggcggtgtaatgggaggagctattgagctactcagtatgtttgtacccaaagggaccaaggtgctctatactaaggggaggctaccacagacttcgcaggagtactttaccgagcaggagcctatagacctggagatacctctggtggtgatgatcaatggaggctcggcttcggcgagtgaaatcgtggcaggtgctttacaggatctagatagagcggtgatcgtagggagtaagagctttggaaaggggctagtacagaccacgcttccaaccccgtatgatggcatcctcaagctgaccacttcgcgctactacataccgagtgggcgttgcattcagcagcttgattattcacaccgcaatcccgatggatcagttgcctcggtacccgatagcttgaccaatgtatttcacacggcaggagggcgcgaggtacgtgatggcggtggcattcgaccagatgtggagatcgagggagagatgatggatgccatcacgattgccctcagcaaccaagggcggatcttccaatttgccaaccaactctttttggagcacccacaggcaaaggagctacaggatattgtgatctcggatgaggaggtggctcggtttattggagagctaaagggggaggactttgaatttggcgagatgagcctagagatgctgaagtcggtggagcaggtagctaagtttgagggatatgaggaggtgagcaaggaggcatttgccactcttcgcaaagcacttacgccctcaattgatcaggcatttgccaagagtcgggatcagattgtgcgtctgctccaaggcagccttgctcagcactatttcggtcaggaggggcagtttgctatcacactccaagacgatcctaccatgcagggagctatggacatcttgagtacgccaaagcggtatcacgacattctacggaagtcatcactccaataatctcatcactatggcgaagcacgatagaggcggtatgatattttctaccaatagagacctaatggaccagctccagagcacccctcaggtggagactttgtcccctgagaagcaacctctagtggtacgcagagataataaaggacggaagggcaaggtagtgacgctggtggagggatttataggcagtgatgatgagttgcagactctagcaaagcgactgaaggtggcttgcggtgtaggtggcagtgccaaggagggcgaaatactgatacagggcgaggtggtggagcgggtagtgactctacttcagcagtggggatacgaaaagtgcagaaggagatgacggaagctgcggttaataagtcggcaggtaaggagcaaagaccgcttaatatattcaaagcatcggcgggtagtggcaagacctacacgctagtgcatcggtacctggatctgctactttcggatgggttggaggggggatacaagaggatccttgttgctaccttcactaataaagcaacgacggagctgcgggaaaggattgtgaaggagctatatgagatttctctcaacggaagaaagcaagagaagggggcgccaaagaaaacaccacaacaaatagataaagagaaaagcaaagcaagggaggtgctggaggagatcctactcgactatgaatctctgagggtacagacgatcgactctttctttcaggagattgtccgcaccttcgtgattgagttggagaatagtagcgccaatgccgaggtggcacttgatagggatggggcgattgagatgtcggtggatcgcctccttttgaatcaagagagcaatgtatttactcgattgggctcagtgcttctctctcgagtggaggagggtgatagcactgatgttcgtgcggccattatcaatcttgccaaggagatgctctacaaccctcaggcggataaataccctatccaagctctcgaccctaaggatattgatctagctgcaatggaattgaagacaaaggccgaggaaactctctcagagatggagaagcctttcgacatccttcaagacactcttgcagaatacgccgatgaagcactggcacttagtagctatggtttcctacaagctctgcgaggaaaggagctatccgaactgatccttaggaagatcacggacacacaaaagcctgtatacgacggcaggataaaggtgggaaaagatgggaagttggcgatcttctctagtaagaacttcaaagtggtggcagagcagtttccagagctactgaatggccttgacgatatagagcagaagctatacgaccttaatgatgtgattggtcaatatgcaggcgactatcagctcgctaaactgctcaaggagcatctgagcctgctccctattctctcgcagctacaaacggagatagcacagtaccaagaggagcataaggtggtgctgatcgaggagatcaatgaactggttaaaaaggtgatcaacggtgcttctaccccccttatctatgaaaaggtgggcggaaggattgaccactatatgctcgatgagtttcaagacaccaaccgcacgcagtgggaaaactttagggtgctgctcattgaaagcctgagccagatgaaggagaacttcctcgtaggcgacgtaaagcaaagcatctataggtggcgaggtaccgatagctctctacttaatagtgaggtggagagtgaccgcatactccaatactttacaaatgatgacccactgaaaatcaattggagaagtgacgaaaacatcgtgcgcttcaacaacctattctttgataacatctacgacttcccctcccatactggtctcgacggggagagtaatgaggtttacaagaagatatacgagagcaacgtctgccaagagcctaacaagaagaatgggcatggctacgtacgctttgagcaactagaggcaggcgatgagggagagccggtagaggaggtactcactaatcggataaaaaatctactcctagaccttcacaaagatggatacaacccaggggatatcgccttcgtggtacgcaccaataatgaagcaacgaagatagcagagatgctgaataacttcgccacagaagacaaggccaatcgccactgctttgcctttctctcggatgaagccctactggtgagccactcaagcacagtgaagctgatcacagcactataccagcatgtagccgaccctcaaaacagccagaaaaaggtcttctttgaggtggcatgccatacctttgggatatccgatgaggagaagatagagcaactgatccaaatagtgcaaacgggagctaccctctttgagataaccaatgaactcctggcaaatcttgagataccaagtgaggaggagctctatatcaattcgttcctagacctactccatgagtttgtagagaatgaacccaatacgctactccagtttagctattggtggaagcgcatcggtgtccggcagatggtaaccatgggcaatgacgaaaacgacaagatacagctgatcacccttcacaaagcaaaggggttggagtttcccgtggtgattatgccctatcttgattgggatatctctaagcttagcttaaataacagtttggagttttgtgacaccgagaagtaccttcctgagggctttgtgcagcatccactccccttctacatcattcctgaagccccctctgcaccacacctcaattcgctcattggcaagaagtatagagaaatacacgagtccaactacctcgataatctcaacctactctacgtggcatttacacgcccgaaagagcggctctacctctataccaaagagaagcccagcactaagaaagtgacccgtatcgtacacgagcgactaagactgctcaagaagctagaccccagcgaggaaagtatgctacagtgtgagaatgaaaaggtttggacctatggtaatgagcaaaggagggataagaagaaagaggatatctccactaaggaagaagtagcgacaaaggtggagctacaccttaataaagagccacgccaatcgattcttaggcggatagagtccgaagctgcctttgatagtgaagctattcagcacgggattaagatgcacgatgtgatgtcgagagtgatctcgtgggacgactttgagcacgccgttgcccgcctacctaagacagaggaggagaagcagaccctgatcaaccaatttaatacagctctgacggaagacccacagctgcgagactggtttacccccaaggagggaaggagcattctcaccgagcaatctatctacatcggtgagtacgaccgacataggcgacccgataggctcatcatagagggtagcaatgccatcgtgatagactataagtttggcgagaataccgatataccgcagtaccgagctcagatcaaaggctaccttaccctactagagaagatgggctaccaggcaaagggatatctatggaattgggaaaagaccccagagattgtagaagtaaagaaataacaccatggctatgaccccactcattggcaaaacactttcggagctccaagagctagttacctctttgggtgaacctcactttagaggcaagcagatagcagaatggctctaccaaaagcgcgcaacctccattgaggagatgaccaacctctccaagtcgtttcgagctaaattggcggagaattatcaggtcggtcgcactccattcacgcaccgacagatctccacggatggcacagagaagtaccttttccctctacttgccaatcccgcctaccaatttgagaccgtttacattcccgaagctagtcgagccaccctctgcatcagcagtcaggtagggtgcaagatggcgtgctcattttgtgccacgggtaaaatgggctggttggccaatctatcaagtgccgatattatcaatcaggtgctcagtatcccccactccgataagctcaccaacttagtctttatggggatgggcgagcctttggacaactatgaggaggtagcaaaggtgatagagatactcaccgccgactacggtctggcgtggagccccaagcggatcacggtcagcacgataggcgtaaaggaagggctcaatagacttctacgggagcagagcgtacacatcgctatcagtatacacaatgcgatacccgaggagcgactacaattgatgcctgtggagcgagctttccatatagaggaggtggtgcaacagctaagccaatacgacttttcgggtcagaggcggctctccttcgagtacattctatttgagggtctcaatgataccaaggcacacgccgaccgtctgatagccctcctcaagccactcgattgtagggtcaaccttattcggtaccacgctatcccaggcattccctaccatacccccacctcggagcaggtgctttggtttgaggagtacctcaataagcacggactacgcaccaccacccgacgctcacgtggcgaggatatatcggcagcgtgtggtatgctctccacagaaaagaaaaagtaatcctctaccgataaaatggctacctttcgccaagcaaaagacctcacgagaggaccgatcgggcctcatctggtacaccttgccctcccgatactagggacctccttcatacagatgctctacagctttaccgatatggcgtgggtagggcgtctctcctccgaggcagtggcagcaacgggagcagcctcggtctttacgtggattgccagctcactctctatgctgaataaggtagctgccgaggtgggggtctccaatgctctaggcagaggagagcaggatgaagctcgccagtacgccagccacacctctactattgctatcattatgggcgtggtggtgatggctatctacctcctatttaatgaagggttgataggcatctatcggctcgagacctctatccacaagatggggaccgactatctctccatagtggcgctagggttacccctcatctttcccacggtcgcctacaccggcatctacaatgctacgggtcactccaagattcctttcattataagtagtataggactatttctcaatatgctcctcgacccactccttatatttgtagcgggcttgggggtcaagggggcagcactcgccaccatcctctcccaagggatcgtgctagctcttttcctcttacagatgtgctacagagaccaattgctgggtggaatcaagatattcatcaaactaactaaagggattacctacagcgtactgcgtatcggcacccctgtggcagtgatgaatagcctatttgcttttatcaacctcacactaggacaccttgcctcgctctatggcgggcatctcggagtgatggcactcactactggagggcagctagaggggctctgctggaataccgcccaaggattctctaccgcccttagtgcctttactggtcaaaactatggggctaatcagatagaccgtatctacaaaggggtacggtacacactgatcttatcactgattgtgggcgtactgggcttctgcatctactacttttggggcgaagggctcttcgcactcattgtccctgaggaagccgcctacatcgcaggtggcatctacctatccattcaagcggtaccacaagtatttagcatgatagagatcaccagccaaggtttcttctatggtatccgccagacactccccccctccctcatcagtatcattggcaacctgctccggattcccgccgccctcctcttattacccctcaccaaggatatcaccaccctttggtggatcatttgtgcctcctctattctcaagggcatcgttgctggcatctggtacctcctcgtccgtcgctccaccatttcatcgaatagataaagataaataccataccattatgaccgaaagacaactagaaattgctcgaacctttaccgacaaagaggtgatggcaaatgccatcgccaagctaaggactttgacgctgaataagcttctaacggttgaagaccccgaagagcgagccaaccttatagagcaacaggccaccctagagtatgaggaaatggcggtcttgggagacgatgaagtctcaaaaaacattcaagacaaagtagtaaagctttattcacccatcctaaaagcatattatgaagagaagtgatgtagaagcactattgactcagcttaaggggttttatattagtgataaagagcctagcggacacccaagagctattatattgggaggacaaccatctgctggaaagagtgcactcgcaaagatagcccaaaatgagcttccaagtatactcaccataaatggcgacaagtatagagagcaccacccactacacaaagaactgataaaggagccccttaagtactcatctgaaacgcagatattctccaatgtatttacagagggattgatagacgaagccataagaaatcggctaaatgtatcggtagaagggactatgaggcgaagcgaagtagtagctgacaccgctcgaaagttcaaaagggctggctttgaggtagaactaatgtgtatctctgcaccaccagaactcactgctgtcaatcttttttcaagatatgccagtgaggtacaacttatggatagtggcagactagccgactttgaaagccacaaccaagcttgtaacggtatacttaagacgttggacgacgcctacgggaataaagacattgacagaatacgcctatatgctctcttcggaatggaattaattgccgactatcagaggaatgaggatggtctctggacgattcaagagaaacctagcgaattaattgaaaggataagggataaacaactgcaaaatagagagttggttttgctgctgattgacaagggactaacagccttatcaatcatccaagatgaaaagataagagagaagctaatcagccagctccaccatctgatacgtcgggcatccaccatacagccccactaatagcaactttcccaggcagggtcggggattacgcattagaaagttcttaccgtatggtttttagccgggtgtctatgagtaaggacctctgccgaggtccttactccattatcctcaacagcttgtatatgatcattcgtacaacatttcttctaatgcgtaacgcctgatcctggtgaagctttccctttgccagggtctactcttatttgtgtgataatgaaaccaatattcctagtaggctttccagcagtggggaagaccaccattggacgcgagctggcgaagctgctacagctctcctttgtggataccgacctctatattgagcggaagtaccactcctctgtgagtgatatgattggctgttgtggcttggagaagtttcgaaagcgggaaaaggtaatcctcattgagctctctcagcttcaggatgtagtgatcgctacaggcggaggcatggccagtcacgacgataatatctctaccatgaagcagcgtggcactgtggtctacctcaaagcatcgccccagctactagccgagtggctctacctctatcgcgagagccggccagcggtggcacgccttgataaagagggggtgaagcagtatgtcgaggcaaccttgcctctccgtgaacccttttacacacagaccgatatcactattgaggtgacggctgaggcgaccactaccgaggtagctgaacagatagtgcaacacctttcattgtgatatggaacaaccctttgagatcaattttaagtggataaagtactggtttgataaattcaatcatcagtacttccaaggctcattgcctcagcccggctttaccattagccctacccgacgacagatgggtggtttttcttacgctgcagagaagagaggtagcactaccatctacacagagcagcggatacagctcaccaacttctacaagctcacggagcgagagtaccaaaatatcctgctccacgagatggtccactactatatccatttccatcagatcaaggatacctccgcccacggcaaggtctttagaagcctgatagatcagctcaataatgagtacggctgggaggtcactatcaccgaaaaagcagctatggagacctatcccacctacgaagcctacgccgttctcctcctcgagaataaagagagaggagagtactacgccactgtggtcagtaggaattaccttggcaggatccagcatcaggtagagaaggagcccagcctcatccaccacggttggtacgtcaccgaggacccctacttcgccacctttcccaaagtccgaaccctccgaggccgcactctcccttacgataagtggaaagccctcaaagaaaggctcgcccccgaccacgtccccctccaatcctaatccccagatacaaaaaaggctccaccgaagtggagccgtaataacttcggcatatagccttgttatgaaaagattactttagggaataatcttctaccgcaaatgtaggtaatatatttgaaccttccaaatatattatctacatttgtttataatgttaaacatctcaaaatgtaatatgctatgatcacactaggtctagatatcggtgtcagtagtctggggacagctatcgtcgacactcagaagaaccaaatactccacacaggagtctatgtattccccgcaggtaaagaggctttcggcaccaataaggagaagccaaaaaacgagacgcgcagggtcgcaaggcaaggtcgcagacaaaactataggcgtcgtttgcgtcgctctcagttgctcaagtttctctatcaactcagtgagctcaatagtccggaaggggatcgctatgtgccacttacttttgaggagatagatgcttggctctcctgggataaggaggggaagacggcggcacgccagtttcccgatagcgaagcttttagagcttggatggcgatgaacccttatgagattcgctcaagagcggtagaggggagcatcacgagggccgagtttggtcgtctattgtaccacatcatccagcgacgtggcttccaatcttcacgcaagatgaaggcagatgagggagcgatggcgaaaggaaaagatgacatcatcggctacacccaaaccaagtcggagataggagagcagacccttgggcaatatctgtatcagataagtgctaaggagggagagccatttacccaacgcgaggagaaacccagagggaggtatactctccgcagtatgtatgtggaggagatggagcgcatttggggtcaacagtctaagcgactcggtctagagggacttgagatagagggcactcccgtcaaagagctcttgatcggacagattagccacgatccagagagtggagagctgctctataagtccaatgatagcgtcctcttttggcaacgtccacttcgttcgcaaaagcatctaatcaataagtgtagccttgagagccgcaagatgtacgacccagtgaagcaacgccactatatccaagggccacgtgtagctgctgtatctcatcctactagcgaatttcatagggctcttcaggtgctgagcaatgtgagggtagagggacgtacgctctatgatatggggttattccaaacctccctcgacttcctctgctccaaaaacagcaagaccatcaaagtggctgacctgaaaaggcacctcagcttagtctccaagctcaattacgacgatgaccaaaccctcccagggtgccctactatcgccagtatcaccgacctttttgaaaagggtgcattgagctaccactatggcgagaccgataccatatatatagatatctggcagaagctactcttttacgacgatgagagactacttgagaagaacatcgccgactatgcccagagcaaggggttaaagctcaaagccgactttgccaagcgactagagggtatcaatctcgttgatgattacggctccatctccattcatgcaatggataatatcattccatttctgctccaagggcgaagccacacagaggcgatattcctgggaggcgttaagaatgcatttggtccgaggtactactactttgagaaggaggagcagatgtggcaagagctactccagattatcaatgagccagcctctaagggcgagaagatcgaccgtctgatacagttcctaagcaatcccgacgagcagaccggtttggacgaaaagcgactacggatgaagctctaccaccctacccagtcggtgcaaaagatagagatacagaacagactaggggaagtagataatctccgcaaccccatcgtggagcaagcactttgggcggtacggaggcaggtcaatgctcttattgatcaaatgattgagcagactggcaaccccaactttaggttcgatcgcatcaccatagagctctctcgtgacctcaagtcgtcaaaggagcggcgatccaaaatacaacaagagcaagaagccaatcgggcagaaaatgaggaggcagtaatgtggctaaaagcattggacttgccatatacaggcgataatatcttgaaataccgactgcataaggagctccgactgaaaggaggtggcgttgcccgctgcccctatactgggaaagatatacgcctggctcaactgtacgatggcaacaacctcttccaaatagagcatattatccctagaagtatctccctagataatagttttggaaataagaccctctgcgagtccaacttcaatagagagaaaggtaatatgaccccttacgagttttactccgtcaactctagcaaaaccctctggggtgctgaggattgggacgagatcatacaccgcgtaaggcaagtgctaccagcacgtaaggcgagtcgctttctatccaagcggagtgcccaagagcagcgggaggagctaccgagtaagatgctcaatgataccgcttatatgtcggtaaaagctcgtgaatacctcacctctatctgtagtgatgtacgtactgtatcggggagtatcactgctaaccttagaagattatggggtctcaataagatcctaggcgagacatacgagtgtctgccagggactgtaagcaaggagttagcagctggggaagaaaaggaggtctatgcaattctggatactaaatcaaatgtgattacaagagtagttcccaagttcaatccaattccctatcgaacagcagatgagatccgtatccccgtagtggtcaaggggactaagctattctgcgatggcaaagagtaccccaagccagcgcatcttgatctcaatggagtatcaggtgaggccctccttgcctatcatgcagtaggtggtatcccacactgtcagcccctctttaaccccaagccctctaataaaggtgtactagtagttacagctactcgtagtggtaagagcaacttaattagcaacgatattgacgtacttgataagattaagaagagtcgttatcctaccgagccaggaaagtactgggtcactcttcagcttaaaggcgaacccatttgggagtttcctagcaataaaaagagagtggcagccaatgcggtaagagtaccaggtcgattaaaaggcaacactttcgtgagttctttctttgagaccgaagaggagaacagtgttgtcaatatggaggaacaccgcaatcgcacggcctacctcaatctagactacgacaccgcagagtttacgaagatgcttcgccctgaaccagcggtaggagagggagagctactactcacaggagtcgtcaatcacggttcgctccttctggatcagtgcgacggcaagacaattgatgtacagcatttgaacctaaaagaacagactaggcattatgtactattacagtatggtaaaaacctttcatccaaagagcaagtaacaatttatcctatttacaataaagctccaaaatcaagaaaagatgaggtattacttgagggaaagttcttcgcacttgacaaggataagagcctctacgctttggagccggttaagaatagagatgaccataggcaccacgctgtagacgccctggtgattgcactagccaaacaaaactacgtcacggagctttcaacttacaacaggcaagatgactcctaccgacaaggagggaggctaaagccacgcttcgacctaccgtgggatggctttagagaagaggcagagcaatccatcaatgatatcttggtggtacataaaaagaaccgagtggatcccctctccaaggtgacccgtaagatcaccaagaatggcaaggtctatacctctgaaggttacgccgtaagaggtgccttgcacatggataccatctatggtcagaggaaagcaccaggacaggcagaggtgggctaccactctaggaagagcatcaccgaagtgaccaatatgagccaactgaataaagtggtggatgccgctattaggaaagagatgctgcggatactcaaggaggagttggggcttgatacaagcaattcatccttaactttcccaaagaatgcctttatcgatgaggatggtaagaccaaagtctatctccccaatcgcaatggtggagagcctgtgccggtcaagaaggtgaggctaagggagaattttagttcgcctcgatgtctaaaaaaccaaaaccaatttgtgaagacagagaataatcaccacatgcttgtttacaagacaaagaaaggtaagtttaatgagtctattgtaacgttttgggatgtcgttgaaaggttgaacagaggtgaagcaatattccaattgccagaggatggggaaaagattatatttaagcttatggctaatgattattttatcataggtctaaagaagcaggagataattagcaacctatccaatccttcactgttaagtaagtatttgtttcgggttacctctttgtcatcaagagactatcgctttagactcgtcgcagctagtacagataaaaacaagcatgaaaatagaagaattagaactcctaatttctttgatcccactaaagagaatatccatgctgttgaagttgatctcaatggtaacattagattaaaagaggatgattaaacgaaccatcactatatctagtcctgttcacctctccttagaaaaccgccaattggtgataaccaataaggagacggaggagcgacagaccctacctctagctgaggtaggactattgatactggagcatccgagggtgaccaccaccctccggatgctccagtactgtatggaggtgggctgtatagtggtagtttgtgatgagtttcatatcccaagtggctacctctctccactcgaggggcactccacacagggtgagcgaactcgggagcaggtggcagcatctatcccgactaaaaagagcatctggaagcagttggtcaagagcaagatcctcaaccaagcggccgtactaaagtcacgagggatagaggagcaccaaaggttactcaacctttccgatgaggtgcggagtggcgacccagataatagagagggaatcgcagcacgtatctactggagtgccctcctaggggaggagtttatacgagagcgagatggagtaccgcccaacgccctattcaattatgcctatgccatcttgcgtgcttcggttacccgatccatcatcgcttcaggtctctccccaaagctgggggtacaacaccaaaataagtacaacccctttccgctctccgatgatgtgatggagccctaccgcccctttgccgacctagcggtgatggagttggtggatagtggagaactctcaattaccaaggagagtagagctcatctccgcactctattggcacaagatacactcatcagtaagctcaggcggccactactcatcgctatctctatcaccaccagttccctcgctcgggtctactcaggtggtgccaagacactcgtattacctcgaatcccataaccaaggagtctcacaatgactgtttcaagaataagtgcgtacaaacttatgtggattttagtcgcttttgatatccctgttctcactaagaagcaacgaaagcaggcggcaaagtttcgaaaggagttactgggagagggatatattatgctacagttttcggtctacatcaagccgatcccatcgaagcaacaccgccagccactcatcaataaattgcggaaatcacttccggaagaggcggatattaaggtgattaccattaccgacaaacagtatgctgagatcatacacctctcgggaacgaagcaaaaggaaccgaagataccgaaaatacgacagctatcactctttgaggaattttaggtagctttgaactgaaaaaatagacccctattggctcttttcatcaaacatcggcattttattagacgtcctacgacctctaaccaattgatatttacaactatatatagccgatggttgtggattgattactttagggaactagatacaacattgccccagttatgcataagcttgacttagttgtggattgattactttagggaactagatacaacggggagcaagacctttgaacttaatcctagttgtggattgattactttagggaactagatacaacacatcgttagtctcttcaccgcttggctagttgtggattgattactttagggaactagatacaactcgtactcgtatgtagcggaggagctaaagttgtggattgattactttagggaactagatacaacacgagccatatgataagtcagtggtctatcgttgtggattgattactttagggaactagatacaacccactgaatcatcagacttttggtcaggctgttgtggattgattactttagggaactagatacaactcgttatcggatatgattatgcagtccgtgttgtggattgattactttagggaactagatacaacggagctgaaaggcaagtggatgctcacgatgttgtggattgattactttagggaactagatacaacttaccctcctttcccttcaatgcttggatggttgtggattgattactttagggaactagatacaactctgcctccccgaggtggttggtggcgaaagttgtggattgattactttagggaactagatacaactgtacgtacgcctcggccgttggtgaatagttgtggattgattactttagggaactagatacaacccacaatgcgtgtagccacgctggagttaagttgtggattgattactttagggaactagatacaacagaagatgttgattctcaatctgcttgggagttgtggattgattactttagggaactagatacaacttcttttttatttgccaaagatagcaaggggttgtggattgattactttagggaactagatacaacagcaagggcaaggggcggttgtggctcttggttgtggattgattactttagggaactagatacaactctgccgtagctgtaagtctatatatactgttgtggattgattactttagggaactagatacaacgattttgaaaataataacccaagctacactgttgtggattgattactttagggaactagatacaaccaatcagtgggtgggcagtagcgaggtttggttgtggattgattactttagggaactagatacaacagcctcttgatctctgcctcatactcctgcgttgtggattgattactttagggaactagatacaacttatagcccactataaccctaaagggttgtgttgtggattgattactttagggaactagatacaacgcgttagctgataacatactgccaggaccgttgtggattgattactttagggaactagatacaacaaatcggaagatttaccgttggtcgataaagttgtggattgattactttagggaactagatacaaccagtgtcctctcctgaaatagtagacacacaaaccatgcgaaaatatggcagaaaagaatcgcaagagtaaaaagagagaagcatatgatgatgcttttaaggtcaaggtaatacgtgaatacctagacacaggagagaacattagtagccttgctacaagatttaacatttcagtttcggcattgtactcttggttgagtaacttt

SEQ ID NO: 403 - DNA, 13586 bp, synthetic construct
  misc_feature 1..13586: note = Synthetic
  source 1..13586: mol_type = other DNA
gcttggtaagaatcgggaatagtcttgcacgggattgatacgtggggagaaatcggacataagtgctattacaagcaagaagatgtggaagctctcctcgctaactctaacactcgtaaaggctaacaactatggagtacgaaactatcaataaagaaacaccagagatgaaacaactcatctctagtctagcattaaaggtttgacgaatcgagtgagaagcatggctcaaactcatcgtcctctttttgaaggtgaaatctatctcacaggacgggaggtttgcgagagactgttcctttcccctcgtaccctgcaagactatcgggataaaaacattatcccttacacccaaatcacagggaaaatcctctatcggctctcagacataaacagaatactgagtgagaactatgtcaacagaaaccttcatcggtaatgatgtaggtcttcctttgtttttatccattgttttggtcagagtatcgcaaaaaagctctatctttgccattgagtatctgtgtatgctcttgcctcttgataaaagaggcaggatattttcttatatgctcaagagcagagaaacttaaagcaacaaaggacaaaggaagcgaagtacatagtttcacgtttattaaacaggcaatgaagcaaaagtaaccaattaaataattgggcattctattataatatgaatcgatatattctctttttcttctcgctgttgctgagcctttcggtatcggctcaaaaggtgattctaagcgatgaactcttacccctatcgggcgaaaacaatacgacagtttattttgaaaaggacagccgaaaacccttgcagggagagtggcgtatcaagcgggggcttgacgaagagactatttccttttctaacggactgatggatggcaagtaccaccgctatcgggatggtgtactgagagaaacgggagcgtatgaccaggggaaaagaaatggggtgttcacggagtactaccaagacggcaaaactgtcagcaagattacccctatgaagaagggcaaaatcgaaggctgtgtaaaaacctatttcaaagacggtcgtttggatttggagaaagaataccaggaaagtgtggaaaacggctttgagaagcggtatgacagccaaaacggtgctcaaatacttgagacccgttgggtgaatggaaagaaagacggggtcgagtggaaactcacgaaacagggagatggcgttgaaagcaaagtcacacgaacttatcgcatgggcgtgctacatggggcgtacaaagaagaagttttgcgcaacggaaatccgattttggttgtagagggacagtatgccgatggagaacgttcgggggtatggaaagagtacgacgccactatgaagacgacaagagtactaagaaataatcattgagacaagcgaatttgtatgactgcatcaataattgccgggagtgtcctgatcgcaatagctgtgcttatactgatttggggtataatcacctctaataatctcattgccaagaaaaacagggtggaacaatgccggagtggaatttgtgtggcactcaagcagagaaatgaccttatacccaatttggtggcatctcttaaagcgtatatgggacacgaaaatgaaatccttacccgcatagccgaactaaggtctcgagcagacggagccccagaagcagaacaaatcaaggacgggacagaaatctccgctcttctcaaacaagttaaggccgttgttgagagtaatccggatctcaaagccaatgagcagtttgtctatctccaatatcagataacggatatggagaacgaattgcaggctatacgccgaacttataacgcaaccgtaacggattacaacaatgccgtagaaatgttcccgtcttcatacatcgcttcaagaaaacatcttgggaaagaagcattgatacgaattcctgaaagtgagttgggcgacattcatatcaaggagattttcggataatttatgaaagaagaccacttgattgacttcaagattgtcgctcaacaaatgagagggcaactaacccacatagctatgtggcgtaagattgttaggcttctcatttattccgtttaccctttggctctgctttggcttgcattcactatattcggaaggaatatcgtcgatgcgggcaattatgaaacctcacaaataacggcaacgtatgtcgtcatattctttgtcgcctttgtggtcctcaatacgctgttctctttatgcctaaatgtactgaagcagaaagaggaaaaagtaatggggcaaattatcaaccagctatttccggatgcaaattattctccgacaaaagaagtaaaggtgtccgatattcgggcaagcagactattcggaaccccaaataggtcggagggtactctgcaagtggcaagttacggtgcattgagtttcccaactcagcatcaagcattgacaatagccgatataggagtaaccgcaacaaatgaacagaatactaaactatggagatcctttaggctcctctatcgggcgattttcagtccgatgtggggcgcacaagtagagagcacgatgttcagctttaggggaatgtttggtcactgccgtcttccaagaacttgcaggggatttgttatgctgcttcccgaccatttggaggataagttgggctacttcgctctgacgatacaaaaactgagggagagacataaagcaaagtttgtttatttggaagatcccgagtttgaacgtctctttaccgtatatgccgatgacgaggtagaagcccgtatgattttgaccccggcaatgatgaagaaacttaccgctcttcgttgttcctttactcatgacttgatgctctcctttagcggagatacattttattatgcctccaatatgccaaaaggatttcttcgccttagcgggaaaacatctttaaacgaagacctattgcttgaaatctaccaagagatcgggttctgtctttctgtagaagaaatgatggggaagcatgtggataagtaggaaatatgatataatagacttatgtttaacttcaaaataatacttgtatgatctggaaaatcatcgtggcaatagtcgctgtcttgattattgcttttatcgtgttggtaatcgtgtctcggatctttgctaagaaaaacctgaaagcctttttggcttctcatcctcaaacaccgctcaccgaggaaaagaaaaggttactggtatttggagccatcttgtcttgttatcgcagtgaggacatccttagtattatcaccgataataatatgaatgtatacaagaccgggcttcaaaaacaatggggcattaatggtcgggaagatgctctagagacgctaaccgctctgcttaatttagagcagagtacggaattggacgaagtccttgctcaaggaggttcttccgaggaacttattgagctgcagactttgatagcagacgggctaaaaacggatttggctcaagtccggaccacaacctccacgtatgcttgggacgtatgccgactggtgagcttggcaaaatggtgttattggttgcaatacatcagtgaagcggaaatgtggaagtacctcaatgaaggagcggtgaaagcatcgtcattaggcaaagactggaacgactatacggtctcgttcttaatgggccgagccattcacggatttggtacagaggatatcatagacgattgtaaggctctatatcatagagagtctgacacggatgtgtattccaaatacagctttaaataacttttcaaagctgaccgagacctctgtgcaaaggtctcatagataggtgtaaaacacccttgcaaccccggccgaggggtcggacaaccctatctaggtctgacccctcagccggggtcaaggaggtggtgaatatgctcttacacacaggtcgtttggggctaacgcccctccgacctgtgcctatctatttaaaagggatctctgccgaggttcttactccattatcctcaacagcttgtatatgatcattcgtacaacatttcttctaatgcgtaacgcctgatcctggtgaagctctcactttgccagggtctattattattatgtgacaatgaaaccaatattcctagtaggctttccagcagtggggaagaccaccattggacgtgagctggcaaagctgctacagctctcctttgtagataccgacctctatattgagcggaagtaccactcctctgtgagtgatatgattggttgctgtggcttagagaagtttcggaagcgggaaaaggtaatcctcattgagctctctcagcttcaggatgtagtgatcgctacaggcggaggcatggccagtcacgacgataatatctctaccatgaagcagcgtggcactgtggtctacctcaaagcatcgccccagctactagccgagtggctctacctctatcgcgagagccggccagcggtggcacgcctcgataaagagggggtgaagcagtatgtcgaggcaaccttgcctctccgtgaacccttttacactcaggccgatatcactattgaggtgacggctgaggcgaccactgccgaggtagctgaacagatcgtgcaacacctttcattgtgatatggaacaaccctttgagatcaactttgagtggataaagtactggtttgataaattcaatcatcagtacttccaaggctctttgcctcggcccggctttaccattagccctacacgacgacagatgggtggcttttcttacgctgcggaaaaaagaggtagcactaccgtctacacagagcaacggatacagctcaccaacctctacaagctcacggagcgacagtaccaaaatatcctgctccacgagatgatccactattatatccatgtacatcagatcaaggatacctccgcccacggcaaggtgttcagaagcctagtagatcagctcaataatgagtacggttgggaggtcactatcaccgaaaaagcacctatggagacttatcccacctacgaagcctacgccgttctcctcctcgagaataaagagagaggagagtactacgccactgtggtcagtaggaattaccttggcaggatccagcatcaggtagagaaggagcccagcctcatccaccacggctggtacgtcaccgaagatccctacttcgccacctttcccaaagtccgaaccctccgcggtcgcaccctcccctacgataagtggaaagccctcaaagacaaactagcccccgaccacgtccccctccaatcctaatccaccccattccccatatgcaaaaaaaggctccaccgaagtggagccgtaataacttcggcatatagccttgttatgaaaagattactttagggaataatcttctaccgcaaatgtaggtaatatatttgaaacatccaaatatattatctacatttgtttattatgtttaacattacaatatagatactatgataactttaggtctggatatcggtgtcagtagtctaggtacagctatcgtcgacacacagaagaaccaaatactccacacaggagtctatgtattccccgctggtaaagaagcatttggcaccaaagatgagaagtctagaaacgagactcgtcgtctagctcggcagagtcgcagacagcactttcgacgtcgtttgcgtcgctcacagttgctcaagtttctttatcagctcagtgagctcaatagccccgagggggatcgctatgtgccacttacttttgaggagatagatgcttggctctcctgggataaggagggaaagacggctgcacgtaagtttcccgatagtgaagctttcagagcttggatggccatgaacccttatgagattcgctcaagagcggttgaggggagtatcacaagggctgagtttggtcgtctgttgtaccatatcattcagcgacgtggcttccactcttctcgcaagattaagtttggcggtagtaatagtatggcagaggggaaagaccccatcatcggctacacccaaaccaagtcggagataggagatcagacccttgggcaatatctttatcagattagtgccaaggagggagagccatttacccaacgtgaggagaagcccagaggcaggtatactctccgcagtatgtatgtggaggagatggagcgtatttgggatcaacaggctaagcgacttggtctagaagaactagagatagagggtactcccatcaaagagctcttgatcggacagataagccacgatccagagagtggagagctgctctacaagtccaatgatagcgtcctcttttggcaacgcccacttcgctcgcaaaagcacctaatcaataaatgtagcctcgagagccgcaagatgtacgacccagtgaagcaacgtcactatatccaagggccacgtgtcgcagcagtatctcaccctacgagcgaatttcatagggcacttcaggtgctgagcaatgtgagggtagaggggcggacactctataatatggggttattccaaacctcccttgacttcctctgctcaaaaaacagcaacaccatcaaagtggctgacctgaaaaggcacctcatagtctccaagctcaattatgacgatgaccaagacctcccagggtgccctaccatcgccagtatcaccgacctttttgaaaagggtgcattgagctaccactatggcgagactgataccatatacatagatatctggcagaagctactcttttataacgatgagagactccttgagaagagcatcgccaagtatgccaagggcaagaggttaaagctcaaagccgactttgccaagcgactggagggcatcaatctcgttgatgattacggctccatctccattcatgcaatggacaatatcattccattcctactccaagggcgaagccacacagaggcgatattcctcggtggggtaaagaatgcgtttggctcaaggtactgcgacttcgagaaaaaggagcagatgtggcaagagctactccagatcattaatgagccagcctctaagggtgagaagatcgaccgtctgatagaatttctaagcgatcccgacgagcagaccggtttggacgaaaagcgactgcggatgaaactctaccaccctacccaatcggttcaaaaaatagagatacagaatcgactaggtaaggtggataatctccgcaacccaattgtggagcaagccctctgggcggtacgaagacaggtcaatgcccttattgatcagatgatcaaacagactggcaaccccaactttaggttcgatcgcatcaccatagaactctcccgtgacctcaagtcgtcaaagaagaggcgagacaaaatacaacaagagcaaaaggcgaatctggcggaaaatgaggaggcagtaatgtggctaagagcattgaaattgccagttactagcgataatatcttgaaatacagacttcataaggaactccgattgaaaggagatggcattgctcgttgtccctatactgggaaagatataggcctgtctcaactctacgatggcaataacctctttcaaatagagcatattattcctcgaagcatctcccttgatgatagcttcggtaataagaccctctgcgagtccaatttcaatagagagaaaggtaatatgaccccttacgagttttactccgtcaactctagcaaaaccctctggggtgctgaggattgggacgagattacacaccgcgtaaggcaagtgctaccagcacgtaaggcgagtcgctttctatccaagcggagtgcccaagagcagctagaggggctacctagtaagatgctcaatgataccgcttatatgtcggtaaaggcgcgtgaatacctcacctctatctgtggtgatgtccgtactgtatcaggtagtattactgctaaccttagaagattatggcgactcaataagatcctaggtgaaacttatgaatgtgtgcaaggagctgtaagccaggagctagcagctagagaagaaaaggaggtctatgcaatactggatactaaatcaaaagtgattacaagagtagttcccaagttcaatcgaattcccgatcgaacagaagatgagatccgtatccctgtggtggtcaaggggactaagctataccgtgatggcaaggagtaccccaaaccggcccatcttgatctcaatggagtgacgggcaaggccctcctcacttaccacgcagtaggcggtaccccacattgccagcccctctttaaccccaggccctctaataagggggtactagtagttacagctactcgtagtggtaagaagaacttaattagcaacgatattgacgtacttgataagattaagaagagtcgttaccctaccgatccaggaaagtactgggtcactcttcagcttaaagaagatcctatatgggagttgcctagcaataaaaagagagttgtagcaaatgctgtgagagtcccaggcaggttaaaaggaaacactttcgtgagtcctttctttaagaccgaagtggaggatagtgtggtcaatatggaggaacaccgcaatcgtaccgcctatctcaatctagactacgacaccgcagagtttaccaagatgcttcgccctgcacccgaggtgggagagggtgagttgctacttacaggagtcgtcaaccacggttcgctccttctggatcagtgcgacggcaagacaattgatgtgcagcatctgaacctaaaagaacagactaggtattatgtgctattacagtatggtaaaaacctttcatccaaagaacgagtaacgatctatcctatttacaataaagctccaaaatcaagaaaagatgaggtattacttgagggaaagctcttcgcacttgacaagaataagagcctctacgctttggagccggttaagaatagagatgatcataggcatcacgcagtagatgccttggtgattgcattggccaaacaaaactacgtcacagagctttcaacttacaatcggcaaaacgattcccgccgacagggggaggctctaaagccccgcttcgacctgccgtgggatggcttcagagaagaggcagagcaatccatcaatgatatattggtggtacataaaaagaagcgagtggtccctctctccaaggtgacccgcaagatcaccaagaatggcaaggtctatacctttaaaggtaatgccgtaaggggtgcgctacacaaggctactatctatggtagaagaaaagccccagggcagactgactatggctaccacttaaggaagggcattgccgaagtgactaacatgaagcaactgaataaagtggtggatgcggctattaggaaagagatgctacggatactcaaggaggagttgggacttgatacaagcaatccatccttaactttcccaaagaaagcgttcattgatgagaatggtaagaccaaagtctatctccccaatcgcaatggtggagagcctgtgcctgtcaagaaggtgaggatgtgcgacaatttaagtaatgcagtgagactaaaagagatcaatcaatatgtggatcttaagaataatcaccatgtactgatttatgaggctctagatggcaggcttcaagagagcgtagtaactatgtgggatgtggttgatagactgaatagaggagaggagatatttcagcttccacccgatggtaaacgaatcctctttaagttgataattgatcagatgtatctaattggtgtcaagagggatgacgtgattcacaatctttccaatactgactatcttataaggtacctttatagagtgcaaaacttgtcttcagtcgattatgtgtttagaaaagcaactgctagtactattaattatgatagagagatgattagagtacagtcactaactttctttgagccagataaggataatatccactcggtagagatcaccctcacggggcaagtaatattgaaggatgattaaacgaaccatcaccatatctagtcctcttcacctctctttagagaatcggcaattggtgatgaccaataaggagacggaggagcgacagacccttcctctagcagaggtaggactattgatactggagcatccgagggtgaccaccaccctccggatgctccagtactgtatggaggtgggctgtatactggtagtttgtgatgagtttcatatcccgagtggctacctctctccactcgaggggcactccacacagggtgagcgaactcgggagcaggtggtagcatctatcccgactaaaaagagcatctggaagcagttggtcaagagcaagatcctcaatcaagcagcagtgctgaagtcacgaggaatagaggagcaccaaaggctactcaaccttgctgatgaggtgcggagtggtgacccagataatagagaggggatcgccgcacgtatctactggagtgccctactgggagaggagtttatacgagagcgagatggagtaccgcccaacgccctattcaattatgcctatgccatcttgcgtgcttcggtcacccgctccatcatcgcttcaggtctctccccaaagctgggggtacaacaccaaaataagtacaacccttttccgctctccgatgatgtgatggagccctaccgcccctttgccgacctagcggtgatggagttggtggatagtggagaactctcaattaccaaggagagtagagctcatctccgcactctattggcacaagatacactcatcagtaagctcaggcggccactactcatcgctatctctatcaccaccagttccctcgctcgggtctactcaggtggtgccaagacactcgtattacctcgaatcccataaccaaggagtctcacaatgaatgtttcaagaataagtgcgtacaaacttatgtggattttagtcgcttttgatatccctgttctcactaagaagcaacgaaagcaggcggcaaagtttcggaaggagttactgggagagggatatattatgctacagttttcggtctacatcaagccgatcccatcgatgcaacaccgccaaccactcatcaataaattgcggaaatcacttccggaagaggcggatattaaggtgattaccattaccgacaaacagtatgcagagatcatacacctctcgggaacgaagcaaaaggaaccgaagataccgaaaatacgacagctatcactctttgaggaattttaggtagctttgaactgaaaaaatagacccctattggctcttttcatcaaacatcggcattttattagacgtcctacggcctctaacccattgatatttacaactatatatagccgacgttgtggattgattactttagggaactagatacaacgggtttacccaacacaaagacctttttgagttgtggattgattactttagggaactagatacaactcagcatcgtccagatggtaaaagcggtaagttgtggattgattactttagggaactagatacaacctttgtaggtagcacataaactccgtgacgttgtggattgattactttagggaactagatacaactcagcgaatagagagaggtcgttggctggagttgtggattgattactttagggaactagatacaacaagatgagactataaaacttgccttttttgttgtggattgattactttagggaactagatacaacaaaaggcgacactaagatagctggcggactgttgtggattgattactttagggaactagatacaacaaagccatggacatcggcactctcactcgagttgtggattgattactttagggaactagatacaacgatgcctaggttagatgaccgcaaccttatgttgtggattgattactttagggaactagatacaacctcactagaccaagcgaccgaacaggtgaaagttgtggattgattactttagggaactagatacaacctctacacttgataaatcatcttccaaatgttgtggattgattactttagggaactagatacaacctcgcacaagccgtgctgaacccgctccttgttgtggattgattactttagggaactagatacaaccaacattcgtgaagattgccacaaaggtcagttgtggattgattactttagggaactagatacaacactgctccaccaattcttgaagacgatatgttgtggattgattactttagggaactagatacaacgtaccggcattagcagacaccatactgccagttgtggattgattactttagggaactagatacaactaagctgtagatcaaggcgaaaaggctatgttgtggattgattactttagggaactagatacaaccgctttccatttgtttggcgagtacgacaagttgtggattgattactttagggaactagatacaacattctttgtttctctgcgatcgctttatcagttgtggattgattactttagggaactagatacaactatcatcattaaatttaatatcagttgtagttgtggattgattactttagggaactagatacaaccgtacttgcacggagccgagagggtgttgggttgtggattgattactttagggatctagatacaacaaaaagactatggagaaattcaaatttacagttgtggattgattactttagggaactagatacaacttgcgtcgctcgttgtgaacaatgtgccatgttgtggattgattactttagggaactagatacaactgctcgttgataggaagacgagtccgcaccgttgtggattgattactttagggaactagatacaaccgaaaaggaagccaccaaggggaagctgcgttgtggattgattactttagggaactagatacaaccgtcaatcactttcacagaaacggcaaactgttgtggattgattactttagggaactagatacaaccccactgattgaaggtcttggtgcgtatgcgttgtggattgattactttagggaacgaaatacaattcgatgaagcagctcattgaagcggtagagttgtgacattgatcgtttttagggcgggggtggtgtctactttttcaggaatgggggaggattggtgtgtactaaaataggaatgcttgcctactcgcgtgatttagtgagaccgtatcaaagcattattccgtatgcgtgcggaatccattccgcagggctacggaatctattccgcacgcatgcggaatatgaggttgatacaagaaaagattgtggaaggtattcctgaaaaagtagacacattatgtaacctagataggggttgtccgacccctcggccggggtcgcaaggatattttgcgtctcattgtacaggtcgagtcactgcgtgcctcgacctgtgcctatttagcacggacctctgccgaggtccttaaaaaagcacccgcgagggtgccattcagctagcccccgcgtcggaggggcgttagccccgaacgaccggcgggaaaaagtatacag

SEQ ID NO: 404 - DNA, 8262 bp, synthetic construct
  source 1..8262: mol_type = other DNA
  misc_feature 1..8262: note = Synthetic
aatgtggaagtacctcaatgaaggagcggtgaaagcatcgtcattaggcaaagactggaacgactatacggtctcgttcttaatgggccgagccattcacggatttggtatagaggatatcatagacgattgtaaggctttatatcatagagagtctgacacggatgtgtattccaaatacagctttaaataacttttcaaagctgaccgagacctttgtgcaaaggtctcatagataggtgtaaaacacccttgcgaccccggccgaggggtcggacaaccctatctaggtctgacccctcagccggggtcaaggaggtggtgaatatgctcttacacacaggtcgttcggggctaacgcccctccgacctgtgcctatctatttaagagggatctctgccgaggttcttactccattatcctcaacagcttgtatatgatcattcgtacaacatttcttctaatgcgtaacgcctgatcctggtgaagctttccctttgccagggtctactcttatttgtgtgataatgaaaccaatattcctagtaggctttccagcagtggggaagaccaccattgggcgcgagctggcaaagctgctacagctctcctttgtggataccgacctctatattgagcgaaagtaccactcctctgtgagtgctatgattggctgctgtggcttggagaagtttaggaagcgggaaaaggtgatcctcattgagctctctcagcttcaggatgtagtgatcgctacaggtggaggaatggccagccacgacgataatatcgctaccatgaagcagcgtggcactgtggtctacctcaaagcatcgccccagctactagccgagtggctctacctctatcgcgagagccggccagcggtggcacacctagataaagagggggtgaagcagtatgtcgaggcaaccttgcccctacgcgaacccttttacactcaggccgatatcaccattgaggtgacggctgaggcgaccactaccgaggtggcagaacagatcgtgcaacacctttcattgtgatatggaacaaccctttgagatcaattttaagtggatacagtattggttcgataaattcaatcaacaatacttccaaggctcgcttcctcagcccagctttaccattagccctacccgacggcagatgggtggcttttcttacgctgcggaaaagagaggtagcactaccgtctacacagagcagcggatacagctcaccaacctctacaagctcacggagcgagagtaccaaaatatcctgctccacgagatggtccactactatatccatttccatcagatcaaggatacctccgcccacggcaaggtctttagaagcctgatagatcaactcaataatgagtacggttgggaggtcactatcaccgaaaaagcagctatggagacctatcccacctacgaagcatacgccgttctcctcctcgagaataaagagagagaagagtactacgccacagtggttagtaagaattaccttggcaggatccagcatcaggtagagaaggcgcccagcctcatccaccacggttggtacgtcaccgaggatccctacttcgccacctttcccaaagtccgaaccctccgcggccgcaccctcccttacgataagtggaaagccctcaaagaaaggctcgcccccgaccacgtccccctccaatcctaatccctagacacaaaaaaggctccaccgaagtggagccgtaataacttcggcatatagccttgttatgaaaagattactttagggaataatcttctaccgcaaatgtaggtaatatatttgaaccttccaaatatattatctacatttgtttataatgttaaacatctcaaaatgtaatatgctatgatcacactaggtctagatatcggtgtcagtagcttaggtacagctatcgtcgacactcagaagaaccaaatacttcacacaggagtctatgtattccccgccggcaaagaggcattcggcaccaataaggagaagccaaaaaacgagacgcgcagggtcgcaaggcaaggtcgcagacaaaactataggcgtcgtttgcgtcgctctcagttgctcaagtttctctatcaactcagtgagctcaatagtccggaaggggatcgctatgtgccacttacttttgaggagatagatgcttggctctcctgggataaggaggggaagacggcggcacgccagtttcccgatagcgaagcttttagagcttggatggcgatgaacccttatgagattcgctcaagagcggtagaggggagcatcacgagggccgagtttggtcgtctattgtaccacatcatccagcgacgtggcttccaatcttcacgcaagatgaaggcagatgagggagcgatggcgaaaggaaaagatgacatcatcggctacacccaaaccaagtcggagataggagagcagacccttgggcaatatctgtatcagataagtgctaaggagggagagccatttacccaacgcgaggagaaacccagagggaggtatactctccgcagtatgtatgtggaggagatggagcgcatttggggtcaacagtctaagcgactcggtctagagggacttgagatagagggcactcccgtcaaagagctcttgatcggacagattagccacgatccagagagtggagagctgctctataagtccaatgatagcgtcctcttttggcaacgtccacttcgttcgcaaaagcatctaatcaataagtgtagccttgagagccgcaagatgtacgacccagtgaagcaacgccactatatccaagggccacgtgtagctgctgtatctcatcctactagcgaatttcatagggctcttcaggtgctgagcaatgtgagggtagagggacgtacgctctatgatatggggttattccaaacctccctcgacttcctctgctccaaaaacagcaagaccatcaaagtggctgacctgaaaaggcacctcagcttagtctccaagctcaattacgacgatgaccaaaccctcccagggtgccctactatcgccagtatcaccgacctttttgaaaagggtgcattgagctaccactatggcgagaccgataccatatatatagatatctggcagaagctactcttttacgacgatgagagactgcttgagaagaacatcgccgactatgcccaggacaaggggttaaagctcaaagccgactttgccaagcgactagagggcatcaatctcgttgatgattacggctccatctccattcatgcaatggacaatatcattccattcctactccaagggcgaagccacacagaggcaattttcctcggtggcgttaaaaatgcgtttggtccgaggtactactactttgagaaagaggagcagatgtggcaagagctactccagattattaatgagccagcctctaagggcgagaagatcgaccgtctgatagagttcctaagcaatcccgacgagcagaccggtttggacgaaaagcgactacggatgaagctctaccaccctacccagtcggtgcaaaagatagagatacagaacagactaggggaagtagataatctccgcaaccccatcgtggagcaagcactttgggcggtacggaggcaggtcaatgctcttattgatcaaatgattgagcagactggcaaccccaactttaggttcgatcgcatcaccatagagctctctcgtgacctcaagtcgtcccttgaccgacgcctcaagatacgccaggagcaagaggccaatcgggcagaaaatgaggaggcagtgatgtggctaagagcactcaacgtgcaggtcaatcgagataatatccttaaataccgcctccataaagagctccagcagcaagatggaattgcccgctgcccttatactggtaagactattaatccagctcatctcttcgctggcaataactacttccagatagagcacattatccctcgaagcatctcccttgatgatagcttcggtaataagactctctgcgaatccaatttcaatagagagaagggcaataagaccccttacgagttttactccgtcaactctagcaaaaccctttggggtgcagaggattgggacgagattacacatcgagtaaggagagtactgccagcacgtaaagcgagtcgcttcctatccaagcggagtgcccaagagcaactagaggagctacccaataagatgctcaatgataccgcctatatgtcagtaaaggcacgtgaatacctcactaccatctgcggtgatgttcgctccgttaccggccatatcactgccgacctcaggcggatgtggcaactcaataagatcctaggcgagacctatgaatgcgccccaggagccgtgagcgaggagctgatagccagaggcgataccgatgtctacgccctcctcgatagcgagtcacaggtggtcaatcgcgtggcaccaaagctcaatcttatccccaatcccacggcagatgagatccgtatccctgtggtggtcaaggggtctaagctataccgcgacggcaaggagtaccccaagccagcccatctagatctcagtggagtgacgggcgaggcactcatcgcctaccaccgagtaggcggtaccccacactgccagcccctcttcaaccccaagccctctgctaaggataggctagtggtgccagctaccattaatagcaagaaccaattgaccagcgactatattgaggcactccgaaaggtcaagagaggtaattaccctactgagccaggaaagtactgggtcactcttcagcttaaaggcgaacccatttgggagcttcctagcaataaaaagagagtggcagccaatgcggtaagggtatcgggccgactcaatggcaacgctttctggagccctctctttgagaccgaagtggatagtagtgtggtcaatatggaggaacaccgcaatcgcaccgcctatctcaatctagactacgacaccgcagagtttaccaagatgcttcgccctgcacctgaggtgggagagggagagctactactcacaggagtcgccaaccacggttcgctccttctggatcagtgcgacggcaagacaatcgatgtacagcatttgaatctccaagagcagaccaagtattatgtatccttacggtacggagagaccatttctccagaagagcgggtcaccatctatccattgtatgccaaagctccaacaccaaggagtggcgaagtactgctagagggaaagctcttcctacttgataaatctcaagacctctacgctttagaaccggtcaagaatagagatgaccataggcaccacgctgtagacgccttggtgattgcactggccaaacaaaactacgtcacggagctttcaacttacaacaggcaagatgactcctaccgacaaggagagaggctaaagccacgctttgatctaccgtgggatggctttagagaagaggcagagcaatccatcaatgatatcttggtggtacataaaaagaaccgagtggatcccctctccaaggtgacccgtaagatcaccaagaatggcaaggtctatacctctgaaggttacgccgtaagaggtgccttgcacatggataccatctatggtcagagaaaagcaccagggcagacagaggtggggtatcactctaggaagagcatcaccgaagtgaccaatatgagccaactgaataaagtggtggatgccgctattaggaaagagatgctgcggatactcaaggaggagttggggcttgatacaagcaattcatccttaactttcccaaagaatgcctttatcgatgaggatggtaagaccaaagtctatctccccaatcgcaatggtggagagcctgtgccggtcaagaaggtgaggctaagggagaattttagttcgcctcgatgtctaaaaaaacaaaaccaatttgtgaagacagagaataatcaccacatgcttgtttacaagacaaagaaaggtaagtttaatgagtctattgtaacgttttgggatgtcgttgaaaggttgaacagaggtgaagcaatattccaattgccagaggatggggaaaagattatatttaagcttatggctaatgattattttatcataggtctaaagaagcaggagataattagcaacctatccaatccttcactgttaagtaagtatttgtttcgggttacctctttgtcatcaagagactatcgctttagactcgtcgcagctagtacagataaaaacaagcatgaaaatagaagaattagaactcctaatttctttgatcccactaaagagaatatccatgctgttgaagttgatctcaatggtaacattagattaaaagaggatgattaaacgaaccatcactatatctagtcctgttcacctctccttagaaaaccgccaattggtgataaccaataaggagacggaggagcgacagaccctacctctagctgaggtaggactattgatactggagcatccgagggtgaccaccaccctccggatgctccagtactgtatggaggtgggctgtatagtggtagtttgtgatgagtttcatatcccaagtggctacctctctccactcgaggggcactccacacagggtgagcgaactcgggagcaggtggcagcatctatcccgactaaaaagagcatctggaagcagttggtcaagagcaagatcctcaaccaagcggccgtactaaagtcacgagggatagaggagcaccaaaggttactcaacctttccgatgaggtgcggagtggcgacccagataatagagagggaatcgcagcacgtatctactggagtgccctcctaggggaggagtttatacgagagcgagatggagtaccgcccaacgccctattcaattatgcctatgccatcttgcgtgcttcggttacccgatccatcatcgcttcaggtctctccccaaagctgggggtacaacaccaaaataagtacaacccctttccgctctccgatgatgtgatggagccctaccgcccctttgccgacctagcggtgatggagttggtggatagtggagaactctcaattaccaaggagagtagagctcatctccgcactctattggcacaagatacactcatcagtaagctcaggcggccactactcatcgctatctctatcaccaccagttccctcgctcgggtctactcaggtggtgccaagacactcgtattacctcgaatcccataaccaaggagtctcacaatgaatgtttcaagaataagtgcgtacaaacttatgtggattttagtcgcttttgatatccctgttctcactaagaagcaacgaaagcaggcggcaaagtttcgaaaggagttactgggagagggatatattatgctacagttttcggtctacatcaagccgatcccatcgatgcaacaccgccagccactcatcaataaattgcggaaatcacttccggaagaggcggatattaaggtgattaccattaccgacaaacagtatgctgagatcatacacctctcgggaacgaagcaaaaggaaccgaagataccgaaaatacgacagctatcactctttgaggaattttaggtagctttgaactgaaaaaatagacccctattggctcttttcatcaaacatcggcattttattagacgtcctacgacctctaaccaattgatatttacaactatatatagccgatgttgtggattgattactttagggaactagatacaactccacctttttcgtcacacaatccatatctgttgtggattgattactttagggaactagatacaacccaatcagcctcggtcaagctcgtgtcacgttgtggattgattactttagggaactagatacaactcggcttggtgcgaacgccaccccgaaggagttgtggattgattactttagggaactagatacaacgaatgtatctttacgctcagctgaaagctcgttgtggattgattactttagggaactagatacaacgaatgcagtacgaaactatgattaatccagttgtggattgattactttagggaactagatacaacgacgtaaccttttgtgctgtatctggcaggttgtggattgattactttagggaactagatacaacaaactcttgaagctatgctacaagatgctcgttgtggattgatta

SEQ ID NO: 405 - DNA, 16455 bp, synthetic construct
  source 1..16455: mol_type = other DNA
  misc_feature 1..16455: note = Synthetic
ttgcccgccgactaaaatttcctgatcggggaattcacgtttaatattgttaattaatttcgcgagccgcgaaatgtttatgtaaaaattatttgagatgcccacaacttccggcttgcgttctttaattaattcaacgacatcaatctgcggagtatttgagccgacaaaaatcgtatcccagccgttagcttccataaatcccgcgaccattcgcgcgccaagttcatgatactctttatcgatgcaggtaatcaacgcggatttgccaattcgattttccccgccgtaatgcattgctgtaatttcaacgagcgattccgttattttcgtagcgatgtgttcgttcgccacggtgcatctttcattctcccacatttgcccgatacggtacatcgatctttgaaaaagctgaagataaacttcttttagcggaacgtttttttcgagcaaattaatcacaatttgaaggcattgctttttatcgccgtccaaaagcgcgtttaaataatgtaaatacagtggttctgaaatcatcgccgtaaaatattagtgactttctataaacgacagaaacgtgcaaataattccatagcgtaaaaaatattttgttacgcgctgtggtttactaaaatcgcgattctgtaacatgtataagcgaaaaacggcgcggcgagaacatcgattgaataatgcacgtgctgtatcaaaacgcacgcgcccactagtgcagttaatacaagaaaccaacgccggatttttttattcctgttcgttaagaaaagcaaaaacattgttgaggtgtgtccagaaaaaaacaaatcgcggtaaagcgtctgtccgccgccgaaaaattccacgaacggatcagttaatggtatgattgttttcggcgcgtcgagcggaagaaaaaatattgttgccaatctgaataacgctacgagtgaatatgattgcagcgcaagtaaaaactgttccgggtgaaaactcatcgaaattaacccgacaattaacgctgtataaattaacgcgaatgtaagccacgtaacatccacgggcgggaataacgataaaaccggatcgtcaaaagcgaaacccgaacggttttcgttgtacgctaaaaattttgcgagcgagaataacacaacagctaaaaatattatcgatacaataaatctatttctgaaatttttgtcgcttagttgcgtctgccaattatatttaagtaattctattttagtcatgacttgcggttttgagccgaaaaatatggaagcgggaaaaatgatacaactaataatttttcctggttttggcgggctacaattttctcgcgataacaattggcattttcattaattcggatgagccgtcatccgccgctatttcgatgagcaaaatataaatcccgatccgcaatgcccgcccgttttcgtcaagtccgttgaatattattgatgctttcgaggcggagggcatgttgtgcgtaagcgttcttacaagccgaccgacgctgtcaaaaatcctgattcgtacctgtacaagtttttttgaaaagttaaaatttatcgccgcgaaatcttcaaagccgtcattatccggtgagaatggattcggacaaattgtaaccttcgattcaccgggaatattttttacgtaaacggaattttgttttgccggcgtggctccttcaccgcaaacgcttgtgctccaattcattttttcattcgccgcgattgccggatttaatctttccagcgatttgttttttacgcttggaatatttttgttgtgccataacggcgagtaataaagcgaatcgagaatattgttttttgcgtctcgcaaaatgagagatgttccgttgttcggcagacttagcgaattgttaatcatcaccaaattttcgcacgccgataaatatgaataatttttaacgatagatgaatccgccgcgagcacaaaataattttccgccgggatattatggaatgttgaagtgagttttatttttttacttcccatttgaaatgtcattccgccaatttgaattgagtcgccggacgcgttataaaactcaacaaactcggaattgtatgtcgcgggctcgtacaaaatttcgtttatgataattgaattaaaattatactcgcgcgtttcagccgcggaattttttaaacccggcgtggcgccgttattatttaacgatgaagaccagttcgaactatcacatcccgatttattattatttattctttcgattgaaaaacctttgccgccgcaccagtttgaattatattcaacgctgtcgataaccattcccctgttatcgcgaataattattccgtccgttgaattaccgagcgcgccaaacttcgcctggaaaaattttttaggcggataatatggaaacttattcgtatccggtgtaatcacagcgaattcatatttatcaagttcaacattctcatttgtaattacagctttaaccggatttgcgatatccgagatattccacccggcaagatttataggattatttgagttgttaaaaatttccacccattcggattccccatccaaaggattaaacattatttcggagataacaatatcatttcttttgcaacctggcttcagcgaaaaaaccaggatattattcgatttttcctggtcaccttcaaatttaatttcgatgaaaatatttttctgctcttcaattttaatttttgagttcgcgtgaatttcgattgagtcattagcgttgaggttacctgctttaactttatcaaacaaaatcgtatccgcaccgttaacaaaattgaattcaaccgtaaaattttccgcgggataaatcccggcattaaaaaccattgccgcaatttcaacatcgtcatcaaacgcggggaaagcaggaatagttttaatagttttaagaaccaaatcgtaatcttttttcgtaacgctgttaattcttccgggcgtgctcagctcaatatcttttgatgatgcccaattatttttattgcaggggttttcatttaaaataattttttcaattgatttgccattttccccgccccagtttttgtcgtacaaaagcgagtcaattgtgccgccgtaaatatcttttatcacaattccgtccgcgtcgttattcaggttcgcgaattcattcacaataaatccagaaggaatttctttgtggtaattaacgattgatgaatctttcgaaatgacgagcagcgattttttctttatcgtgccgtatttgatttttgttgcctgcggctttgtcaatacatcgcttattgtccatccgctgatatcaatattataatcgaaagagttggatatttcaatccactccggctcgccgttcagcggactaaacataatttcattcagtgtgattgtccccggtttgtatgccggcgttataaatgaagcatatttattatttacaaaatcttcatcctgctgcagaagaatctcgacctcaaaatttcgttttgcaacgagagattcaattttataaataaaattatgaattaatacttcgccgggttttaagtttataatcgtcgatctttctcttggtactttattttcgttttcgatttcatttaaaataatttccgtaaatatatctttcgtgcctttgttttcaatctccgcgctaataaaaacattttcccccgcaaccggtttatccggcgtgaaaattattttattaaccgccgcgtcgtattcctttttagctacagagttaatttttcccggtgtgcctccgctttgcaaagcgcacgtccgccagtttgtggaatctattgaagattgaaacgcgtcaattctttcaagtgatttgccgtttttaccgccccaattagatttatattcaagcgaatcaattatacggccgagtgaatcggatagcacaatttttccaccggaattatttaacgcgggaaattttacaacaataacatttttaagatctggatatgcatcaaaaattgaggagtcggaagcaaacacaaaatactgccccttcgataatttatgagaatttgttgttacttccttaaaagttgaaccggcgttcaatctatatttattgatgtcaatttctttttcacatctattaaatatctcaatccattccggttccggcgcagctggcgcatacataatttcatttattacgagatcatttctctcctcgtttatcctcacacaatttatagcgcagatcatgaaattattttcgttgtactggtcatttataaattcaatttctgccttaaaatatttttgtcctgccgataaaccgtgaatagcaaaatcaactatcacctcctcaccgggaacaagtttgtttattctttttgtatccagtagttcatcgtttgatgtaagcgaatctttattcgaatccaaaaaaattttcgcgtcaatcatttccgcgttcaacgaaccttcatttttaattttgagtgaaagaacaaacggcttgccctcctcaacaaaattattaacactataaaaagattttacgcataaatcatattcttttggtgaaacgctgtttattcttccgggtgtgctcagctcaatatcttttgataatgcccaattatttttattgcatgagtttccatttacatctattctctcaattgatttgccgctttgtccaccccagcttttatcatacataaccgaatcaatctgcgagccgtatgaatctttgacaacaacgccgtctgcgtcattatttaaattcgcgaagttcatcaccgcaaatcccgaaggaatagttttatgataatttagcagcgacgaatcttttgtaattacatagaatgatttcggctctataaacccgtttttaatttttacttcctgcggagttgtcaatacatctgagatataccagccgctaaggttaattttgtaattagatgtgttgtaaaactctacccattccggctcgccgtttaacgggctgaacataatctcgtttatcacgattgagtttttattataacccggcttaatagacgccgatattttattattaaataaatcctcgtcattatccgctgctatttcaacttcaaaatcgtgaggggtatcaattgattttataatgtaagcaaaatcatagattattttttcgccaggcaatagtttcatcagaggtgattgctcaattttattttttatactgtttgataaaacttcgaaaagaaccagataaaaagaaatttcgtttctccccacgttcaacaattccgtatgaattgaaatattatcacccgcaaatggacgcgccggattaaaatatattttagagcaagcaacgtcgtaatttttttttgatacggaattaattttacccggcgagccgccgatcatcttagatgatttccagttcagcgagtctgttgattgaagctccggctcaattttttcaatagattttccgttgattcctccccacgatgacttatattcaagcgaatcgattacacgatttagcgaatcaacaatcataattctatcaccggaattattgagcgccgaaaaatttatcaccgccgcatctttcacatccggataaatttttaagaatgacgaatccctggtgaagacaaaatactgatttggattcagcacttgcactttagttaatgcactgcctgcgtgagcacctacataaattttatatccgagcaaatttattgacttatcacttttattaaacaattctatccactcgggcgcggatgaaaccggagcgtacattatttcattaacaacaacatcaccccgccgctcattaattttcacaacgttaatcttgattgacgccgtatcgttatctctgtattcatccttattaaattcaatcaccgcgtaaatattatttatgcccggtgtaggattttcaaaatcatacacgctttcaaatgtagaagcgggggtaagcgcgtttagtatttcttctttaatcaattccgtgggttcgaggattgagtcgttattcaaatcatttattattttcaaaacgcattcttccgcttttgcgtttccagtattttcaagttgtatttttattttaatgggctttcccaactcaacataattttcagagtccgaaattatttttacggatagatcgtatttcttgaacgaaaccgaattaaccctgcccggcgtggcgttaaattttcccgccgatactttccaattctccgctgattgtgttattgacgtgattgaaactctttcaagcgacttacctgcttttccccacgcggattgatattcaacctcgtcgataatatccccataattatttttaataattattttatcggatgtattattcaaggaaggaaaagcttttactaataaaccggaaggaattgaataaaaatttcttatctccggtccgtcgctaatcacaaaatattcgcccggctgtaaaaacaaatcttcatcgcacaaagttgatgaggatgatttattgccaagtttccagttttttagattgagcgtgcggccgcaattatttatgatttcaatccactccggctccccgctttgcggcgcggacatgaattcgtttatcaaaacatctccatgtccggcgggactttcaaccgaagtaaaacgaaaattatctatgttgttgaagatgttttcatcattaacataatttaccgccgcaattagaaaatatttgcgcggcgagtcgataatcaaattgtgctcaactattaacgaatcgcccgcttctaaactcaatacatttttagaaaatattttttcgtttgactgcgttgttgagtcgtaatttgcatcattaaacaaatctacagaaatattttgcgcaggacgccggccgatatttttaacgagcatttttaatttaacaatcgcgtttacaaacggaaccgccggatcaactgaaataatttttatactaacatcattatctttttgtgaaacggaattttcctcacccggcgtgccgttaaaagcatttatgcagctgttccagttagattgatttacgctgggcttttccgtggaaattctttcaagagattttccatcgccgccccacgctggcaaatactttatgctgtcaatcgtaacaccgtttgcatttttaattcttatctcatcaccgctgttgtttaagccgggcagggatctaacaataagctttgagttgatcgtataaaaatctgttatcgaagcgtcatcgcttatcacaacgtattcgccgggattaattatttcatcaatatttataaatgtgatcagcgaagtgttgtcgcctaacttccagttcttcaaattaagcgcgcggtccgagcggttatagatttcaatccattccggctcatccggcggcgggtcgtacataaattcgtttataattatttcctgcggcgcggccggtttttctgttacttctatttttttataggatttattgttggatattttttcatcttcagcgaataatatttcggcaataaataaatacgttcccgctgtatccgcgtaaaaattttttccaacaaaaattgagtcacaactatcaatattaatttgattggcggaataaataatttcatccggtacacctagcgagtctccgttaacatcgcaataaatattagcgattatgtttgaagctgattttaatccaacatttttagctacagctttaatcgaaatactatcaccgctttgcggagctgttggagtgaattgcaaaaaactaatagacacatcataattcagaggtgaaacagaattttttaagccgggtgtcccgtttaatttttccgcgttgccccagttgtaaactgcgttatcttttgtcattaaaattttttcatccgaatagcccgcgttattattcgcggaatagacataggaatcaacagtatccgacgaaggcgaaatgaaataaacccggcggcttgttttatcagccattcctgaggagccgaaattattcccgctggttcttaaaattattgttcccgccggaataatatttttgtaaatgccgttattaaaatcgtaagcgccttgaagtataacagccaacccgcccggcagtaattttgtgccgccggtaagcgcgacaatattatttggcgatgaggtataatacttgaatttgtatccggtcaggtcaatagtttctgtttcggaactgttaaatatctccacgaattcgccgttttgttcggagggataaaacattatctcgctgaaagtaagcggtgagttctgcgcgtaaagcttaacttcaattaagaataaaaacagaaataatatttttactgatttttttattactcggcacatatatagtatcaattaaacacgcgggacaccctccaatccgatgccccgcgtacgagaggtgtttagtactttgcggttatcatccgcaagcttttgttttaccgcaattgcccgtcaattaatcattttcaaaaaacacttccgcgagaaaaacaattttttactcaaccggttgattgttctgttgaactgtctcttcttttttaaccgatctttcattcggcagcagatactgattgtacttaacataattgtcgttaaaaataattttacccgccttgcttactttttgcatagagtcgtaacactgattaagaatcgctatacgctcctgcgtaaattctggtctcttcttttttaatttttcctgttcaagatctgctttcgaaagatccgtttgcaaagatttaattttttcgatatccgcttccggcaaacccgccgcgagtaaatgatccttgtattgcaaggcggcgttgtaaacaaagccaaggaatagaatcattttaacttctgattttcgcgcctcgtcgtaatccgaaaatccgaattgattccaaatttccttatgatcggggaaagctttttcaacaaagtattttactttttgatagtgggattttgccgcgttaaggaaatcctgaacaattttagttttttcggttaaaccggcttcgtaaaaattatcgcggataacatcgtttgcgttgttaataactagaagccaattttcagcaaacggatcggcaaatagattgtcgaaatccccgaatgccagcttgtcttcagtgaaaagtccatgcataattctggcttcctgaatcatatcggcatcggaaatattatagttcctctgtgattcatacttactcatatcacacctcgattttaagttaattccactcaaaaccaattgagcggataaaaacgcactatttcagtttaattttgcccgcatttttcgcataaatacaggcaaaacggcatatatgcctgtttctgtctcatagtagatcatttccggcgcatagttaatggtttccgccgtacagttgatcctttccgtcgttaagttgcgtgtttccgccgcgttgttgaagcactgcggcgtattgtcgggggctaacgtcaacaagtggaaccgttgcggcttaccgttacatagccgcaagtttaatttggacttttccgcgccctttccgttcgtttccgttctaacagcaaagcaatattaggccggaaagatataactgaataagaaatatatttaacaggagaagtataaaattaaatagggtaagcaagatggtgtaatggcagaacagctgatggaaattgtaaaacacgcttgataaagtcaagtaaaaaatttaaaaactagcggttttgttctactatatatataggaaatttatgctttatagtaagtattaactttgatcagggattagaaatattaaaaagccccacggagtacgcagggctcgagaaaattcttcggcttatagccttattgtgataagctttcaattgcaacataaaattttgaattataacttgcaagaaaatattcataactaactaaaagggtaatgttatgcaaaagatacttggattagatcttggtacaaattcaatcggatgggcaattagagatattgatgaagttgaaaatcaaataatcgataaaggtgtactaacttttgaaaaaggtgttgctactacaaaaagcggtgaagagccgatggtaaaaaaaagaaccgaaagcagaagtaaaagaagaaattaccaggctgaaaaatatcgaaaatgggaaatgttgaaatgtctcattgaaaacaagcccaaaatgtgcccgcttacaattgatgaactaaacgggtggcgaaagtataataaagaaaatgggagggtgtacccacaacgaaaggaatttattaattggttgaaacttgattttgatggagatggaaaaatagattttgaaaacccataccatttaagaaaaaccgcagcggaaaagaaaattgacgacccatcaattcttggaagagcattttaccaccttgtacaaagacgcggatttagaggaagagatgaagaggaatcaaaaactataatgaccggaagtaaagaaaccggtacaattggcgcggaagatattcataaaataatggaagaacaaagtacaacactcggcggggcactctattatgatttgaagaataacggcaaaagaataagaaaaagatataacctaagaacagattttgaggctgaattaaaagcaatctgtcatttacaaggaatagatgaaggcagtgaattatttaagaaactttataaagctataatctggcaaagaccattaagaacccaaaaaggtaacataggtagatgtacttatgagccatccaaacaacgttgtccaataagccacccgttatatgaagaatatagagcatggtgcttcatcaacaatataaaaatcaagagtgcctcaagtgcaggtagtacttttgaatctctttcagcagagcatagggaaaatgtctataagaaattatttttcagaaaaagcaaagcgcattttgaatttgtagatatagaaaaattacttgacccaaagaaaaatctatatgtatttaattataaggataacacctctatatcaggttgtccggtaagtgcggctataaaagaaatatttggtgagcttgaagatataagaatacctcatgcaataaatgaaaaaagaagcaaaaagaaagattattatgaccatgaggatatatggcatgttcttttttcttttgacagcaaagaaaagcttaaggattttgcaaaagtgcagcttaaacttgataatgaaaatgctgataagttctgtaaaattaaaccgcaacaaggatatgccagtcttagcatcagcgttataaagaagatagttccctacttacgaaaaggatttatttattccgatgcagtgtatctagctaatcttaaaaaggttcttggtaaagaactaaccgatgaagaaacaaacaaaataattgaaggcatacggcttcaaataaaattacaaaaagaagaaaaagagctgataggagcaacaaataatttgatagccaagcatcttaatttagagacacacgaagggtatgcgcgttatcctgaatatattcttcgtcaaaaagattatgatgatatagacaatgaactcataaataattttggagccaaaacttgggatgaaaagaacgaagaaacaaaaaataaatatcggattcgtgtgcaagaattatatcaggcatatcttcaaacaccggttaatgtagaaaaaggtctactgtttaataaagtgccccgtcttgatgaacgaataaagacatacttaaaaaatgaatggaatgcagaagatgaaaatctaaaacatctatatcatccttccgaaactgagatgtatccaggggcaatggagaaaaacgggaaaaaatatttaggagacccaatgcctcttagccgtggatttaagaatccaatggcgatgaaaactcttcatcatttaaaaagattagttaattatttattggaccaagacaagattgacgaaaacactcgtattgtagttgaaatcgcccgtgaattaaacgatgcaaacagaaggaaagccattgaaagatggcaaggatataggcaaaaacaaaataaagaataccatgaagctatcaaggagataattgaaaaacatggattgaatattgatcccagcaaagacgatataattgataaataccgtttatggattgagcaagaaagacaatgcctttatacggggaaggttattaattgcacagagctttttgatggaacaaagttcgactttgaacacaccatcccggcagatatttcttttgacaacgaattaaaaaatctaactatagctgattcaaagtataatagggaaataaaacagaaacgtattccaaccgatcttcccaattacgaaagagatactacaattggagatgaaacatataccgctattcaaccgcgtttaaaattcatggaagagaaggttgaacactttgagaagcaagttgagttttggaaaaatgaatctagaaaagctgggacaaaagacaggaaagattttagcatacaacaaaagcattttaatcagtttgagttagattactggaaaaagaagttggatactttcacaataacagaatacaaggtaggttggcggaatagccaactaagggatactcaaattataacaaaatatgcgctgccttacctaaaaacggtattcaataaagtagaagtacaaaagggaataataacagctgaatttcgaaaaatatttaatgtggggttcgaaaaggatcgttcaaaacacactcatcatgcagttgatgctgcaatactaacacttataccttcggcagtaatgagagacaaattactaaaagcacattttgaagctgtggaaaacaatactcgttttcattcattgcctcccgaatggaaaaactataattctcaattcataaagaatatcgaagaggaaacattaattaattacataaatcaggataggactttggtacctactgttaagcatgtaagaaaacgcggaagaattcaatatgttaaagagaaactgccaaatgggaaatgggtttacaaacttgatgatctagggaaaaagattccacttattgcacaaggcgatagtatcaggggaaaattgcacaaagaaactttttatggttcaattaaaaagccaagcgaaggtagtataacctttgttgaaagaatacttttgaaagaaattgaagaaaagaatattgataaaatagttgaccaaaaggtaaaagaggttattagagatacagttaaggagagaatcaatagtggaaaatcatttaaagaagctatttcagaggacatttggatgattggtaaaaatggtaaacctaaaaaagtagataaaaatggcaatcgaatatttcctatcagacatgtacgttgtgaggtaaaagtgggtcaaggttctttaacagaagaaaaagcacttgaaattaagcagcacattttcaagtctaagcatgaatacaaacaatcctactatgctttaaatgaaacaatgtcagtttgtttatattatgaaggtacgacaaataataaaacacaaaaagcttttaggttcattggtttatttgaactggctcaatataaattaaggaatttatcagatataatttcaatttcggaattccaatattgtgaggttggccgtggtatgaataaaaatttaattcccttatgtttcttaattactagcggaacccatgttttaatctattccaataatcccgatgaaataaaagaattaaacaaaacagggatgttaaaacgactttatagaatatataaatttaacaaagccccatctccatatgtctatatgcagcatcatacagaagcaagaccagatccagaattaggtttaggacaaacaaaaattgatattaataaataccaacctcgtctcaagttggttgctaataatttcaattgtcttattgaaggtaaggatttcgaaataaaacctgacggagagattattctaagatgatcaaacgaacattgtacttcgggaacccggcttatctttcaaaaaagaatgagcagcttgttgtgaaaagcaaagagcaagattatgagcatgatcaagagaaagaattggacaatgaaacaaacatagttgcggagaaaaaagaaggatggctggaaaagcggaaggaaattacaaaagaagttttaaataccgtaccgatcgaggatattggaattgtaatactagataacggacaaataacaataacgcacggcgcactttcttcccttctcgataataatgcggcggttgtaacttgttcaaacacccacatgccgaacggattatttttgccattggccggcaataatgagcagaatgaaaagttccgggcacaaatcgattcatccgaaccgctgaaaaaacaattatggcagcagacaattacagccaagattaagaatcaagcggctaatctaagagaaagaaaggtgccaataaacaatatgcttacctgggcaaagaaagtccgcagcggagaccctgataattacgagggacgggcggccgcttattactggaaaaacttcttcccaatgatagaaggttttataagggataggaacggtgaaccgccgaacaatttatttaattacgggtatgcaattttaagagcaataacggctcgcggacttgtaggttccggcttactgccaacattaggaatccaccacgctaataaatacaacgcatactgtcttgctgatgatataatggaaccatacagaccttatgtagataggatagtattcgaaatggttaaaaacggtgaagatttttttgaattaactccatctattaaaaaacaactattgtcaatcggtacggaagaaataataattgacggtgaaaggagtcctattatggttggtatgcagcgaacaaccgcctcgcttgcaaaatgctttgaagggaaagcgcgaaaaattatttaccccgagctgttattagtatagaattaaacttaagtgtcgtgttaataatatttattgatgtacatacattagaggctgtctcaaaagtacttatttaatcagaattagaccacagagaacacggattaaacggattttcacagattaaatatttgattaactacttttaagacagcctcttcaagataaaaaagcaacaaccgaaaccgtttcaacggtttaaaaaacggaggtgattatgtcattgcattcatactccaaatgctggcttcaccttatatggtgcacactaaacagagaaaaacttctacagcaaaaagacatcagaaaaaaagtttcgattttatttatcaatattcctcatcaagaaatatttatatgaaaaaaaattatgttaacagcgaacatgttcacgcgttggttgatttaccgacaaattattcaattgaaaacatgatggtacttttaaaaggcgtttcatcccactggataaatatggaaaagctctgcccaatcagtttcagctgggcacgcggttacgcggcactttccgtttcggaatccggtttggataaactaataaactatatcgaaaaccaggaggggcatcataaagaaaaatgttttttggaagagaacaaatcttttatagttaaatatggcatggaatgctcacggttggcataaactgttaaaacagttttttaataatagatttcttgttttattcaccgcgataaatcgcggtgttagcggaaaataaaataatagagtattggtgaaaatgagatttaatgagtacagaataatgtggatactagtattgttcgatttacccaccgaaacaccgaaagagaaaaaagcatatacccgcttccggaaggaattactaaaggacggcttttcgatgtttcagttttcaatttacgtccggcattgctcaagccgagaaaatagaaacgttcatttaaaaagaattaaagctctattgccagaaaaagggcacgttggtatactatcaataaccgataaacaattcggaatgatggaaatattttacggcaagaaaaaggaggatgggttcgtagaacctcatcaactggaattattttaaaagaggctgtctcaaaagtacttatttaatcagaaatagaccgcagagaacacggattaaacggattttcacagataaaatatttgattaactactttaaagacaacctctttatgtagagttaaaaaccaagtaaagatttttttaatcctaaaatcgccgtaagttgttttattttaacaagctaacccgacctaccttggttttaaacttgtcaaaaaacattttgaaagcaaatcacaacctaaagaacttataaggggggaaagattcgcttggttttaaacttgtcaaaaaacattttgaaagcaaat

SEQ ID NO: 406 - DNA, 15592 bp, synthetic construct
  misc_feature 1..15592: note = Synthetic
  source 1..15592: mol_type = other DNA
gatatttttatttatcacagtaaacttcctgaatgtggtattgttaagagcagtctgatcagcaaatccccaaattgtaacttgaagctcaatacccatcggttcagagccatacatttgagtagtgagatttgaattaagatcgtttgctacataccagatagtttgcgaagcataagggacaccggggatatcaaattcgggttcccaagtattattgccattcatatcctgaaaaggagcaccgcgatccacgggccagttattccagcaatattgatattcagctcttatctcttcgatacttccttcacctgaattatattccttgctaagatcggcggtgaggtaatcgggtctcactctccaaattctgtttatttctaaataagggtcttcaggggttccatcgtcttttattttaccaggttgtaatccggttaaataggcagaaccaccgacatggatattgccatcaatcttaccaccccatataaatcctgattgatagattgctaccggacttccaacataattagggaaatggaatccgccattattatccgtgatattattattaaaatgccacgtattaatattgttgatattgaaataagtatgatccctataatcatttgcagcagtgggagattttaatttcatctcatttcgctttagtggacttttattaaatgcattcttatcgaactgcgcatttattaaagagaacgaaataagaaaaaagatgaagctaataattaaccgtttcattttcttgcgcctcattttattttataaacatcattttctttatgtcattaaattgcgatgtacgtatcgaatagatataaacgccgctcggtaatgattttacattccaggttatctcgtggaatcccggttccatctccttattaataagttcctccaccctttcacctagtacattaaatatttcgagatgtacatttgtccgctccggaagtccgaattttataatagtagatggattaaatggattcggataattttgcattagtataaagtttacgggtatttcaactcgagaaacatttactattccgggcatctctttattgagagtagtctctgtaccatttttaacgactacaccttcgatatttaaatccattccatcaggtttaatcttaataggatatctatcggaattaatttttattgctaatgtattattgcctaaattttccacatagcggtttgattcgtaccggatatcaaaaattccgctcggaggtattggaggcatttcatataaatttagatttaccttctctttatcggtatcataaagaacgccttgtcttccatctgaatcggttattaagattcttccccaattagaatttatctccggagctgaggtgtattgtgaagcaatgaaattctctttcttaatagaaggactcttgaatggggagagatcgatagtgcccgatgcggatgttttcacccagaatccttttccataagggagattgaaaggaacataatagccattattatatccgaagaatgaagaagagataatattagcagggctagtagtgatagaagttataatagcatctctatcgaatataccgataagattccaccctgatacaagatttattatgaatgattccggtttaacgccgcggatattgaacgattcatcgatagaattttttaaccagtatcctttagtaatttctaaaggtgaagcagcataatagccgctattatatccccaaaccgaagagacactatttgagaaaatagcagcaggagacatatttggaagcattaccggtactgaaaccaagttccaaccggaattaagttcgtattgctttgtttgaaactttttgcatattatttttaccgatgtaatactttcatccgtaatctcgataaaatcggtttccatcatatttatatcaaaagcagttccgttcaagtcagaaattttaatgaggatatcacccgggaattcattcggattccatcttaattttatcgggtcggttccgcttcctctttggaaattgattatccattcgattctctccacagaatcatttctgaaatcgcggactgagaaatcacctccgcccagaattgcaaaacggagatcaatcttccctggttgtggaactgattggagagcagattcaaaaatattttggtcaattccatcggtagcatttggatgagtgccaaagaaacccgagaacagatcggcgccgtcttcaactcttatctgtgagtaccaagtgagttcaggtgacttattatcaaaaaatacaggttgtaaatttaattgtgtttcatcctctaataaaagtactctatcaccatttggaccgccggatcccacattgccttcccatccgccattaagtgctgtttgagaatttgtaaagaatttatatgtataattagaaatatttgttaaagataaagtagccgaaaaaattccattaccatcaggatcagtcattggttcttcagcccagccattaaatgaccctctgagaaatattccatcggttagtggatcaaatttcccttcgagatgttgaattctcatatcgacattaaattctatatcacaaagactacctgcaggacctagcaccgtaccccaatcaccgcagatccatatcttcccgttattaagagtaattctttttaatctatttcttgtgccgctctcgattatattataattattaccaccatcggaactatgaagaatctctccttcatcgccaacaatataaaattccgatgcagaaaccatttttacgtcatagtgagttttattaaatccatcgcggaaggtccaagttacaccgccatctgttgtagtaaggatatttccctgttcacctactgccacgccatgattaaaatcgaaaaaatcgattccatacagatgccagcctctgtaattatgtgtagtaattgaattagtagctccgccatcggtagttttatatattgtattattatcacctacggcatagattgtattttggtctaacattaccacacggttgaatcttctatctccggtataaatatgagttccattagccccattatctctgctgataataatctctccatctccgcaaaatactccgttattaaaatcaaagaaatcgagatcgcgccaattattattagtgaattcttcatgtccccaagtaacgccaccatccattgacttaacaattatatgattaccaaaagtggcaatttgagaagtgcctacaccttctattgcgtaaatttctctataaaatggaattgcattaacgtattcccaattgtttccgaagtccgatgatctatatatactagagccgacagcataagcagttccgtcactagtgaattccatatcattaaattgtcccccaacatttgctttttttataaagtgtggagaaaccggtggggtggtaaatttaccaaaagattgaatggagccataatcgctttctaatgttacccttacgttatattgcgtattaggagtaagaccctcaagtttatctgaatttatccaataattccaaaataccgggagaaagctttgatccgggagtgaattattataagaataatcggtagagtattcaaactttatagtaatattattgccattagaagctgcttcaatagcaattctagcatcattactgaatagatctgaattattaactctccaacttaattcaggcggtgatatctgccataattttaattttattttataggtacctctatcgacagattctgtaatttcagaattcttattccctttaatagaactgttcatatcagtgtaccaattccatagattggaaatacgtatataatattcacccgtttcagggagaacatgaataattcgctgacgctgaaaattacctaaatattcctgagagctatttatttggtttttatttacatcaaaaagaaacagcatcccggataaatttgagttaagtgtgtttgcttcaatatcaattgtatcccctgcatttcctgtgaatttataaatatcaaaatcctctggaactgaaatttctccggttattatacttcctatctgagtctgattagccttagaaaatccattattatcttccgattcaatagtatagttttggtttgtaataataaatgggtctctatttctatatgaatagaattgattatcaacatcactaatttttaaatagcagtttccactttcgatatttgggactgtccagttataagtttggttagcagggacagatgcctcgacaaccgaataattaatgccattgctgctaaactcaattttgatatttgtcgcacctgaatagttccattgaataggtataatggcattaggagcgaatatattatttgctttaggagaagtaagaatcaaacatttatcatcggtccaagtattactccatctctgcggattattccatgattgatcttgattattatgagaaaagaaaagcaatccttctcgaattccgctcacatcttggtcatttatattaaaatctataggaattttcattccgggctgcggaacgaaaattttatctttttgatcattaaaattatctctcataaaagcgaggtctgaaagagggattttagcctctactgcatatccggaaggaaaggtttcgaaccatccataattaggaccgggcgagagtatattattaataagcatcgtattattgccgctgcttaaagagtacttattaaatcgaagttgataatcagggaaatctcctctttgatagctatcatgctgcaaaccaagcagattatataatccaatcagcaattcaggtgaatcattttcataagaattaaaagccgcatcagggaagataagatcatcttcaatatcaaaggcgacatataaatatttatcatcaacagcaattctggcttcgcaggaaagatcattatcgttatcaatttgaaaaggaggtaatgtgaaaccggtattattacttagttttatttcaatcggttgataagcagcccattcacttaaatcgccatcggcaataaaataagttggcggattaagtgaaattactcctattccttttgccagattagtaatagaattagcaaatgcgaaaggtcctgcgttccctgctaaatcaacacatcggattccataataataagtaacattggcatcaactttcggtgaacgtaaatagtggattgcgttacctacattctcataatagaatccgatcaattcaacacccggatcggatggtgaattaaatgaagtttgcgatccataaataagatatttttcacctgaaccttcattggttacatcatcccaagtaaaagtattagaatatgtggaagcatttacggtgaaattgcccggagcatccgggacttcagtatcaggtgccgaaccaccctgctggaaaagatctagcatgagtgtgccgctaattaattcgccttgaacaccggatgaatttcctgcggcagcaagttcaattccatatctcattacgtgatcaagatcaaaaatattatctccttcggtatcgcctatatatttggcaaaagcatcagtcgggataatattactctcggacggtaatccctgctttaatggaagaatatatcttatccattcagaattctgtgaaagattaattggcactcgaatgcgccaagtttcttctgtaccggtattatcttcaacgagataaactaaaagagaaagcctatcgggatttacggccgtatgaggagttggattctttatgtaaagtactaagtttgttctctgctcgaaattttccggttttacaatatctttatatatgctaatatatcctccccaatcttgcgaggcattaacagtataatcccattgaagagaattatttccttcaattttatctatggtattatcggttaattgaatagaacccttaccggtaggacctgcccatcccatatcatccatgttaaagaaatttactgcggtattatcgaatgtagttattggtggatacttgcttccaactaattcccagctatcaactattatagaacccgacgcagtgggatttggagtcattccacccaaagtattgtaaacaaatgcccactcgaaacttttgactttatccaaatcaagcagaccattaccgaatgcaaattgatttacaaatccggttgccggatcgttagtaacgtttaaaggaatctgtacattaatccagtttccggaattatcagcaagatcaataggcagatgttgtatccacgtatctgtattggagttttcatcgtaatcaactaattttagctctaaatgagtagtaccatttttcgatagagcaacaggagagattactttaatccacattgatatatattcacctgcagagaaatcgtaataacctgagatcggagtcgtagcccttactataaatcctccccaagaatcgcctgctccaattgtataatccattctcaatgcgcccggtccatcgtgcgaatctggtacatcagttaagttcaactgtgctaatggactattattataattggcgtttaaatcccagaaattatttgctactgagttatcacaattttggaaaacccattgggcatttaatgaaatggagaagaatagaattagaaaaaagaaaatctttttcatggctgcaccctatttatgtaaaaaaaaattaattcagtaattacttttatttacaagaaaactcgaatacgaatttttgaaaggacgctgaagatactgattttattgcataggaatgccactctcggataaagagatgtgaaacactttttagaaatgggatatgccaagtcatgatttgcgccctcatgtatattgcctatctattttacaatgattataaaattaatataaaaaaatatttgctttatgggaataaaaatctaaaaaaacatcagtaaattccgacacgatatcttctcatttctttatcgagagtctttcctccggggagaattttttctaaaaatttccaatattcggcagaatgattatgatgaaccgtatgcgcgagttcatgcataattatataatcaattaatcgattgggcaagcggattaaattaatattaagattaatattattttttgccgagcagcttccccatttagttttgtgattcttgagacgaatatcattgactttgagattatgaatttttgcaagctctcttactcgtgccggtaaatattccttagcctctttacgcattagtattaatagctcatcgctgacgggagttttatctttttcgattttcttgattcgtgcaaggaacttatttactctatcacgattggaatccaaatattccgccgcatattttattgacataaaataagggacagttacaacgagatgctcgaaaggtttataagatagcttgagatgctttgcccttttattttttctaaattcagtttttcctatttcgggaagttcgattatcaaaccggctctctattaaataattatcgggtataaagataagattttagtaaaataattaccttccaaaaaattgccctgccaagaaattaatcccggcagggcgccctcaagatgactgtaactacagtcggaatttttatttaattaagaaaatgccctgcgtattcctccagaaaaagtttccttcgcgcacccgattcatttgaaaaagatattatttccttaaagcattcatatagagtggagcgttccgataaattccgaaaaatttcattagatactttcacgcctgttactttgcctaatctatatttttcatctttaatatttcggattttagttttggataaatttgaaagcgaagtagaaattagattcaaattttccttttcggtttcaattgctctaaccaattcttccgaaaaagttagcttcctcggtccgtaatgagttatccggttagtatctctcttatttttaatcaacgcaccattagaacaagaataccctctgatataactataaacagcgagcgaatgaaatcctgtttcggaattgataatattaattccataactgaaattatcccctcctattgtaaatatttctttctccgtttcaatataaaaccgtgtgaaataatcatttttttctattgatgaaaccttatatttttctaaaatgcgaatcaaactattatcagatatttctataaaatttttagaagtgatagtaatagcatttaaattttccaagtgaacagtaacctgaatcgattttatatttattaagtaatcattaagcaccgagactaaagtttccctattgagataccgaaactgcgaactcggaaaatgaaaccatctgaataatttcatcacaaaactttttcttaccggataatattccaagcttccttcattataaattgttataaatactttatttgattcaaaatcgagctttatattttccggtttagtactaattttttttatagctctatattgaagataatttttcatttcatttatagatagactcaattccggtccatcttcaagtatatcaagcattacatccattcctctcatgcggtattaattaataattgaaaaataaattaagaagaggaggaaagagtatcattaaatgatattttttaatagtttaaaccatccacaaaaaagagcgagattatgaaagaccttcggagcaaaataaaaaggcaaaccgaattacttggattagttttaaacgaacccgcgaaatatttaatacccgacttagcgatggaatatgagattgacgaccttacgataaaacgtgatatgatggatttcagaagcagcggaatcggcattcattcgagatcgaaaaaaggtatttctatcgatggcgaattgcccgatggagtaataaaaccgatactcgaatcatatataggaacaactatttattctaaatcattcgatcgtgcaactcaatcattaacaaaaaaaatcggcagcaaagcgattgtgataatgtcctatttgcaaagaggaattgattctaataaaaaagtgattatcagttacaagaaaccgaatcaaaaaatatctggggaacagattatcggtggagaaaaatcggagggaaaatttaatcgagaaaaacttgatggacgggaatccgtcgtccaggaatctgacgaaagaaaaattgaaccgttaattatatacgaatcggagggatgctggcggctattggcaaaacacgaaaataattataagcaatttttactcgagcgcattcagaatattaaacaaactaacgaatcctttcccaaacacaatcaatcagagataagagagctattctcgggctcattcaaaagttatctcggcaaagacaagatcgaagtaaaaatattaatggataccgaatgggcggagagattaagaccgaaattgcttttggagaatgttagttattcgcctgccgaagatgggaaagtattattggagacaacggtaaattcattcaatgaaattgcggcatggatagtaagccgtggtaaaggagtgaaagtacttagccccacaccactaaaagagatggtactaaaactcgcaaaagaagcactcgaaaactatgagtgagaactaaaaataaaatttgctttacatatagactaatataaacatcgccgacatttataggcataatcaatattaaagagaaataagaaaatagaataaagtatttgtaaataggagtgtttaaaaataaaaagccccacggagtacgcagggcaaaagtaatttcttcggcttatagccttattgtgtaaagctttcataggtaacttaagaattatctaaataaataacaatagtaattgggagaatagtatgtctaaaattctgggcttagatttaggaacaaattctatcggttgcactttgcgggatacttcccaaagagaaaatcaaattgtcttttctactgttttaacttttgataaaggggtaggagaagaaaaaggtgtggaagttccacttgtacaacaaagaacaatgagcagaagtaaaagaaggaactataatgcaagaagataccgcaagtggcaattactggaaacgctaataaaagcctcacctccaatgtgtccgcttactatggatgaattaaaccgatggcgaaaatatgacaacgaaaacggaaatgagtacccctcttctcccgaatttttggcttggattcgattggattttgatggtgataatattagcgattttattaatccttatgaattaagggctctcgcatcaaaacaaaaaatcaataatccccttatactcggaagaatcttttaccacataactcaaagacgcgggtttaaaggaagagacgaagctgagtccgaaacaattttaaaaggaagcgatgaaaaaggaattgcgggtgcagatgcaacattaaatattatgaaagataaaaatgtttctcttagcgaagcattgttaattgatcataatgaaaatttaaaaagaataagaaatcgatatagcttaagaaaattagtagaagaagaacttaaatcgatctgccttaagaatgagatagatattgaaagtgaactttataaaaatcttgcaaaatcaattctatggcagagaccattaagaactcaaaaaggaaatatcggtaagtgtactttcgaaattaataaacctcgctgccccattagtcatccactatttgaagaatatcgtgctctcgcatttctaaataatatcaaaattactaatctcgaaaataatgaagaacaaaacctttctttagaagaaaaggaaaaaattatttctaaattattcttaagaaagagtaaaccgacttttgattttagcgaaatcatgaaacttatcgatcccaataaaaaccagtataaatttaatttcaaagactacgttagcgtgagcggtatgcccgtaacagcagcattaaaagagctttttggttgcaacgtttatgaaatctcaattaataaagcctcttcggcaaacggagaaaaaggctactacgattatgaagacctttggcatgttctatatacttttaccgatagtgaaagtctgattaaatttgcgaagagtaaattgcagctcagcgatgaggattcggtgaaattttcaaagataaaaatcccacaaggatttgctgctttaagtatcaacgcaattaagaaaatattaaaataccttcatcagggatatatttatagcgatgcagttttcttggctaatcttagtaaagttttagaccaatctcttacgagtgaagaagaagaaaaattgattgctaatgtccatagattaatgattaatcaaagatccaataaaaataaaagcgccataattaataaccttatcagtaactatattaataatgaagaaatgaacgggaagaaagaaagctcctacatttcggatgataatctaaataaattagtagagaatgagataataaatgtcttgggaaataatagatggattgaactgggcgaacaaaatcagaatcatttaataaatgaaataagagataatttcaaaaatttactaattaccagaggcaatttttcacgaggtgtcctttatgataaagtcccgcgatttgatgatcagataaaaactttacttaagaaagaatatcccgaatgggatgaagagagatttaaatatttatatcatcctgccgagagtgagttctatccggcggctaaagagatagacggaaagaaaatattaggttcaccggaaccgatatccaagggattaaaaaatccaatggctcttaaaacactttacgtactaaagaaattaattaatcatcttatattaaccgaaaaaatagattcggaaaccagagtagtagtggaaattgctagagaacttaatgatgcaaatagaagagccgcttatgaaagatggaaaaacgaaagacagaaagagaatgaatccttagttgataaaataactcaatcagcttccgaagcaggttatcccgatatctcagttgatgataatatattaacaaaatataagctttggttagagcaaggaatgcaatgcctctataccggcaaagtaatagctttttcagaattactaaatggaacttcggtggatattgaacatactatccctgcaagtatttcgtttgataacgaactttccaatttgactttagcgaattcaagatataatagagatataaaaaagaaactaatacctacccaattaccaaattataataccacaattgagattaacggagaatcttataaagcaattttacctaatattaaatttattgagaataaggtaaagcactattcaaaattagtggaagatgcaaagaaaaaatcaaaaagtgcacagagcaaagatcaaaaagatactcaaattcaaaatagacattattataaaatgcattatgattactggaataaaaagttaagaacattcacagatacagagataagaagcagttggaaaaatagccaattagtagatacacaaattatttctaaatacgcattccattatttaaagaccgtatttaatatagtggacgtgcaaaaaggtagcgtaacggctgcattcagagaaatatttaatcttggatttaaaaaggataggaatagcagtatccatcatgcaattgatgcggcaacattaacactcattccttatccgaagaaaagagattatctattactaaaatatttcgaagcaaccgaaaggaaattagcattccattcgaagccggaatattggaataatttttcttccgagattataaaggaattagaagaaaaaacatttgtgaactattataagaaggataccaccttagtacagacatataaaaacgtaaggaaaagagggagaattcaatacataagaaaacaattggcaaacggaaagtttgagtacatccttgatgataaagggaataaaataccgatggtatcacaaggagatgcaataaggggacagttacataaagaaacttttatgggagcaataaagcttcctctcaataacacaggaataaggggaaattataaaacctccgataaaccattaatttttgttgaaagagtaccactaaaatcattaaaaaaaatggaagatttaaaaaaaatcatagatgataaagtaaagggtgatattcaaaaaactttagaaaggaaaatatctcaaggaaaatctttcgtccaagcaataaatgaagatttctggcttttagataaaaatggaaatgaaataaaacaggataaaaatgagaaagtattgtttcctatgcgccatgttagatgtatatcatcagccggaggaggaattttaacacccgagaaggcattacaaatcaaacaacagacttttttatcagaacatgaatataaacaatattattatgcccaaaataaagaaatggcactttgtatcttttatgaaaaaaatgttaaaaataaattgttgagagaattcagatttgctggattatttgaacttgcccaattaaaaataaaaaacgtgaatgagctagcaactattccagaatacaatttattagagaaaagacatattccttcaaaatattttattaaaactggatatagagtaattgtttatgaaaattcacctgatgaaataagagaattaaatcctgatgaattaataaaaaggatataccgagtatataaatttaatgattcaggagcgaattatatatttttgcaatataactccgaatccagaaaagataaagaattaggtgaagggagtacaaaatttgacctaagtatatatcagcctcggcttaaattaacggctaataattttaactgcctagtggaacactatgattttaatatatcaattgacggagagatcattttcaaatgataaagcggacattatatttcagcaagaacgcttatctcagtactaaagatgagcagttaattgcaaaaataaaagagcccaatgatgaaagtgaaaaagagattacagccccgatagaagatatcgggattgtaattctcgatggtgcaattacaatttcgcagccattgatagcttcattattggagaataattgtgctttagttgtctgcaatcccaatcacatgccgaccggattattcttgcctttgacgggaaactatttgcagagcgaaatttttcaagcgcagattgaagcctctcaaccacttaagaaacaactatggcagcagacgatttccgcaaaaattaaaaatcaagctgctcatcttaagaaaagaaaagtgccgattaaaaatatgatttattggtcaaaggaagtaaaatcgggcgacccggaaaatctcgaaggaagagctgcggcatattattggaaaaatatatttaaacagattcctgattttattcgggatcgatacggtgatccgcctaatcaattattgaattatggatatgcaatacttcgagcaatagtagcacgtggattagttgcatcaggattattgccaactctgggaatttttcatcacaataaatataatgcttactgtttagcggatgatataatggagccatatcgaccttatatggataaaattgttgcggattttattgcgaatggtgaagacttttatgaattgaccccatcgataaaaaaacaattattggaaattgccacaaccgaaatatttatcgataataatcgaagtcctttaatggtgggattgcaaaggactacatcttcgcttgcaaaatgtttcaaaggagaattaagaaaaattacttatccggaatttttatgagattcagcgagtatagaattatgtggatactagtgttttttgatttacccgtggtaacacaaaaggaccggaagatatattccaaatttcggaaatttttaatgaaagatggatttgatatgtttcaattttccatttatgtaaggcactgtgctagtcgtgagaataagaatgtacatataaaacggataaagcaggaattgccgcctaaagggaaagtgggaatattatcgataacagataaacaatttggaatgatggaaatatttgaaggtaagaatcaagcagatggatttttagaaccgcatcaattggaattattttgaatgcccctttaggttaccaaaaaggttattaaaaggggcatctgattttttcgatcctaatattgggctaacttattgaaaaacaataagataaaccgacctaccatgaatctaatatcagtaaatcaaaatttgaaagcaatccacaacagaaagatattaactcaccatttgaaattgcatgaatctaatatcagtaaatcaaaatttgaaagcaatccacaaccgcttgtgtcatacccaattcgagccgtctcatgaatctaatatcagtaaatcaaaatttgaaagcaatccacaac

SEQ ID NO: 407 - DNA, 6633 bp, synthetic construct
  source 1..6633: mol_type = other DNA
  misc_feature 1..6633: note = Synthetic
agatgataagtatttgaaagtattatttgtgcattaatatctttttcgagataatcctgattaacagcttttacagttccctgagtgccgacaggcataaacgcaggcgtttccacaactccgtgatcagtttcaaaaaaaccagcacgtgctttggtcccggtttcacctggtttatttttatttattacagaaaattttagcaaagtgatgggatgaaattattaattatttactgtatgcaaatttactgtactggatcaaaggggcaaaagaaagtttagcgtatactcgaaattgtattcagatttgattacttttaaaataacaatcttccaattaatcggaataacaaaataagtttttagtgaccgaaaataaaaagccccacggaatacgcagggcttaagaaatattcttcggcttatagccttattgtggtaagatttcgcgtcaaacttaaaaatttaaaagtatttaaacaagttttaactaaaaataattgaggaaaatatgaaaaatattttagggcttgaccttggaacgaattctattggttggtctattcgtgaattaaattcgacaaataatcaaataatttataatggtgtattaacttttgaaaaaggagttggtgaggatcaaggaaaagaagtaccgcttgttcaaaaaagaactgaaagcagaagtaagagaaggaactatcaggcaaagaaatatcgtaagtgggaattacttgaaacacttattcttaataatccaaaactgtgtccgctcacactcgaagaattggatagatggagaaaatatgaaaaagggaccgatagaatatatccgaaaagggaatttttcattaattggttacgacttgattttaataatgatggaaaacctgaatataaaaatccatacgaacttaggaaactagtttcagaaaagaaagtagatgatttctattctttgggaagagctttctatcatatgattcaaagaagaggttttagaggaagagatgaagaagagtcaaaaactattttagatggtagtaaagagaaagaaacaattggtgcaagtgaaattaaaaaaataatgctggaagagaaagcaaccttaggtggcgcactacaccacgtgcagcaaaaatataataaaagaatcagaaaccgttacaatcttagaacagatgttgaagccgaattaaaaacagtttgtaaagttcaaggcattgatgaaaataatgatctatttcataaactctataaatcaattatttggcagagacctttaagaacacaaaaagggaatatcggaagatgcactttggaaccaacaaaaccacgctgcccactaagccatccacaatatgaagaatatcgaatgtggagttttataaataatataagagtaagtgattataaagatcctgaaagcgaagagacacaactaaatgatgagcagaaagcaataattctggaaaaggttttctttggaaagaaaaagaataaagatgactttgaatttatagagataatgaaaacattagataaaaaaggagatgcactcaagttcaattacaaggcttatactacagtttcaggatgccctgttactttctcactcaaagaaatatttgattgtgaactttcagaaataaaaatagctcataagccaaatgagagaagtaagagtaaaaaagactattatgatagcaatgatttatggcatacactttacacctttgatagtaaagaaaaactagaatccttcgcaaaagaaaaacttggtttaagtgatgagaaagctaaagcattcagcaagataaaaatgcctaaaggttatgcaagtttaagcttgaacgcaattaataaaattctcccttttctacatgaaggctttatctatactgaagctgtttatttcgctaacctaccaaaagtttttaacagaaaacttactgaaagtgatataaataaaattgtcgaagggattcgtcttcaaatgaaattacataagcgtgttaaagaagaactcagtattgttaatagtttaattggtgattatctaaacaaacaaccaggggaacaaactggacgctatccaaattacatattacttgagaaggataaagagttagtcgatcaaaaaataattgaacgtttaggaaataaaaggtgggaagaatttgatgttgaaaagaaatcaggattaaaacaattcgttgagcagaaatatctagaatttcagcaaacaccaatgagtacagatataaaacttctctatcatagattgccaagacttgatgatttaataaaagaatatctgagaaatgagtggcgcattgaagaatcaaaacttaaatacctatatcatccgtccgaaacagaaatgtatccgcctgctaaagaaacaaatggtaaaaaatatttaggtgatcctgttcccattagccgaggattcaaaaatcctatggcattaaaaacactgcatcatttaaaacatttaataaactacctaattgagcaaggcaagattgatgaggaaacaagagtagttgtagaaatcgcccgtgaactaaatgatgcaaataaaagaaaagcaattgagagatggcagagagatcgtgaaaaacaaaaccaagaatttacaaaggcgattaatgaatttgcagaacgtgaaaatgtagcaattgaaactactgatgaaatcatagataagtaccgattatggatggagcaggaacgtctgtgtatttatactggcaaagtaatttctttgagtgaactattcgatggtaccaaattcgattttgaacacactattcctgctgctatttcatatgataatgaacttaagaacctaacagtttctgattcggtttataatcggcaattcaaacaaaagcgaattccagctgagttacctaattataataatgatattgaaattgatggcatattatatagtgctataaaaccacgcattaattttatgtcggaaaatgtagagcatttcaaaaagcaagttgagttctggaaaaaagaatctaagaaagcttctacaaaagatagaaaagattattccatacaacagaaacattacaatcagtttgaattagattactggtttaagaaactcgatacctttacaatgaaagaatataaacctcaatggcgtaatagtcagctacgtgatacacaaattattacaaagtacgctctccactacatgaaaactgtattcgataaagtagaagtacaaaaagggaatattgttgcagaatttcgtaaaatatttaatgttggttttgagaaaaaacggtccaaacatactcatcatgcaattgatgcagctgttctcactttaattccgcctccaactattcgtgacatgttattaaaagagcatttcactgctatggaaaacaacattcatttccattccaaaccaaaccaatggaataattttaacccttcatctattctggatattgaaaaccatactttagttaattatatcgctcaagataggacgcttatcccgtctaaaaagaatgtaagaaaacgaggaagaattcaatatgttaaagaaaaaattgaaaatggaaagtggcaatataaacttgatggaaatggaaaacgaattcccttgagatctaaaggtgacagcattcgtggtaaacttcataaagaaacgttttatggagcaataaaagagaattcaaatgaagatctcttgtatgttgtaagaaagcagattaaagatttcaaatcagaaaaagaatttgaagatattgttgaccctgtggttaaaaatgttatttcagatacagttgctgaaagaattaaaaatggaaaatcatttaaagaagcaatcgctgaaccaatttggatgtttgataaagataagaactttaaaaaatcagacaagaatggcaatccacttttgcctattcgccatataagatgtaaagcacgtgctggcagaggttattttaaaaaagcactacaattaaaagaacatattttcaaatctgagcatgaatacaaacaatggtattacgttcagaatgaaattaattatctatttctgttatatgaaaatcaaataaatgaaaaaatttcaagatcatatagaattctcaatttattggacatagttaatcttaaaattaagggtccgaatgaattattcagaataccttcatttcaattaatagaaaaaggacaaggaaagaaaaagaatttatatcatttgaaacatatcttaaaagttggacaaagagtactgctatggaatgaaaatccagacgaactacgtgatctcgaaaagactgaaatactaaaaaggctctataaaatttacaagttcaatgaaattattgccccaactacatatatttatttaaaacatcacaacgaagcaagacaagaaaatgaacttgatgaagaaaaaaagttagtgattgaaaaatatcaaccacttatagctttgaagcccaacgattttaactgcttgattgaaggcatagattttgacataacccttgatggagaaattattatgaagcaatgatcaaacgaacattatactttggtaaccctgcttatctttctaaaaaagatatgcagttggttattaaacttccaaaagaaaatggagaacaaacctctgaattagaaaatgatcctaatgaaaaatataaagccagaggtaatgaaaatgttatttcaatagaagacattggaataataattctcgacaatcagcagattactctttcacacggtttgcttgctgcacttcttaacaataattgtgcagttgttacctgtgacagcaaacaccatccgaccggattatttctccctctcgaaagccaccaggaacaaagcgaaagatttcagactcaggtagaagcatcagagcctttaaagaaacaattatggcagcagaccatatctgcaaaaataatgaatcaggcgatggtgcttgcaaaaagaaataaaccgagcgataatatgaaaagatggacgaagaaagttcgttctggcgatccagataattttgaaggaagagccgcagcatattattggaaaaatcttttcccgcaagagcttgaatttataagagacagatttggtcaaccacctaatcaattacttaattatggctacgcgatcctaagagcaacagttgccagaggattagttgcttctggacttttgccaacacttggaatacatcatcacaataaatacaatgcgtactgtcttgcagatgatataatggaaccctacagacctttcgttgatgattacattgcaacttttgttgaagatagggaggattttacagaactaactccatcaatcaaaaaacaattattaacaattccggcaatggatatattcatcgacggagaaagaagtcctttaatggttgggttacagagaacaacagcatcacttgcaaaatgttttgcaggtgattctagaaaaattatttacccggaattcaaaataaacatagaagattaataatgagattaaacgagtatagaattatgtggatattagtattatttgatcttccaactgaaaacgaaaaagatcggaaggcatacacacgtttcagaaaagaactgatgagagatggtttttcaatgtttcagttctcaatatatttaagacactgcccaagccgtgaaaacaaaaatgttcacgttaaaagaataaaaagtattcttcctgaaaaaggacacgttggtatattatcaataacagacaaacaattcggaatgatggaaatattttatgggaagaaaaaggaggagacgggttttttagaagcccatcaacttgaacttttttaattaaaccgggctgtcattctgaacttgtttcagaatcttcagaaaaacagcccttgaatacagatatcaaaaccgcatatttcatttttttgatcctgaaattctcataagttcttataattcaatgaggtatttgagggtatattggttttaatatcctcaaagaacaatttgaaatcaaaccacaactcagcacaagcagggtcacaccacctgtcattggttttaatatcctcaaagaacaatttgaaatcaaaccacaacaacaattaatcagaactcatctacaaatgattggttttaatatcctcaaagaacaatttgaaatcaaaccacaactgctgagcaggctaagaaagtaaaaacagcattggttttaatatcctcaaagaacaatttgaaatcaaaccacaacaaatcccatatatctgctatctctgcttgattggttttaatatcctcaaagaacaatttgaaatcaaaccacaaccataagtgactcttcctaaaattccggtttattggttttaatatcctcaaagaacaatttgaaatcaaaccacaacggttgatcgtatacgtctatttgtctttaattggtatggctatgccaaaagaacaatttaaaatcaaaccacaacaattgttgccggaattttaattcctttttgttgtttttaatatcctctcccaaagggatggctatgccaaaagaatcctgaaattaaaagcaaatcaaattacaacgattcggattttgt

SEQ ID NO: 408 - DNA, 24629 bp, synthetic construct
  misc_feature 1..24629: note = Synthetic
  source 1..24629: mol_type = other DNA
gtaacaaccggtcagcccattttaaagatcacaaaaaataagcgactggtggtaaaagcagatgttccacaacgctttttccccatgcttagcaagattaaaacggccaatttcattaccctttatgatcagcaacttcacaaaacggaagagctcaacggaaagctgatttcatatggaaagtcaacgggtgaaaactcgttgttcacaccaatctactttgagatcgataatattggcaatttgcttgccggatcttttgtggaagtttacctgaaaacatcggaagttccgaatgccattgttgttccaaaaacagctttgctcgaagaagccggacgctattatgtctatgttgaagcaggcgagactttcgagaagcggtacgttaccatcgactgcaatgatggtgaaaattaccacatcactgatggtttgaaaccgggtgaccatgtggccacaaaaaacccttatttgatcaaattggcctccatgtcgagcgcactgccggcacacagtcaccaacactaattcttcaagattaaaaagctatgctaaataaaattattgagtattcgctgaagaataagctggtggttttgattatggccaccctcattctcggcgcaggaattttcgtcaccaccgacatggaggttgatgtctttcccgatttgaatgccccaacagtcgtcgtactgactgaggctcatggaatggcaccagaagaagttgaacgtctggttactttccccattgaaaccgcagttaatggagcaaccaacatccggcgcgtccgcagttcttcagccatggggttttccattgtatgggttgagtttgactggaacatggacatttacgatgcccgtcagattgttagcgaaaagttggcaaccattgccgaccaaatgcctactggagtgggctcaccaaccttggctcctcaatccagcattatgggcgaaatcatgatgattgctctgactgctgatgaaacctcgcccatggatttacgcacactggcagaatggaacattcgcccgcgcttactttcagttggtggagttgcccaggtggctatcattggcggtgaattcaaagaatttcaggtcttagccgatccgctcaagatgaaatactacgatgtttcatttcaggagctgattaccgcctgccaggcatccaacgaaaatgtatcgggaggctttctgaatgaacatggacaggagtacctaattcgcggaattgcccgaagcaatacgccggaagagattggcaataacctggtcaaaatgaaagatggctacccggttaaggttaacgatgtggctcaggtacgcattggcgcagctcccaaaattggagatgcttcctaccggggagaaaaagcagtcatcctgactgttaccaagcaacccaatgtcaacaccctggagctgaccgaacgaatcaagacttcgctgggcgatctgcaacaaacactgcccgaagatgtcggcattcatactgacatttttgagcaagccaaattcattcaaacatcagtcaacaacgttcaaaaggcactgatcgaaggcggcctgtttgtcgttatcattctgtttgttttcctcatgaactaccgaacaacaattatttcggtactggcaatcccgctatcgcttttggtcgccattttggccatgaaatggatgggaatttccatcaatacgatgaccctgggagggatgacaattgccattggatcgctggttgatgatgccatcatcgatgtagaaaacgtgtacaaacggttacgcgaaaacagtcggttacccgatgatcaaaaacgacctattttcaatgtaatttacgaagcatctgttgaaattcgggcttctattttaaatgcgaccctcattattatcatcgcttttgttcctttatttttcctttcgggaatggaaggacgtatgctacaaccgctggggattgcctatatcgtgtcactctttgcctctttgtttgtggccattaccatcattccggtattgagcagttacctgttgaccaacgaaaagcgtttgcaaaaacaagccaaaggcagccgtgttgaacgtttcttgcgtcatcactacacacaaaccctgcaaaaagcggtgacataccgcaagcctgtaattggaatttcactggccttatttgcattggcaattgtgctgatcaccggctttggacggagctttttacctcccttcaacgaaggttccttgacgatcaataccacgaccatgcccggaatcaacctggaagaaagcaataaacttggaattgaagcagaaaaggcgcttttatcaattccagaaattacatcggtagcaagacgtaccggccgggcagaaatggcagagcatgcctttggagtgaatgtttcggagattgatgctccctacgaactgcaagaccgcccgcgcgaagaatttttgcgcgaggtgcgcgaaaagctcaatcagatccaaggaattacggttgaagtgggacaacctatcagccaccggattgacgccatgctttctggctcaaaaaccaatattgccattaagctttttggaaccgatttgaatgaaatgtttcagattgcgacccaaatccgaaacgaaatacaggatgtagaaggtattggagacctctcggtagaacaacaaattgagattccccaacttcaaatcaaacccaaccgcgaaatgctggcacgctacggaatttcggtcaatgaattcttgcaatttgtggattacgcctttgccggagaaaaaatatctgacgtattcatcaatgaaagagctttcgacctggtacttcgttttgatgacgactaccgcgatcagattgaagctgttcgaaatgcattgattgacacgccttccggacaaaaaattccgctctattatgttgccgacattcagtcgacctttggaccgaataccattggccgcgaaaatgtgatgcgcaaaattgtggttgccgtcaatgtggctgatcgcgatgtacgcagtgtggtcaacgatatccaggataaagtttcagccaatatctcactacccgaaaactatcacctggaatatggcgggcaatttgaaagcgaggcagaagccagtcgtgttctgctctccgcgtcgctgggagctttactgttgatttttattctgctgtatgttgagtttaaaaacacgaagctggccatgatcattctgatcaacctgccactggcgcttatcggcggagttgtggccatctggatgacctccaaggttattagtattcctgcaatcatcgggtttattaccttgtttgggattgccacccggaatgggatcctgctcatctcgcgttaccagagccttactgatcaggtcgatagtttgaaagatcggatcatcaaaggttcagcagatcggcttaatccgattttgatgaccgctctaacagcagccctggccctaattcctcttgctttggcaggagacaaaccggggaacgaaattcagagtccaatggccattgttatattgggtggcttattaagttctaccctactcaacatctacgtggtacccattatttattatctattccagaaaaaaaaggaagaaaagtccgccttatgaaacaagctataaaacaagtaacagcaatgttacaccaccataaacacagcaccctgaaagtcttattattgacttttctggggatgctatcgcaggctgtttatgcccaaaacaacttagatgaatttctatcgcttgtggagcaaaacaatcaagaacttaaagctgcatacaaactcatggaagcccaacaaatgggcttccaaacgggactaactcccgacaatccaagcataggctatggccatttcccaggaaaacaagaggacattggcaataaaaccacctatggtatcagtcagtcctttgactttccaacggtctattcggtacggaaaaaattggctaacgatcaaagccagttaagcgaatatgagtaccagctattccggcaagccaaattattagaagcccaactcggtttttaccagtatgcctacttgttgaaaaaacagcgcattctgcaaaaacgcctggagcatgctgaaaaactctaccaatcatatcagaccaagtttgaacgtggcaatgcttcggtgctagatgtcaacaaagctcgtattcaatacctaaaaaccaagagcaacaatcaattgctggctcaggagctaaatgctcagcaaagagacctacaactactttccggccaaacactggacaccttggttatcatatccagtgcaaaaaatgaactcccagcaatggaaaccattttgagtgatatgcaacagctacaacctgaggttcgctacctacaacaagcacaacaggttgccgacaggcaaattaagctggccaaacaaaactggctcccggagtttgagcttgcttacgaatcggaaaaagccggagatggcacttatcgtggggttcgcggaggcttatccattccactttggaaagacaaaaacaaggtaaagcaagccaaagcacaggctatttttgaggagcagcgctacagctctcgattaagttccttgataagtgaaacacaaaaacgctatacacaggccgaagagttaaacaaaatcagaaaagaatataaccaaacgctagaagaagccgccaacatcggctttttagacaaagcattgcgattaggacgtctttctgttatcgattattttaacgagttggctttttactatgaaacgattgacacagcgatggagatcgaaaataattatctccaaacgttggccaagctccaatcttataaactataacacaaatagataccgaggtatcatttcattaatcgtaattaatgtgtctaattcaagaaagactttctctatcaataaaaaaataaaataatatttctattttgcaggtctttagcaaccgggtagatgggagatgattagaaatgaaaaggactatgctgaataagactcaaccacaacatggctcaaacaagccagaagaggaaataagacaactcaaacaaaggttagaggaagaaattgccaaaaatgtcttgttggaagaacacattcaacacttacaagacgggcaaaaaagcaacctccctgccatgagtgaaaaacgtctgtcagcaatccaggactttgatagttttaatcacctttccatcccggcctgggaacaagattattcccaggttgcccaaagtatcaaagagcttcagagacaaggagtaaatagcctctcctcttactttgattcccatcaggatgagtttttcagattgctcaaacaaatcaaaatcattcatcacaacaaagaagctgaaatgtttacgcctaagaacaaggcgtatagctccttgcttgatctctaccatccggagtcctatcaaagtattttaaagcagttttattgcatccttcgtggagagtatcgcttagcgacagagcttccggtggagcttcccaacggcgaaaagcgctattacatcctcaaatggatcgccattgaacatcccattccctataaacgagttttagtttcgctcgtcaatattaccgaccgacatgcgatggaagaaaagctagctgaaacaaaccgccagctttcaaccttaataaaaaacctctccggcatcgtttatcagtgtaagaacgacagccactggaccatgcaataccttagcgataccgttcaggaagttaccggctattgtccggaacaactgctgttcaataaagatctggccttttctgatctagttcatgccgaagaccgggaagtagtcgagcaagagattcaagcagccattcaagctcatcgtcaattctcgattgaataccgaattaccacaaaaaaaggtgagacacgttggctttgggagcaaggtataggcattcagaaccaagcctcaaaagtagaaaccttagaaggctatattcttgatattactgaccgaaaacaatatgaagaagcactccagcaaagtgaagaaaagttcaaaaaagcttttcacgccagccccatggccatcatgcttacccgtgaacaagatggcagaataattgaggccaacgaaagctttacagagattaccggatggaccaaagaagaatacgaaggcaaaacaagcttggaactgggaatttggagcaatcccgctgatcgaatcgattatatcacgaccattcagcaagaaggcaaggtaaaagcccgggaatatcttattttcaaaaagtcggggcacctccggagtgtgctaatttccggctatccaatgcggcttggaaatgaccggattaccattgccaatatcacggacatcacagaacacaggcaagcccaacttaatctcaaaaatgaacgcactcaccttcgcacagtactcgaaaccattcccgacctgatctggctaaaagatccagatggggtttacctcaattgcaattaccaatttgaactgttttttggagcaagcgaggctgaaataattggtaaaaccgactatgattttatcagtaaagaactggccgatttctttcgagcaaacgatagattggctatgcgtaaaaaccaaaccaacactaacctggaatgggtcacctttgccagtgatggacatcgggcgctgcttgaaactgtaaaaaccccaatgcgcgacagccaaggcgcccttgttggcgtattaggaatcgcacgagacatcaccaaaaacaaactcaacgaggaagcacttaaagagagtgaagtcctttacaaggctattttcaataacacgggtacggccacttgcttgattgatgaaaaccgcaccttgattcttgttaatgaaaaatttgagcacttaagtggatactccagaaaagagctggagaacaaaatgaagtggaccgactttgtggtgcctgaagatttggagaagatgcaaaagcatcataacaatcgacgacaagcaccacaaaatgcccccaagcactatgagtttaccttcattgaccgcaaacaagccaagcatcacatctttctaaatatcgacatgattcccggcaccaatacatcagtggcctcactgctcgatgttagcgttcggatcaatgcgctgaatgagttgcggcaaagccacgaaaaatatcaaaacctggtagagaatatcaatgatatcatttacgagctggatgctgactggaacttcagctatatcagtcccagggtgcaagctataacaggttaccctccctctcattacctcggaaaatactttcttgaggtagtggctgagcgtgacaaagcagctgttgagaagcgttttgatggtttcctggaacaaaaggagaacttgccaattgagttcagagcaaaaacattggatgatcaaacggtttggctacgcatttcggttcgtccggttatcaaaaataaccacattattggcttgcgtggaatcggaagtgacgttacccgacaaaaacgaaccgagcaagaactcatcagagccaaggaagaagccgaagctgccgatcgcctaaaatctgctttcctggccactatgtcacacgaattacgaacaccactcaatgccatcattggtttcagccagctaatcgacgaagatttaccccccactgagatggttgatatggggaaaattattcactccagtggcaatcatttattgtcgatcatcgagtcaattttcgagttgaccatgcttcaatccaagcaaacgaaacttcgaattgagcattttaccgtccaagaaattggaaagagtctggagtttttcatgaaaagtgaactaaagaaatacgataaacaaagcatcaacttttctttctccggctttgatacaacaaaacagcccaacatccagtccgataaaaccaagctaacgcaattgctaacaaacctaatcagcaattcagttaagtattccaataagggtaaaattaccgtgggatgccaaaccaagaaaaaatccgtcgtcttctctgtgaaagatgagggtatcggaattgctcaagagatgcttgaggttatctttgaacgcttcaggcaagtagatgacagcagcacccggcgctatgagggtgttggacttggactttcaatttgcaaagaaattgcagaactgcttcaaggaaaaatatgggttgaatcagagccctcaaaaggctctaagttttattttgaactgcccttaaccccgaaaaaagaaacaaacacaagcgaaacttaaaaatcgatggtcaattgaataggaccttttgcaggctcttcaaagtttgagatggtgagccctaacaagcgaatccctttcacaaaaggagcttcgtgctgcaataattcggttgcatgcgtatgtaacaactctttcgaatgaaatagagtcagcagcgtcttactacgggtgatttgctcaaagtcggcaaacttaattttcagggtcagggtccggccatgtttctgcgctcgctccaaacgctgccacacttcatcttcaatggcttgcatcttggtctgtaaatcctccagcaaaaaataatcggtatcgaaggtacgctctgcccccagcgattttcgctcgcgcgatggcgtcaccggccggtcgtcattcccccgaacaatttgatagtaataagctcccgactttccgaactggcgaatcaactcctgcagctccagctttttcaaatcggcaccaaaataaatcccctgccgattgagcttttcagccgtcactttgccaatcccaaaaaacttccgcacctccagcttttccaggaaagcttcagcctcatcaggcgtaatcacaaacaggccatccggcttatcgacatccgaagctaccttggccaaaaacttgcaatacgaaactccggccgaagcaatcaagcccgtctcttccttgatgcgctgttttagttcacgagcaatgagcgtagccgatggttttcctttccgtgcaaaagtcacatccagaaaagcttcatccagtgacaaaggctctaccaggtcggtgtactcaaaaaagatctcccgaatttgctgactcacctttttatacttatcgaaattgctgcgtacaaaaatcaaatcggggcactttcgcttagctaccaccgaagccatagccgaatgaatcccataacgccgggcctcatagctggctgcggcaatcacccctcgctcatgatcgccaccaacaacgaccggtttcccgcgcaatgctggattatcacgctgctccaccgacgcataaaacgcatccatatccacatgtataatctttctcaatggtgtttccatggccaacttgtcaatacatgtaaaacctaaaatctgcaacaacgaagttttgtacagaattgaggtaaaagtatcgtttttgcccgaattacacgaaaaagccggtaaacaactctttcgaacgatcagctcccagcccaattcaacaaatcaaaggcgatgaggctcccctgctgaccattggggcaggagtttcgcctaaatgatcttaaaaccaaaatcattgccctactaatttaacgataaaatctccttcgttgtgaaaaagcgggggttcatcacgaaaaaaggctcgttcatgaaaaaaagatcgtttttgttcaccaatcatcaattagattgtaaattcatagatccattcaattatgaacactagctcatcgaaaaaaggtcagtcatacaggaaaggtcggtgttcctattaaagatagtttgatgattcgaaaacatacctgctaaaaataaaaactcccaccgaagcgggagtataggaatgttttccttcggcttatagccttattgtgataagatgtaaaacaaaattcgttctaatgttaacgaaggtaagaaataaaagacataaaaagcaaaccgaacaataaaaatttaaacctatggctaaaatactcggactggacctcggaactaacagcattggctgggcagtggttgatgcgacattaaaaaatggaaaagttgaagcttaccactccattatcgattcaggtgtacgcatttttcctgaagggatagaacccaccaccatcgggcagggagataaagaacaatcgaaaaatgccagccggcgggaacaccgacaaatgcgacgtcaattctatcgcaagaaaatccgaaaagccaaattactacaggtattgattgccctgaacatgtgcccactcacccaagagggcttggaccaatggagcaaatggaaaaaatcagaaaaaaccgaggggaaacagtttcccaaagaaccggaattcattgaatggctcaagctaaacccctacgagcttcgagccaaagccttaaccgaaccaatcagtcggactgaacttgggcgaattttctatcatttcattcagcggagaggcttcttaagcagccggaaaggcaacgaagaagggaaaatatttgagggcaaagatcacatgtcgggaattgaccaaaccagagccttaatgaatggccaaaccttgggaaaaacactctacgacatttctgacaagccaggagcaaagttcagtctaaaaaaagatccggaaggcaatgaattacgcgtaagagccagatacacccagcgagaaatgtatgtcgacgagtttctaagaatatgggaacaacaggcaaaacaacttggactggaccaacaaaaaatgcctttacaaaaaacacgtttcctaaaagggagtatggaaagtgcccgcaacgagcgtaaactcaaaagctatctgagcaaatacggacacgaacatgttcatgttattggcaataaggtcacaaccactgaagagattccactgaaagaatttctggcaggaaaaattgagatacttgatgggcaattaaaatttaaaagcaacgaaagcttgctgttctggcaacgtcccttgcgctctcagaaaggcttgctggataattgtcggttcgaaaataagctgcccgttattatgggaaatggccaattccgtaaaagtaagggcgaaatcattacccgaagtaaaaagccatgtcccctatctcaccccgagtttgaattattccgggcttatcaattcatcaacaatatcaaatatggcaaaggacaaagacttacacccgaccaacgccaagttgttatggacttgattaattccaaggacaccaacttcaactttgagctaatccccaaggccctgaatttgacttatgagaaattcaactacgacaacgaccaaaaggttgctgcaaatccaaccataaagaaactaaaaccgcttttctcaaaagaggtgtgggatacgcattatgaagagatctggcattgctttcacttttttgaggacaatgacaaattggttgcaaagcttgcaaaagactaccaactccaagcaatcgatcctgaaaaaatcgccaaaatacggctaaaggaggggtactccaatgtctccttgaaagccattcgaaacatcaatccctttctagaaaaaggatacccgtatagcgatgccgttgtgcttggagggatcaaaaatgcttttggcaaacgctggagttttttccaggttgatggttttattgagcgtctggaaaaagacattatccgtattctgcatgaagaaaataaagcaggagaagccattcaaaaaataaaagattacctggcagaacccgttaacagttatggttttgcaaaagatgatccttatttctcccaactttaccaccatagccaagaggtttcagaacaggaaaagcaagccaaggtgcccgaagtagaaaacttgcggaatccgattgtccaacaagctttgcacgaaatgcgccgcttggtgaataaactcttggtacagtatcgggaaaccgagcccgggttctccttcgaccgtattcatgttgaaatgggccgtaacctgaaaaacaacaagaccaaacgtcaggagctaacacgcaacatacgggataacgaacaaagaaatgatgaagcgcgagcacgattagccgagttcggactccgccccacccgagataatttgttgcgttacttgttatacgacgaaattcaaaaacacatttcggggccagtactttgtccatatacaaaaaaagttatcaaattaagcgatcttctgggaggaagtaataccgtccagattgagcatatgatccccttcagtgtttcattggacgacagctttggaaataaaaccctttgtgaagccaactttaaccggctaaaaggcgaaaagactccttatgagttttacctgacaaaccccgattacaaactatgggggattaacaaatacgacaatcccgaagacggctggaaagaaatagcagaacgtgcatttaaaatactcccttacttcaaagccaaacgttttacctcaaaaaaagaattcaagaccacggagtttatcgaaagacaattaaacgatagccgctacatcagccgaaaagccgttgaactcttgtctgctatttgcgatgatgtgagaatgcttcctggtcaggtaacagctgaactgcgacacctttggggcatcaacaacatcctgaacccaattgtcgggttcgaaaaattcaatccttcggttcgcgaacagcaacgcctgccttattatgttgttaccgatgaatccaatcaggttttagccattgagcggaaaaccaatgaacgaccaacagctcaaaagaatcaattgattttaacgggtcaagtcaacaaaaatgagttttcgtccaaataccttagcatgaagttggatgctcccaacctgaaagacgggagttactggatcgttgtcaatatttctgagcctcactccttccagcctgttttcgctcaaaagccagcttcgagcgaaaatcagcttgtgcttaaaggacgcattgaaaagcaagttttcaggaatgacaccattggtaaaaacatcaaaaatacgattacggagaacggtgcttattgggctagtttttcaatcaccggaaaagaatttaaactggctgagggaaaagggaaaataaaagccacaggctctaaaattgccttgtttggggagatcaaaaacggagaattctcttgtcatgtctatcaatgcgaaaccaacctgccggatggaaagtattgggtagtactggaacttgacttcgaacaagtggactatacccaagcggttaatccgaaaccggaggccagcgaaaagcaaatcttcagctatgcaacgatcgataacgaagggcttttagctgctgaccccgatccgggctaccaaaccaaaagcgcccagccggccggccgttattactgcctcttcaacatcaagtctgttgagccagaactttaccccttggaaaatgagcctccaaaacccgaaaaagggcagcgcctaacagaagcgactgtttgggttgacaaagcaaccggagaaattaagtacgatccaaagaaaaaccgggaagatcatcgtcatcatgccattgatgcaataaccgttgcacttaccgagcaaggctttttgcaacgcttaagcactcaccatgcgaaagaagagaatgccaaacgtggcttagacaacaccgagaaatttcccgagccatggtctggttttgccgaagatgtcaaaaaggtcgccgaatcaattttaatctctcacaaacaaaacaataaagtgttaaccaagatttcgaaaacaattaccaaaaacgggaagcaatacaaaagcgttggttttgcggcccgtggtcaattgcataaggaaaccgtatttggaaaacgacaagccccgggtcaatccacagaatcgtaccatatccggaaaccaattgtgggcttaaaagacaaaaagcagattaataaaattgttgatgataccatacgccagctgattctggatcacctaaaaaacaactgtggagttgatatttcgaaaccgaatttctcggttccgaaggatgctttcttccaggatgggcaagctcgcttgttcttacctaaccgaaaaggaggagagccagttcctattaaaaaggtaagaatgcgggaagttgtttcaaatgctgaacctttaaaaaaagacgttaatcaatacattaatcctcgcaacaaccaccatattcttgtttatgaacaagaagactcgtctctggataaagacgtagtatccttccttaaagttgttgaacgaaaattaaagggacagcccatctatcaacttccgcccgaaggagaaagtatagtttgtacgtttgaaacaaatgacatgtttttactcggattaacagaagatgaatatgatgtttacagggatgacaaagctgaattaagcaactatctatatcgggttcagaaaatagcaggaggaagttactttcttgaaatttgtttcaggaaccatactgattcgcgaaaagatcaggatgcaaaaccggattacaagtacatcaagggatttggctctggcacaacaggctggcatacactaaatccaatcaaagtaaccatcgactcactcggtcatatcaaacgaataaaataacccagtccttctaggtcttgaaaggtcttgaaggattcgtaaacaattgaaaaatacaggccaagcttttccaaagtttaacactttggaaaagctgaaccacctaaaaaaaacgtaacagcatgcaaaaaaccaggacggaatactggcaaccagagcaaagcatgatcttccggagcgaaacgctaaaatcggtggcgggagtgacgcaaaccaccgcgcctgagcctttcacctcggcgaaaagcaatttccggcagcggagagcaaaaaaccactgcgaaaagcctctttacctggttcaatgccttttcgctgcgggaataagcctatcgcagccaaataaacaggctccgctctggattagccatcccccattcaaacaatactcctgaaccttgggatacatcagaataccgcacagctcgtcccgcttcgttctgttttcccaaaatgttcccctcaaaactgctgtaccggcagactacgcaacactttcttatcattctcaaattattcctatgaatttttcaaaattatcaatcgacgagattttgtttcagtcaagcattcgaatcaacaacagccttggcgattcaaaaattctgaacgctgtttcacccatgggttatcccgagcccaaactcaacgagggcaaaaccttactagacgaagtaagcagcctggttcaaaaccagcaaaaggagtacggcgagctggatgccgcccaggaaacctttacagtagaaaagcaaaaagccaacgaaacctacaaaaacatggtggctattggacgcattgcttttaagactgatgttcaggcaacaaccacgcttgagcttaatggtcgacgtgcttccacgcacagtggctggctgaaacaaacgcagggattttaccgtgccctgctggccaacgaaagctggaaggcggccatggccaactacggacaaaccgaagaaaaactaacagccgaaattgcggctattgaaagcgtggcagccgcctcggaaaacgttcgaaaagaaatgggcgatgcccaaaatgccacccagcaacgcgaccaaaaagtggaagaactggctgactggataaacgattacgaagtcattgcccgcattgccctggccgataaaccccagctactcgaaaaaatcggcatcgtggtgaaaggctaagtccctatttaatccttcaaggtttttggaaaccttgaaggattaaaacagatcgaaaaaagaaaaaaccgatgagcatacctcctctcgaacacaatcacttttaccacatctacaaccgtggaataaacagctgtaacctgtttcaggagaacaccaactacgagtatttcctttcactttatgcgaaatacatttcaccggtagccaatacctatgcctgggtattaatgaggaatcattttcatctgctggtaaaaatcaaaggagaggacgaaattcaggcgttttttcagcaccttcaaggtatcaaaaaccttgaaggtttgaaaggaaccaaccgaacccgagtaaaccaacagttttcaaacctgttcaatgcctacaccaaggcttataacaagcgttattcgcgtaccggaagcttattcgaacatcctttccgaagaataaaaatcgaatcgaatgcccatctgaagtacctggtctattacattcatcacaatcccattcaccatggtttttgcgaacactttctcgaatatccatggagttcttacctaagcatgctgtcgccaaaaacaacaaacctcaagcgcgcagaagtgctggaatggtatcgtaacaagaaaaacctggttcaacaccatacgaaagagcagcttgaaaagtataacgaccttaaaattgaacgaagtaatgattggtgattgtagcaatcttttccaaagttcgaaactttggaaaaggtcatcccaaatccaaaaaccaaaaaaccatgctcaaacgaaccttattcttttccagtccctattatttaagtttgaaggactgccagttggtggcgcagtcgaaagaccagttgaccaacaaaaccattccggttgaagatattggctttatcgtgctcgaccatccacaaatcagttttagtatgaaactggtggaacagttgaatgccaataatgtggccctggtgttttgcgacagcaagcacatgccctcctccatgttgctcaacctcgaaagccatagtttacaaagcgaattgtttcgggcacaaatcaatgcttcggaaccgcttaaaaagaacctgtggaaacaaaccatcgaagccaaaatacgcaaccaggccgctcacctcgaaaagcaaggccataaagcccacgagctgcgtgcttatgccaaaagcgtaaagagtggcgacctggaaaaccgcgaaggactggccgcacgcatctattggagccggctgattgggcagggcttttaccgcgaccgttacggcgatccgcccaaccacttacttaactatggctacatcctgctacgctcggccgttgcccgtgccctggtgggttccggcctcttgcccaccctgggcatccatcaccacaacaagtacaacgccttttgcctggccgacgacatcatggaaccttaccgcccgtttgtcgatcagctggccttagcggtttatggcgattaccccgatgaattattcctgaacaaagaaatgaaagcccggatgctgagcctgatggctggcgatgtgtggctggacggcaccaagcacccgttgatggtcgcactctcgcaaaccaccgcctcgctaggccggtgtttcaatggcgaaaaccgaaaagttgtctatcctcaatttaactagccagatcttcaaggttttcaaaaccttgaagatcttaaagagacctcatggaacaaacccgtttaaatgcctatcatatcatgtggttatttgtctttttcgacctgcccgtgacctctaaaaaggaacgccggcaagccacccgatttcggaaagacctgatgaaagacggcttttcgatgatgcaattctcggtctacatccgccattgtgccagtcgcgaaagtgccgaggtacacctcaagcgcgtgaaggattttgtgcccgaaaaaggacaggtcagcatcctggctgttaccgacaaacaatacgggagcatcgccaactattggggcaagaaagatgatcctttgcctgaaggccccaaacaactggaaatgttttaagcgcccttttcgaaaggctgaagctttgggaaaacaataaaagagcgtaacttccccaatccgttcattgacatattggctttttcgtgttagttttgaaccgataggattaaaaaaaccgtgcatccaaccacttctttggtgtaaaccaggcatttttcttcttgaaaaatcgccgtaaacccccatcaacaaaggggataaaagcccaaggttgtggtttgatgtaaaacaactaagacttacaacccctaatttgaacctgagggtaacatccccgttgtggtttgatgtaaaacaactaagacttacaactggtaaaggtcgtataatcgagacatataagttgtggtttgatgtaaaacaactaagacttacaactcaactggctacacggttaaagggttgactgttgtggtttgatgtaaaacaactaagacttacaacagcgtagccaaagatatgcgagatgacttggttgtggtttgatgtaaaacaactaagacttacaacataatagcaaaaatcattgaccagctcacggttgtggtttgatgtaaaacaactaagacttacaactgccttcaaattattaaaacactgaacatagttgtggtttgatgtaaaacaactaagacttacaaccccaaagcggtttgttataaaccggcccgtagttgtggtttgatgtaaaacaactaagacttacaacctccctcgacagggggaatgccaacgccaggttgtggtttgatgtaaaacaactaagacttacaactgaaattgtacacatcaattatgacttttggttgtagtttgatgtaaaacaactaagacttacaaccaacagttgaagagccaaaacaagagatggttgtggtttgatgtaaaacaactaagacttacaacaagcttgagcatttagttcaatcggcttaggttgtggtttgatgtaaaacaactaagacttacaacatccaggagatcaaacatatcttctggcatgttgtggtttgatgtaaaacaactaagacttacaacagaggcgttctgcttctccatcaggttgtagttgtggtttgatgtaaaacaactaagacttacaaccagtatgtcattcaataaaacacaggttgagttgtggtttgatgtaaaacaactaagacttacaaccttgctgaccggatcccaggcatgtgcattgttgtggtttgatgtaaaacaactaagacttacaacgtaggcaaattggttgacgaagaaattgacgttgtggtttgatgtaaaacaactaagacttacaacgacgaggcaagaaaggacaactagatccgcgttgtggtttgatgtaaaacaactaagacttacaacacccgattaatcgtaaaaacctctccacggttgtggtttgatgtaaaacaactaagacttacaactttaaggcagttggccacataaccaacgacgttgtggtttgatgtaaaacaactaagacttacaaccggcatccaatggcgaagcttacgagctaagttgtggtttgatgtaaaacaactaagacttacaacgtattccagcacattccacgagaggtaactgttgtggtttgatgtaaaacaactaagacttacaacatgaactcattacgttgaactaactactttgttgtggtttgatgtaaaacaactaagacttacaaccgttaacaaagtgtttatgccatgccagtagttgtggtttgatgtaaaacaactaagacttacaactttctcacgcctgatgaagcatagcgatctgttgtggtttgatgtaaaacaactaagacttacaaccagtattaggcgtattggtcaccttgttttgttgtggtttgatgtaaaacaactaagacttacaacttgcccttgcagacacagggcgtttccgccgttgtggtttgatgtaaaacagctaacgcttacaaccgcgaccaggttgaattggatttcttcgcagttgtggtttgatgtaaaacagctaacgcttacaacagagaggtggaatcaaaccaccgaccgggttgtggtttgatgtaaaacagctaacgcttacaacttattcaacttcgccaaattggagctcacagttgtggtttgatgtaaaacagctaacgcttacaacagcaggagaaagcacagaaagcacaagcaggttgtggtttgatgtaaaacagctaacgcttacaactggatgttgagaaatgtgaggccaacaattgttgtggtttgatgtaaaacagctaacgcttacaacttattcaacttcgccaaattggagctcacagttgtggtttgatgtaaaacagctaacgcttacaacagcaggagaaagcacagaaagcacaagcaggttgtggtttgatgtaaaacagctaacgcttacaactagtgctcctgactttgtcgatgggaacctgttgtggtttgatgtaaaacagctaacgcttacaaccaatgcatgaattacaatgataattggattgttgtggtttgatgtaaaacagctaacgcttacaacgtattaaaaaactgacattcagcacgtagagttgtgatttgatgtaaaacagctaacgcttacaacgtagagcgtaaacaaacgtgacgcacgggagttgtggtttgatgtaaaacagctatcgcatacaacagcagggctttttgtgtattggtgcaataggttgtggtttgatgtaaaacagctaagacttacaacagggatattttgcagtcaatactttcggataaatctgaggtcaacacctcgcgggcgatggggacagcagaggctggacaacagcgaaagtatttgatcaacccgcaaaagaccggtcaagcattagtacgatcgattaatggctcaccggtccttgatggtgttgcgccccgttgcattcaaactgcagggtaatgtgttcaatgccgaattcatctttcaggatatgtgtcaacgcctgattgatggcttcggtttccgacagtttcaggtcgtgctgaataaccacatgcccttcaaagtgaatggttttatcggttagccgccaaatatggatatgatacacccgctccacagcctcctgccgggtcagccgggcagcaatctccgcaggcacaagatggtcgggagcaaactgcatcaaaatttcggttgattctttcagcagcttataggtatgaaacagcaggtacaggctaatcaacaaggttaccgttgggtcaatccaataccaatcccacagccaaatgcagactgatccggcaataactgccagcgaggttaaggcatcccccatcaggtggaggtaggctgcacgaatattcaaattccgatgttggtcggcatgcaacagaaaaaccgaaaagccattggccaccaggcccagcattcccaaccagaacatccaccgaaaatcaatcacatggggatcaacatagcgtttgatggcttccaccatcaggtaaaaggaaatggcaatcagaataagtgcattgataaaggctgccagaatttctgctcgtttaaagccaaaggtgcttttagccgttcgttcccgatgtcccaagcgatcggcaacataggccagcaccaccgcaacaccatcactcagattgtgcagggcatccgaaatcagcgccaaactccccgaaattaacccaccaatgacctgcgctaaggtaataaccacgttcagggcaatcgtaatccccagtcgttggtgcgtatgcatatgattatgagccataattccttgattaaaataaagtttatacctttaatagcgtattcttttaaaggatgaacctcaatgaaagtataaaaatacaaagcaataactacaaaccagaacaaataaacccataagcagatgaaacttttcttacagtttaccttgattcttttgggcacggtatccacaccaaccgccttcgcacaaaaaaccataatcgatttgtacgaattgtataaaggaagaaaccacctagaaccagcaaatcgtgagaaaagttatgcggatgttgccggttcaccctacgctcagcaagattttattatcggctccgtggtgttaaaaaatggcgacacctacgaggccgttccgctgcgctacaatgcctatgaggaccaaattgaatttaaacatcccaatggcgttgtgctaaacctgaataatcccaataaactaaagctagttacaattggccaacagcaatatacctacttcgaaaaagcagagacaccccccgacggccttacgggctacttcgaattgctggaaaacggcgagattcagctgttaaaaaggcaaaatattatccttgaaaaagcggctccggcgaaagcctaccaggatcccaagccagcacactttaaggaacgccccaccgattattatatccattaccagaaccaactgtttaaagtaaacagtaaaaagcaatttttcacgacattcccaagcctggagaaagatttaaaacccttcattaaaaagcaaaaactcaagttccggcaagaagaagatcttcgccggatcatcaatcaagcaaaccagctttagcaaaccgcttcgccgagcttgcttttaagctcaagaccattatttttgcatcccatcagcaacgaacttaaggcgctgattctgggctacattcagtggcatcgtgccatttgcaataaatattttagtaagaatgcgctcttttgatgcaacaaattaattttcgttgccgtctttcagtcagaaacaacaataatcttggaagcactttacaaaaatatccatcaagatgtgattgaccgctgcagagcaggcgaacgagatgctcaattccagttgtataaattgtactataaatcgatgtacaacaccagtttgcgcatagccggtaatgcaaccgatgctgaagatattatgcaagaagcttttttaagtgctttcaagaaaatggacacctactccggacaagtaagttttggagcctggctcaaaaagattgttgtgaaccgttctttggaccatctgaaaaaaaagaaagttcattttgaagaactggatgaacgcgtaactgaagaagttgaaaatccgttgatggaaattcgtgaagtggatatcagtaaaataaaagaagccattttccaacttccggaaggttaccgggtagtccttagcctctacctgcttgaaggttacgaccatgatgagatttcagagatactgaacatcagcaattcctcatcgcgatcgcaactgttgcgggccaaacgtaaattacgcgaacgtttattaaaagatgaagttttttcaatcaactaaataccggatattatgaacgatttattggagaagacaattcgggaaaacaagcaagctttggaagaagatgcccccctgggacacttcgagcgatttgaagccaaactggatcaggagttacaccataaaaaacgattcaatagaaatatttacctgcaactagctgctgctgtcgtgtttgctcttttgctcggcaaccagctacggatgtatttctcaacagaaaaagaagtagctcccgtaaccttggcctccgtatcggaagaatatggtgaagtggaattctatttcacctcatcgatcgaccaaagcatgcaacaatgggaaaaactgattgccgatggttatatatcagaagccaaccagcaaatgatgacaaaggaaatgaaggagtttgaccaaatggaagcacaacttcagcaagagctccaggccaatcccgacgatgaacgagtcatcaatgccatgttggaatattaccaggccaaactaagcgtaattacgctgatcatagacaaactgaaagaagtgaaacaacaaaaaataaccgataatgaaactcaagtttaagttactattcatgctggcgatggtattttcgctggctgccaatgcccaggagtacacccgggaagaacacagtgcttttttgaaatcgcaaattcaagcactcgatgtcaccaataaatttggaaccatcacgattaacgattttggaggtgactcagtcgttgtagatgtgcgtattactgtagaacacacggttgagaaaaaagcagaatttctgcttgatcagatcaagattagcactcgtcgtgtaggacaagagctgcaagtggaaacggtcatcaacgacaatttcaaaaccaaacgaaatttctccattgattacacgatcaatattcctgccgaccgcgacctgaaagtgaccaacaagtttggacacgtggtgttaaataacctggctgcaaacggaagctttaaccttagctatggtaacctaagtgcaaatgacttagcggctccggctggcaataaaatcaggcttaatctggactatgggaaagccgacattgaatcggtcaaccacctcgttactgaaattaagtactccaaactattcattggtgaggctgggactgtgcaagccgaaaccaagtactccggcctcaacatcgaagaagccgatgagcttgatctggaatcgaaatacgatggggtgaatatcgaagaaataaaaagcttaagagcaaactccaagtacaccaactatgacattgaagagctaaagcaacgcctgatgcttgacacgcaatacggctccgtgagagttgaagaggttggtgaaaactttgaacacattgaaatcaccaatagctacggtggactcgaaattggtctggatgatgcggat

SEQ ID NO: 409 - DNA, 24563 bp, synthetic construct
  variation 16088..16614: note = n is a, c, g, or t
  misc_feature 1..24563: note = Synthetic
  source 1..24563: mol_type = other DNA
tcgaactctacgacagcgaaggcaatcttactgaaataaaccatgcgggcatggctatgatgggcgtcacggacaagaaaaacatgctgggaataaacatttttcagaatcccaacatccccgatgacatgaaagaccgcctgcggcaaggggaaaacgtacgcttcaccgtgggctacgacttcagtctggcaagggaaaaatactatcccaccacccatacgggcgtgcgccacctggaaatcaccgtctcggtggtaaagcaaaacaacggcggaatcgacaaatgccttccgggcaggatgcaatgaatacctcgtcaagcccatcgataaagcccgcctgatggccgtgctccgcaaattctgccgcaatgtccccggcctcccggaaggataatccctccgcaaagaccgcccggaaaccggcattgacgggtttgcctcacaacgtattctgcaacgggggctataaatcttaccagattcagaaactgactttcacccaagcgatcagaacacccaacaccagtgcatttacggcaattacgggaaccgatttacgctctttttcggccactaacaccagcacaggcaaagccatggccaaagagacaagagctccttccaaccaccaagacagcccaggcagatggatatgaaaaatcacaatcgcaacgacgacatattgaataaaagcagaaagacacgaggccttaggaaactttttcaacaacataggtattacatccactcctccagcaacaagcccggtacctaaagacaaccaaaagtgattcattgtattcaagttttaattacactcttatttcaatttttttactcgcctgtaaatgttacgtctactccctgcctcttcctgaaatccggcttcggaatcctcctttaccttccctcccggatccgcaaccacccaacgcttcatttatttcatccgtcataaaaatcttgtctcagaattccaaaatgtagcaaaggtaaatattaatccaatacttcaattcaagaactaaatttattatttatatttaaaaaaagtatttttcattaaaatacaaccaatccggattaactttgcatccaaatcaaaaacagaacaataaaataccgacaaacatggacattcaggaaaaagcagcgcaaatagtcgctacggcacagatcgtcacactggcttcgatagacgaaaacggctatccgcgcccggtggcaatggtaaaactcaaagacgaggacggtgcaatctacgtctcgaccggaacaagttcggcaaagacagcccattttagggacaatcccaaagcagggatctcaattgtaaaaggcagcgacagcgtcgtttacaccggcgaaatagagatcgtaacggatgaggcgataaaacgctctctctggagcgactggatgctgcctcatttccccgggggagtggaagacccggaatactgtgtattgaaattcaccccggaatcagcaacctattggatcgacaacgtatttgtaaaaaatgagcaatatatgaatctgttttgccaaagctgcggcatgccgatgcgaactccggaccaattcggaacaaataaagacggttccgtcaatgaggattattgctgctattgctataaagagggggcattcctccaagattgtacaatggaggggatgatcgaacattgcattcagtttctcgatgaattcaacggggcttgtgatagccggtattcgaaagaagaagcgattgctcagatgaaagcctattttccccggctcaaacgatgggcaaaataaaagcacagtgacctaaagcccccggctccgtgatttaccggaatatccaggcaggtaaaagccccggtaatcggtaacccctgaaactccggtgccgggggctgttgtaaaaacaccggccctttcctcatcgatacattattatttttccctatctttctaaacaagacggcagccaggtgcatcctgccacgaagaaaatgatccgcctgtccgtttggaaacaggtgaagtgcagggtgaaagtgccggaacctcaacttttcgttcgtgaaggcaggaaactgaaaacggttgcagtatataccccaatatgccgggccgctatgaccccctgtatccttcggaaccgcctgagaacaagagaagctgaccgctttttcctacgaagaactccattaccagcccacatccaccctagtaatcacggggatgggcaaatgtgcacacatttgccccgtccccctgtgttatcccctcgtaaaccattccttaaactcagcgacgcggactttactgaccagaatcttctccgccacaggaacggtcaggttgacggacagacggctgttgaaccacaggtcgatgtctttaatagcacggcgggcaatcagatactggcggttgacccggaaaaacgtagcaggaggcagggaatcggctatttcgtccagcgtctgcgacagggcgtattccctcccatccgttacggcttttacattcccgtcggtgatgtagaaataatatacggcatccaccgccagcggcagtaatttatctcctttctgggggatcaggaaatgcgttttataatgttcctgctgtttcaatgcctgtaaaagtccctgcaaaccggcttccggcatccggtcagccgattgttcccccctcaggcattccagtttccgaagtgcattccgtacgtcttcggcagcaatgggtttcagcaaataatccacgctattcaccttaaaagctttcagggcatattcatcgtatgccgtcgtgaaaatcaggggacaacggatctccacatgctggaaaatctcaaaagccgaaccgtccgccagatggatatccataaataccaggtcgggctgcggttgcacacgaaaccagtcgatgctctcggcaatactgtccaaagccgtcaccacctcgatttcgggcgccacctccgacagcaaagccatcagattacgcacggccgctttttcatcttcaacaattaccgctttcatacgtttatcattttattttcagtacccatatagccccttattttttaggtataccaaagtacccagagtttcataacaaaggtattttcacacaaaaaacatcccctgtcttttccactacaatctgctgctgaaacagcagttcatagcgtttgttcaggttcgccagcccgattccggtggtcgactccccggtcatcttcggctgaatacggttgcatacactcagccactcccccccttcagtgcggatggtgatgaccaaaggacggcggttgctgatctcattatgtttaatcgcattttctatcaacaactgcacggccatcggtggcacctgcttatcgcggagctgttcgtctaccctgatctcaaaccggaggttatcctcataacgcatcagttggaggaaaatataagcgttcacaaactccatttctcctgacaaaggcactttttgggtatcattaccctgcaaggtataacgcaatacccgagataattcctgtatatattcctgcgccttatcctgtgattcacgcaccagtgaacgcagcgtattcagcgaattgaacagcatatgcggatttaactggtttttcagagcttcgtattgattctgtaaattttcagcccgcaattgctcgttttcgagctgataggattgctgacggcgcaccagataaatgatgtaacaactgcccgtaacaatgcaggtaatgataaaatccctgagcggatgcaggtaatgatgcgccagtgcatcaatagccggaatgtcgaaatgttgatgcagataaataaaaaaacgccccagaccgctgctcagtatccaggtgaccacaaatgaaaaagcgatacgacccacccctgttttcatcccctttgtgccgaacctgaaaatcaaagcgttgacggcaaacaggatcaacagggaaataaaggtaaacccgatctcaaaccccacatcctgcggtttcatacccgggaaaaggctgaacggctcgtaagtaacgaacagtgagatcagctccgggaaatgaatcaacgaagccaccgtcgctgagataattacaataatcagcaggaaacgactttgaaaaagaggactgtataatttcataaatacgacatcggaattaattacacatcttacccggactgataaaccggaatcaaggaattacgaaattatcaaataagtcgggagacttacaaaaatacgatttatttcttttcctgatgcaggatccgggccgtcacatacattccgggccggaaaagctcttcctgagcgtccacccgggcatagatttccagtgaacgactggcttcgtccacctgctgcccgacagaaaccaaggtagcacggaacacttgcgctccgatcccgtttaccgtaaattcgacagtatccccgttgtggatattcgacaaatctttctcataagccaccaaacgcagcatcgtgcgatccttgttgatcacgtcgcaaagggcttccccggcagcaatgtgcttcccggcattgatccgcacattacccacatacccgtcaatcggggaaagtacctccaggtaaggccgtatgcctcccgtcagtaaaacagacggctggacccccagtaactgtaattgcgccgcagtggcctgctcccgacttttcattgacaggtattccgccttagcctgctgcaattttttctgtgatgctgcctgttctttggataatgccagctggcggttgtactcggcttccagatattccaattgtgcatgactatccagataattctgctgcaaatcaataaaatcagggttttcaagcgtcaccaacaattgtccttttttcaccgccataccggaaagcaatttactgctcttcaccgttccgcccatgaccatcgtcacggtagcctgatactccggcggcaccaccagcgtcccgttgaacagcacctcattgggtttagaagtggcagaactatacgcatccgcctcttctgtttcttctatttgctcaaccacaacaaccgtatctgccgaagtcaccgcctcagcaacggaattatttttagcatccttgcatcctgcaacagctaatacgatcagggggataaatatttttttcatggttagattgtttcaaacattgagttctacatcaaaattagttatatatttcaagaatgtgataatttgaattgccgaaatacagcttattttattcaaaactattcaataagtcaacggaattatctataaagttcatactccaaggctgccacattatactgatacaccgcctcgatatacccgcgtttaatctcccggacagcattcaggctctggatatactccgtgatatcagtttcactttcgcggaacatcaggtcggccgctttcatcaactcctccgcttctttcaaggcagacatacggtaatagcgaatactctcgccgtacttgttcaactgaatccgcagttccccgaccttatggtccagttcacggatactgcggtccgtctcgatccggctgatattggcagcaatgcgcgcctgccggatcttactgcgctgagggacaaaatacaaggggaaagaagctccgaccatccacgaattcaatcccctgagtggccgtatatcctggcgcacatagccaaacgacagttccgggaaaaaacggctgcgctctactttcagcatagcaattttttcatcggtgaggctactaaaataattccggtaagcttcacccccaactgccggcaatgaatctactgcaagcatcgataattccggttgcgcaggctctatgggggaatccgaataacaggcccattgtaaacgacgggccgctaccctcaactcctcctgtgcctgaaacaaacgggtccgcatatccgctgccagcgtcgaagtcatacttttctccaacagggtaatctccccctgctcgtaacgcaactccccggcatgctgcaaacgatccgccagttccaactgttcccggtacaaagccagcgtatgcatcgcatatacataataactccatgcccgtttcgcctcggcccgcacctctttttccaccaatacggcataattccgcccggtttccacctgccgcttcaccaaagcattcttataaaaaggagtcagcaacgaccccaggctttgggccacctctatctgataatcgtcccggccttctccgttcagctgtccccacgaataactgaattccgtagcaggcaattccgccacttccccgcgacccgcccggctcatctcaatctgcgattcggcaatctgcaaacggggactgtttttcaccgccaacgccaccacctgttctaacgtcaaccgttgtacgcctgtctccgtctgctgcacaccttccgggaaaaccccaccattcgccttctcttccgctacctgcaaaacttcccggttcactccaccatcctcctgggcctgtacaactcccggcaacaccagcagcaacaccaccgcgccaattccgaaaaagcgcctgaaatgcccccttttcaacaaaacagccgaattgacaatctgataaaatataggaataataatcagcgtgagtatcgtggagacaatcaatccgccgatcaccaccgttgccaacgggcgctgtacctctgctccggccgaagtggcaatagccatcggcacaaatcccagcgaagccactaatccggtcaggaacaccggacgcagcaaatgaggcgtgctctcctgaatcaccacccgcgtggacttttggtaacgcccttccttgcggcattccgtaaaacggttgatcatcaggataccgttaagcaccgcaacaccgaacagcgcgataaacccgactccggccgaaatgctaaacggcaggccgcgcacccacaaggccagtatgccaccgatcaacgacaggggaaccgtactaaacaccactagcgtatacgtgatgctccggaaagcaaaaaacaacagcagcaagatcagcgacaatgccacagggatcacaatcagcaacgtactgattgcattctgcaggttctcaaactgtccgccgtattcaaaataatagccgggtttcaaccgtatattccggtccagcgtctcctggatctgtgccaccacctgctgtatatccgcatcccgcacattcaccccgatcacaatgcgccgcttggtggcatcgcggttaatctgcaaaggcccgttcaccaattctatggcagccacctcactcagcggcaactgcatcccttcggaagtgtgtacaaacaacttatctatattgaaatcggccactttatccttatccaggcggaccaccaggtcgaaccgccgttcgttttcaaacaccaccccggcaatctccccggcataggccgtacggatcaccgtattcagctcgctgatgttaatgccgtagcgggccagcttatcccggtcgtatttcaccaccaactgcggcaatcccatcgtctgctccacaatcacatccgatgcccccggaattttctccacatacgcagccgcctttttcgcctgggcatacaattcgtccacatcttcaccataaagtttcacggcaatatccgccttagcccccgtcatcaactcattgaaccgcaattgtataggctggctgaaattaaactccgccatcttttccagaggttccagcgcctgtttcatcttttcgaccatttcggcacggcttcccgcactcgtccattcgtcaaacggcttcatgataatcatcacatcggcatcctccaccgccatcgggtccgtaggcacttccgccgtcccgatcttcgccaccacatgccggatctccggaaactgcttcatcaggatctcctgcgcctgccccgaaagctctatgctattgctcagcgaactgcctgccgggagcgtcatctgcatcgcaaaatcgccctcgtccatcgtcgggataaactctgcccccaaacgggtgaacaaaaacaggctacccaccaaagccgagaaagccacggcaacggtactccatttaaaacgcagacaaaaacacaaagcccggtggtacaccttgttcagtccctcaaaaaaacggtctccccaggtgcggctcgcccggatttcctttttcaggaacagcgaagccatcatcggcacataggtcagtgacaggaataaagccccgacgatacagaacaccagcgtcttggccatcggtgtaaagtatttcccttcaatacccgtcagggtcagtatcgggaaaaatacgatcaggataatcagcaccgcaaaagtcgccgagcgcaccacactcccagctccccgggctacttcggcatccatttctgcctgagtcaaatggcgtccccggaactgccggctgtatatatgggccaatatgccttccagaatcacaatagaaccgtcgaccacaataccgaagtccaccgcccccaaactcatcaggttggccgacaccccgaacacccgcatcaggataaacgcaaacagcatcgccagcgggatcaccgaagccacaatcaacccaccccgcagattccccaggaaaaagatcagcaccaggaacacaatcaccgccccgtcgatcaggttggagatcaccgtcgaaatattccggttcaccagggccgaacggttcaggtaaggctctatggaaaccccttcgggcaatatcttctgcaatttctccacccgttgctccagctccttcgtcaccacattcgcatttgcccctttcagcatcatcgcaatcccgccgacacattcccccttcccgtccatcgtcattgccccgaaacgcttgggtgccccgaaacgtacctcggccacatcatttacgtggataggtatcccgttccggttcaccaccacgatattctcaatatccctgagcgtgccgatcatcccttccgaacggatataataagcatgattcaccttctcgatgtagctgcccccggtattctggttattattcgtcaaggcatcatacacctcgctgatggtgatattcagagaatacaaagcagccgggtccaccgccacctcatattgcttcagataaccgccgaaactgttgatctccacaatccccggaatacccgaaagctgccgtttcacaatccaatcctggatcgtgcgcagctccatcgcatcgtatttccgctcataccccggagccacccgcaggatatactgatagatctcccccagccccgttgtaatcggcatcagctcgggcgttcccagttccggcgggatctccccggccaccgcctgaatctgctcgttgatcagttgccgcgcatccagggtcggcactttctcattaaacaccaccgtgaccagtgacaacccgaaacgcgacacggaacggatctcctccacattcattatattgctcatggcaatctctattggcgaagtaatcaattgctccacctcctgcggtgccagtgtcggcgaaaccgtcacaatctgcacctgattattcgtaatatcaggcacggcatccaccggcaaagtcagcatcgcataaattcccccaatgagcaggaacaaagtcgtcagtcccacaaacaacttgttcttaatcgaaaagtgtacaatagcatgaaacatcgttaatccttttataatttctgtaacaaatgtatcattatacgaaaaaacaccccccaggaatccattcaaccggaaatttttacccttgaaatgacaaaaagtaaagttaaagaaaacaccggggcaaatgtgcacacaattgccccggccccaagattaaaataaaaaactcccaccgaagcgggagtataggattacatccttcggcatatagccttgctgtgataagatgtaaaaattgatttgtttaatcaacgaaacaaatttacacaaccgtttgcaaaatcaaaatattttacagaattttaacggaattaatttacgtatagtaaactaccaacttatggaaaccactttaggcattgatttaggtaccaatagtatcggtctggcattagtcgatcaggaagaacatcaaatcctatactccggtgtccgcatatttccggaagggatcaacaaagataccatcggactaggggaaaaagaagaatcccggaatgccacccgaagggccaaaagacaaatgcgccgccaatatttccggaaaaaattacggaaggccaaactcctggaactcctcattgcctacgatatgtgtcccctaaagccggaagacgtccgccggtggaaaaactgggacaaacagcagaaatcgactgtccggcaatttccggacacccccgcattccgggaatggttaaaacaaaatccttacgaactgcgcaagcaagccgtaacagaagatgttacccgcccggaactaggacgtatactttatcagatgatccaaagaagaggttttctgagcagccgcaaaggaaaagaagagggaaaaatattcactggaaaagaccggatggtaggtatcgatgagacccggaaaaatttacaaaaacagaccttgggagcttatctgtatgacatcgctcccaaaaacggtgaaaaataccggttccgtactgaaagggtcagggcccgttataccttacgggatatgtatatccgggaatttgaaatcatctggcaaagacaagccggacatctaggccttgcccacgaacaagccacccggaaaaagaatattttcctggaaggctctgctacaaacgtccggaatagcaaactgattacacatttacaggccaaatacgggcgaggccatgtccttatcgaagatacgcggatcacggttaccttccaattgcctttgaaagaagtattgggaggaaaaattgaaatagaggaagaacagctaaaattcaaatccaacgaaagcgttctgttctggcaacgcccgcttcgctcccagaaatccttgctctccaaatgtgtctttgaaggaaggaatttctacgatccggtccaccaaaaatggatcattgccggaccaacccctgcccccctctcccatcccgaattcgaagagttccgggcctatcaatttatcaataatattatttacgggaaaaacgagcacctgactgccatacaacgcgaagccgtattcgaactgatgtgcaccgaaagcaaggatttcaactttgaaaaaatccccaaacacctgaaactatttgaaaaattcaatttcgacgacaccaccaaagttccggcttgtacgaccatcagccagctccggaagttatttccccaccctgtctgggaagaaaaacgggaagagatctggcactgcttctatttttacgacgacaatacattgctttttgaaaaattgcaaaaagattatgcactgcaaaccaacgacctcgaaaaaataaagaaaataaggctgagtgagagctacggaaatgtttccctgaaagcaatccgccgcattaatccttatctgaaaaaaggatacgcttacagtaccgctgtcctcctcggcggcatccgcaatagtttcgggaaacgcttcgaatatttcaaagaatacgaaccggaaatagaaaaagcggtatgccgtatcctgaaagaaaaaaatgctgaaggggaagttatccggaaaatcaaagactacctggtccacaaccgtttcggcttcgcaaaaaacgaccgggcatttcaaaagctctaccaccacagtcaggcgatcacgacgcaagcacaaaaagagcgtttacctgaaacgggaaacctgcgcaatcccattgtccagcagggtttgaatgaattaagacgaacggtaaacaaactattggcaacctgccgggaaaaatacggtccctcgttcaaattcgaccatatccacgtagagatgggccgggaactccggagctccaaaacggaacgggaaaagcaaagccggcaaatccgcgaaaacgaaaagaaaaatgaggcagcaaaggtaaagttagcagaatacggactaaaggcctaccgggataacattcaaaaatatttactatacaaagagatagaagaaaaaggaggtacggtttgttgcccctataccgggaagacgctcaacatctcccatacgttgggaagtgacaattcggtccagatcgaacatatcatcccttacagtatttcgttggacgacagccttgccaataaaaccctttgcgacgccacctttaaccgggagaaaggcgagctcaccccctacgatttctatcagaaagatccgtctcctgaaaaatggggagccagcagctgggaagaaattgaagaccgggctttccgactcttaccctatgccaaagcacaacgcttcatcagacggaaaccacaggaatctaatgaatttatttccaggcaattgaatgacacccgctatattagcaaaaaagctgtagaatatttatctgccatctgtagtgatgtcaaggcttttcccggacaactgaccgcagaactccggcatctctggggattgaacaatattctgcaatccgctccggacatcactttccctttgcctgtttccgccaccgaaaaccacagggaatactatgtcatcacaaacgaacagaacgaagtcatccgtttatttcccaaacaaggggaaacaccacgaactgaaaaaggggaactattactgacaggcgaggtagaacgtaaagtatttagatgcaaaggtatgcaggaatttcaaaccgatgtcagtgacgggaagtactggcgccggataaaactgtcttcctccgtcacctggtcacccctctttgctcccaaacctatttctgcggacggacaaattgtactgaaaggacggatcgaaaaaggagttttcgtctgcaaccagctgaaacaaaaactgaaaaccggcttacccgacggcagctactggatcagtcttccggtgatcagccaaaccttcaaagaaggggaatccgtcaataacagcaaattaacctcccagcaggtacagctgttcggacgcgttcgtgaagggatattccgctgccacaactaccagtgcccggccagcggtgccgatggtaatttctggtgtaccctggataccgacacagcacaacccgcatttacacccatcaaaaatgctcctcccggggtcggcgggggacaaatcatcctcaccggagacgtagacgacaaagggatattccatgccgatgatgacctgcactatgaactgccggcttccttacccaaaggaaaatattacggtatcttcaccgttgaatcctgtgatcccacccttattccgatagagctgtcagccccaaaaacgagtaaaggcgaaaacctcatcgaaggaaacatctgggtggacgaacataccggggaagtccgtttcgacccgaagaaaaaccgggaagatcagcgccatcatgccatagacgccattgtaatcgccttatcttcccagagtttattccaacgcttgagcacctacaatgcccggcgggaaaacaaaaaaagaggcctcgattccacagaacatttcccctccccctggccgggttttgcccaagacgtccgacaaagcgtcgtccctcttttggtgtcgtataaacaaaatcctaaaaccctctgcaaaatcagtaaaaccctctataaagacgggaagaaaatacatagttgcggaaatgccgtccggggacaattgcacaaagaaaccgtttacggacaacgaaccgcccccggcgctacggaaaaatcctaccacatccggaaagacatccgtgaactgaaaaccagcaaacacatcggtaaagtagtcgatattacgatccggcaaatgctcttaaaacacctgcaggaaaattaccatatcgatataacgcaggaattcaatattccttcgaatgctttcttcaaagaaggggtttaccggatcttccttccgaacaaacatggagaacccgtacccatcaagaaaatccggatgaaagaagagttaggtaatgcagaacggttgaaagacaacatcaaccaatatgtgaatccccgtaacaatcatcacgttatgatctatcaggatgcagacgggaacctgaaggaagaaattgtctccttctggtcggtcatcgaacggcaaaaccagggacagcccatttatcagcttccccgtgaaggccggaatatagtcagtatactgcaaataaatgatactttcctcataggcttgaaagaggaagaaccggaagtatacagaaatgatctttcaaccttgagcaagcatttatatcgtgtccaaaaactgtccggtatgtactacactttccggcaccatttagcctccaccctgaacaacgaacgggaagaattccggattcaaagtttagaagcctggaaacgagccaatccagtcaaagtacagatagacgaaatcggacgtatcacctttttaaacggaccgttatgctgaaaagaactctgtttttcgggaaacccagccgtctttcggttaaagacaaacaattagtgattgaaataaaagagacgggggaattgcataaagcaccgatcgaggatattggttttgtagtgatcgaaaaccagcaaatcagtgtcagcctgcctttattacaggaattcatgtccaacaatgtagctgtgatcttctgcgatgccagccacatgcccaactccatgctgctcaacctggatggccaccatttacaaagtgaaatgttccgcttccagatcaacgcctccgaacccctgaaaaagaacctgtggaaacaaaccgttgaggccaaaatacgcaatcaggctgccttactggataagtcaggcaaaaacgggaatatattaaaaccattttattgtaacgtaaaaagcggggataccgacaaccgggaaggggccgctgcccgggtatactggacggaaatgttcggcaccagttttatacgcgaccggtacggagagtgccccaataatctgttaaactatgcttacatcgtcctacgggctgcagttgcacgagccattacaggttctggtttattacccaccctggggctttttcaccacaaccgttacaacgctttttgcctggcggacgacctcatggaaccttacaggccttacgccgatgaagtagtgtccgggctgtttcaaaaaggtgaaaaagaactgaccaccgcagtaaaagcagaaatactaaagattctggccaatgacacctattttgaaaatacaacccgccctttgatggtcggactttcgcaaaccacagcttctctggcacgatgtttcagtggggagcaaaagaaaatggtttatccggaatttaaataaaaaataacaatatgtcggaaaaccggctaaatgcataccgaattatgtggctttttgtcttcttcgatctgcccgttatgacgaaaccggaacgtcataccgccactcattttcggaaatttctggaaaaagatggtttttccatgatgcagttttccgtgtatatccgccattgtgccagcaaagaaagtgcagaagtacacatttcacgcatacggaataacatcccggaaaaaggccaggtcagcattttgaccgtcaccgataagcaatacggagaaattctcaattattggggctgcaaatccaatcctttaggcgaaacccctaaacaattggaacttttttaatacatttgttctttgaaatgttgaaatcagaaaatgacatcaaatcagctcccaggaagcaaaagtctgcattttttcttgcttggatttcatgaaaaatcttgaactttaatgctttgacaggccttggctgtgatttgatgtaaatacttgataagatataccctcttacgaggccggtgtcatttggcaatagctgtgatttgatgtaaatacttgataagatataccatcgtcattttaacctgatgactgaggttgctgtgatttgatgtaaatacttgataagatataccnnnnnnnnnnnnnnnnnnnnnnnnnnnnnnnnnnnnnnnnnnnnnnnnnnnnnnnnnnnnnnnnnnnnnnnnnnnnnnnnnnnnnnnnnnnnnnnnnnnnnnnnnnnnnnnnnnnnnnnnnnnnnnnnnnnnnnnnnnnnnnnnnnnnnnnnnnnnnnnnnnnnnnnnnnnnnnnnnnnnnnnnnnnnnnnnnnnnnnnnnnnnnnnnnnnnnnnnnnnnnnnnnnnnnnnnnnnnnnnnnnnnnnnnnnnnnnnnnnnnnnnnnnnnnnnnnnnnnnnnnnnnnnnnnnnnnnnnnnnnnnnnnnnnnnnnnnnnnnnnnnnnnnnnnnnnnnnnnnnnnnnnnnnnnnnnnnnnnnnnnnnnnnnnnnnnnnnnnnnnnnnnnnnnnnnnnnnnnnnnnnnnnnnnnnnnnnnnnnnnnnnnnnnnnnnnnnnnnnnnnnnnnnnnnnnnnnnnnnnnnnnnnnnnnnnnnnnnnnnnnnnnnnnnnnnnnnnnnnnnnnnnnnnnnnnnnnnnnnnnnnnnnnnaacgctgtgatttgatgtaaatacttgataagatatacctttcgacgtttttgcctgctgcgaggaattgctgtgatttgatgtaaatacttgataagatacaccacaaattacgacgacattttccacctctttttgtattgaccggaacatataacactcggagctgaaaaagcacgatttaccactgcagctcttcggttgtgcccctctcggcaatttggctgcacagcatcaagaggatcagaccggcattacggataatagaaagacgacgagcaataatcgaaccggtacgcccttgcatcatttggtttcccttcctcgtgatcgacctgacattgattaaaactatttcagctgttttcaactagagcaaccttttgtccgatttgtgccgctgcttgccaaaaacggtccaagactgttttttgtgtcgggaagatcacatagctgtcgctgtcaatatcgatgcaccctaccgcagacaaaggacaggctttactgaagcgggtacaccaaacggtaatattgtcatcctcgctgagtgtttcgtcccccagtgcttttaacaggcatcctgcgtcctcgttctttttcaggatttcctacagggcgaattcaaaatcctctaactcacatctccagtcgagttcccaggcatatccatgcctgataaggatgtccgtcatacccaaccatttcagtatcatcagttcgcccgatgccagatcggcgttgcggtctttatattgttccgaatgttccctgcaataagcctttatgtcgctgacacagtcttggatcgctcccatgacggcggggttttccccggaaatttcccgggcaatgccggtgatttttttattgataaggtcttccgttgggggtatcttcgacactccgccgaaacctggccaaggatacctaccgggaaagtcctcggactccggttcaccggttacttgtgcaattgcagtgatacccagcgtctggatacaggatatagctatatgtgtcccgaaatccatgtttgccaggctatacaggctttcctccaaatatcggggctgacgggcattacaacggcccaaacaaaacataatttgcaacccgatgataatacctatttttagtttcataccctatcttattttcatttccccaaaatacaaaaagaaacaaatgaacattcaccagtccgtttctttttctttagccacaggcaatcggcgcttgcagcttaaattttttttgaatccgttcccataattccatgtcattcctccaagactatttgaaataacacaacgaaagccaccccgatggatagccttccacttactttatgccttcccaaacgtcctgttctcattttcaggcaatctcccgcaactaaccgtccgcccaccgtcccgtacaacaatacaggtaaatttacttgaacctgctgttttcatagttataaggaacacttgtccccacaaccacatcttcgatcttgccgataatcaaccaatcgtccatatttccctgatgttcgaaatcaagcgcgggttctatcttttctactccggcaaattctaccaggaccaggcactttttatgccagcgttctttttgtttatctgtcagattaagtttaggttgactccgttcgagcgtatcggtaatctcctcttccgttagtttgagataattttcgacatgagtcaccgtggctttggcagaaatcttcttcgatcctttctgcataaaataaaggatttccccttcatttacccgactgtgcgggattttacgcccggcagccccacgaactaccatcgttttactgccgtcaagtattttatccaacactttggctttatcatcacaatataccaaatgcaccattatttttccagattttactatatttcacttctgtttaaagggctgccaaccttcctttattccgggcagaatccatttttataaaacaaataactttcctctatcgcttccgccgtatcagcttccaaagcatataatatttccctgcaaaactccaattgcccggttccattggcagttacgatcttcccgtccctgacggcctgtttatcaacataatccgcttcgcccgtatatttatctccggcatattgcttcaggtaagcgagtgtattactggtatgctttactccattgaggaaaccatgcactccgagaaaaacggaagcgttacagattccggcaactaattttttttctccgactgtttcttccaccagcgggaccaataattcaacttctaacgaaaaccaagacatcccaccgattaataccaaacccgcaaatcttccggcagctccttcaaatcgtaatcgggcaatactcggagtccacctattgaaatcacagtgtctttagcctgcgataagatttttactgcatgcccgacagaattccctggtttcacaccctggtccaaacacgaaacgataaaggcgccttcccaatcagcaaattcatttaataataccaaaataatctctttcatacacgtctcttttcccatgttcattcaaaaaatcacaaacctgctctggtctgttcctcacgtttctttgtatctgtttacacctacaaacatacaaatttatcgctgatagacaccagctgttgtcctttttattcacacaattgtccccttcccgtatgtgtttcattcttttgttatctcataatcatctttattattaatagtgtatgaatctatggctttactgattgcaagattaggattctctttgagaagtttacaaagtttttgcaacagctttttaatggacaagtgcatagcaggttaaagtgctgggaggtgcttacctttctccgctccgttaagatgatataagcaacttgctgatgtaagataggatactgacgagagcttttgcctacagtattcacaataaaaatttgccatagtatttatggataaaagattagcaggagcatcattcagcctactcctgccgcaaaattatatggctgatatgtcaaatcagagcatagattttaatttttcaacaacgtcatttttcattaatatatggcaaacataacgtgacccattataaatcaatccatgcctggtagcaaattcactcaagtcattttctatatcagattcttttgatcgcataaacacttcaataataaaggaagtatttcctaaacattttatgtctatagccatcttactaatgtcgttatcaaaaacagtacaggtatttccatattcataaaaccaaagtttccattctcttttttcccaaaatttttcagacaattggcttagttccaaataaaacttatatgcatttacattagcgtgtctgccactcgtatacttatccttgaccaatatccagccttgctcatcaccccaccattgaatatttttttcattacaatatgctaataaatcgggtatatgcacaaactcagcccaaggtttttctatcggaaaactatcacacatttgagcaagcacttccaatacactcttctctgaatagactatcttcttaaagaactcaaagaacttgtctacattttcattaataagaactttaaaatcattataatcccaaccaaaagacttattagtctgtcctttaaagtattttggatagtctttcaattcgcatgtgattaatgctctgcgagtaaggtcaatagtaccatcacactcacctttaaacacctcatagaatacattcatatatttcttaaactcctcaaaattgaatcgatcattcacaaagctccattttaggataggcaagatttctccattccatatctttccatccatatcttggtctgttttgtattgaatcttccaaaaggcatcttcaatttcgattctgttttctgattctaagaaaatggtaaacttcaaacgttcttcttctgttaatagctgatcagaaatattctctatatagattatatgtgcaatatcaggatgaaccatcaacctgataacttccacagcgtatgacaacactcggcctatgtctttacgaatatggttaagttgggcaatgttcttgaaaaaatgtttgactctgacaatgtcacgttcttgagcattaggaaatttaatagagtaagcaatcaaaggcaaaattctcaaccaatcaatctgagaatttatccgctccggagacagccacagtttattatttggaagagcttcgttaaacagtttttttacgacattgaaatactgatcaatagtttggggctctattctcagcacaggctcaaaatcaaaacgatcgacttctgattgtttgaccaaggattcttgtgttttctcaaactctttaacatctttggtttccaacacaatcacccatctcaaaaactccagtagaccattgtcggcagtgtcatttttatcccggtttctattcatccagaaccattgttcccacttttcccacatatctgatgagtcagggtattttgtaacataacgaggtttcagattttcggtcggagataatggttcaccagtcgtatttatgataacaaaggtctcttctcctaaacttcgtgtgcccatatcgtaatacataaaccacaaattctgagtaacataccgagcaaggtcgcttttgtctatgtcacgattaaccggagaagccaataatttgtgaatatcctgtaatgcgttgagcatactccgaatacttggatcattgtcatagtcgccaaaataccaacactgctttctaatatcatttggttcaccttctgattctagaaaaaactcacacaccaaatcactgagaaaataaagagaactttctcgtattgcgtattgcatatatggctctttgtcatcattgtaatattcaaaatcggagataagcaaatttcggaattggttgctgcactctttgtttaacataccaatgagcaagaatagtgttgttatgcgttgttgcccatcacacagttgtatgtgcccataaggctcttcgtaaccatacagtagacccattgacaaatcaacacgagaacgataacctttttcgataatattttccaaaaagtcttgtaccagtcgtccttttccaccccagcaatagtcacgttgcaaatcaggaataatgatttttgtgtatttgccagtaaaaatttccgtcaaattgtataactgtcctatattaagcgttttcatcggagtatttagcattatatttcgcatattgatttttaaattcatctaaaaaagtctctttctgtttttttatttcttcaataccccatttctcagatgcaaacacagagatagtatgcaataggttacgacttttgaatcctttacgtttgtctaagctaaaatatatcgcttttttgtcgttaaatgaagaggcattgaacgaagagttgtcattcttgtatagcaaaactaaatttccaatactatgcacaccactattcccctcgaatgagcccaattcattctccttagattttggaaatatatgctcaagagaccgttctttccatatcccaaaatcaaaagcctgcttaatatctgtgtatgcctgcacattgcgtcgcaataactgcctaaatgcaggttccttatcctcttcattataaagattgtcattttgcaaaacgtcaaacgaataatcatacgccatttgaatagcctttttgtcaaatttaatgatatcactgtgattaactccaagatagaccagatccgaataaagatttatatccgttatctcgtccgtacgaacaaaatatgattgaataaaaggttgagcgtttctctgaatatgcattacggaacctatattgttatgtaactcatagttataaaatacatcttcaaatcgtttttgaagttttcgcaacattgagaatgtgtccttcgctgcttttattttatcatccttatccaaaaaaactctcttaaaaccctcatatgataatttgtctttttctttgctattgtataatgtttcgattaacagtcccataatatttttagtattatagaaatcctgcacgtctgtacgattccaccaatgaagccatttatcccattctctggcatatctacttcttatcatattagtatcccaacgagttgactcatcaattacaacttcattccgtggttgagacactaatcttaataaatcagcttttatgacctcttgagcaagcatatctgctttatttccattcatcatcgtaaaaatagaggcagcgtttgcttctgggatatttatgtacaagaacttaatctgatgggataagtattcaaataatttctctttgtcaatattatgaagcttacgatgtatcaagcaaagggatttcttgaagaagtaaatatcttggtatgcttcattttcatttagagaacacattctaactatctcttccaacgatttacctttgagtccttgaaggaagctatcggattctttacgaactgtgtatctgattgtgaagttacctactttcccaagatataacattatcaagtacagaagcgtagttcgttgttgaccatcaataatcactatcttatctgacagttccgaaacggtaaccccttgcaaaaacattgaagacttcgtttcaaatccttgaataagattattaataaaaaacgaaacagaatctgtatcgttgctatttgtacggcgcgatttcccccaaacatatcctctttggtagctgggaatttcaaaaattttgcgtttagcaatgtattgattaagagtaataagaggtttttcgttcatcagattgttattttaaagaaattcaattgctctcctggcacatgcttctgcatctacaaaggggttgtggtgaatatctaagtcaaaaccaacgtaggcagaaactgtatagaactgatgttcatacaattcagataatcttctacgcaaaacccagagggtatatccaaaagtatagttcagataagatataccgtaatgttcgtgacacccgataaggtgcgtttcgtcaaatcctttattgtgggcaacaagagtctgtccttcaattttttggacaatttccgcccatacttccggtaatagcggtgcatccactgtatcctgtacagagagtcggtgacattcatccagtgccaactttttttccataggtatatcggtcatattctgatcggtcatacctactccaggccagcaaaagaaatgaaggtatctgtatttatcctgctgaaaactcaaatatttagaaaaaaataaacgcgcagccatatttccagaatcatattgaaacaaacgtttctcttccagcaaatgctgtataaaaggttctctctcaatccactcatttattttacacatgcttttatgaagagaaaaacatacaattttacgcgacagcactttactaacctccagatattcctttttcgaataaaggataatccattttttcaatgcagggtaaccatgggctactacctgatataacatgaaaaaacgggtcctcggatcatttgaaataataaaagtttcataatagacaacatctaagggaaaaccatctgtcggattaatagccagatcacagatcaacaaaaacaaagcaaccaaaggatcatacgaattttcaggccatttttctcccaaaacttgtaaaaatacttcaaaagcttcaatatacaaatcttccatcattcccaccttagcaaattgtggaaaagataatttctgaccagaaacagaatacaaatattgtaactggcaaaaccgggcttgtccttcaaatatagcccttgctcctaacggaggcattggtatcaaagaacgttcaaagaaaccttcctttcgttccgtctccaacctgttgaaattctcatcccattt

SEQ ID NO: 410 - DNA, 24554 bp, synthetic construct
  source 1..24554: mol_type = other DNA
  misc_feature 1..24554: note = Synthetic
ggataagttctatggtgaatgcaattaatgaaaaagatattgttcttgggtacggcggttttaaatatgaaaatacttttacaagtaagtttgttaattatgatacttttcaaatagctattcaatatttttctgcagctcgatttgggaaaccttatatgggagtaggtcgaaatttgctctataaaaaatcagtttgggaaaaagttggtggattcgaatctcataatgagatactttcaggtgatgatgatctttttatttctgaggtggcaaatgccaataatactagcacatgtattacaaatgaataccagacaatgtctgtgcctgtaaagacaattaaagaattagtaagacaaaagtcaaggcatattagtaccgcacacagatattctattttcgcatctatctttacaacttttgatattgtttcgcgttcattattttatctaattgctatattattgttattgggtggacaatggatttttgctttaagtttaattatcttaaggattttattgctctatcttattgcatgggatagacgtaaaacgctgaatagcaaaatcagttttcattattttattttatttgatatctttgcaccgattttttattttgcggttgttatatccaaccgttttataattaaagcgaaaacatggtagaacgcagtaacttttcagcaaaagcacaaaaggatctcgagataatagatctggcacttcagggtgaagagcgtgcatatgccgaattgttggacagatatcaggattcaatttattttttattactgaagaaaataggaaatgaaaatgatgctgaagatcttaccatggaaacttttggtaaagcttttaataatctttctcagtatactccggtttatgcatttagtacttggttatttcgaatagccattaataattgtattgattttgtcagaaagaaaagaatcagaccacagtcttttgattcgggtgttgattttcatgatcctgataatgcacactttcagagtaaaaatccaaatccggaagatctcgtaattaaagcacaaaaagcaagtgagttaagagatatgataaaaacacttaaacctcgctatgccagactaatcgatttgcgatattataaagaattaagttatgaggaaatagctgaggaaatgcaattgccactgggaacagtaaaagcgcagttgttcagagcacgagagttgctggctccattggttaatgctaaaaatgataagatctaaaatgcaatctcatttaaagattttttttccggaaataaacgataaacaattaaatcagtttgataaattagctgaagtatttcctgtttggaattcaaaaattaatttagttagtcgtaaagatattgatcaactgtttgtaagacatatattacattctttgtcaatagcgaaaatctataattttgaagcaggaaccaatatcattgatattggtacagggggaggttttcccggaattccactcgcaatcatgttccctgaaacaaaatttgatcttgttgatagtatcggtaaaaagattgtagctgtaaatggaattgctgaagaacttggtttaaccaatgttaagggaattaagtcaagagctgaattgttgcctgcaaaatatgattatgttgttagtagagcagttactgcatttccatcattttatgagatagccaggaatttgtttaaaaaggataataaaattactgaccgtggtataatttatttaaaaggtggtgatttcgatgatgaaattaaaccgtttagtaatgttaaagtgtttaaaatcatagatttgtttgattttgacttttttgagacaaaaaaaatcatttacctgcccattaaaagcaaaaaactttgaaatttgttttgattcaaaaaaataaatactatttttgcagtccgtttctaaaatgataacaaataaaaagatataaaaatgaaaaggacatttcaaccttcaaacagaaaaagaaggaataaacacggtttcagagagataatggcctctgtagaaggtcgtaaggtcttggctagaagaagagctaaaggaagaaaaaaacttacagtttctgacgaaggccgtcataaaagataagataaaaaaatatataaaataatatattttggcaagctgtttgcattaatgcgagcagctttttttttgtcatatatagaacaataatgtaaaaaaatcggttattttctttgttttgacaaaaatagagtatatttgtgatgataaaattatgtttaattaatgcctttcgattatgaaacaaattacaattttaatctgtgcgatgctgttttctgcagttttagttgcacaagatgaggtagacatgttttagaaacgtggtgagatgattttgcctcagtcaggtgagatagctctaggtattgacgctatgccagtactgggttatgtcggagacttctttaatgcaacagccggaaacaacaccaatttcggttttattaatggtatttataatgctaacacaatttatgtgaagtattatttagaagatcaagttgcagttcgtggtgcagttcgtatctgtcatcaaaattggatcgacaaagaatttgttactgctaaccaagaaattccagatccattagtaactgtaacagatgttaacacatttaacagtactaatattggtattggtgcagactatcttatgtatcgtggtaaaggacgtgtacaaggttattttggtggtggagcttttgtgaactacaattcatggaatgattcttacacttatggtaacccatttacaactatgtattcttctccagcatggtatgactttggcttaggtgctcaagttagtggtggcgaaagagttctagaaacttacaacaacaactcttttggtcttactttaagaggtgttattggtgttgagtatttctttgctccaaaaatctcaattggtggtgaaatgggcttaggtttcaatgcacaaagagacggtggtttccaaactgttgagcgttggactggtaccgacattgaggttgaaacaacagaattacctcatgatgtatttattggtgttgataactttacatctgcatcattatttttaatgttccatttttaataattaaatgaaaaagagtaataatttaaaaaattaatgttatgaaaaatattatttcaattttgttagtcgctacatttggcgtattattagtgtttactggatgtaaagaagaagaatatactccagaaccattaccaatggttacaattgaaggtcaggttataactcaattagatatgactaatgctgacgttgagtttgttccagactgtacaaaaattatcttccgtattgatgctcaagatttagtagcagttcctgaagctggttatacttatcaaattttacagtatgaaactactgtagctgatggtatgttcacaattgacttaccatgtgttaactttaacgcagttcctgttgaggttgttcttgatcctttcgtagctgagcaaactgatgctcttgatgatgattatatgatgattttcgaagctactgctaactatgatttcgcaattactgaaggtgaagattatttcttcgtttacaactatgatgcatatacattatatgacttctaaaaagtaattcagatacaataaaaaagctgtctttttaggcagcttttttttatatcaccatatatagaaatgcaaaaaagtggcatatggttccacctagaattgttaaatgaaaaactccatgaccaaaaggaagtttcttaattaagtaaaatgctacacctgagctatagcttaaacaaccggcaagtaaaaaccataatgtaataccatccgccttttttaataatggaacaatggcaataattattatccatcccattgcaacatatagccaggctgatatttttctttcctgagagctgccaccataaaagaatagcttatagattactccggcaatagcaaacccccaaattagaccaaaaattacccagccaaatgcaccatgcaatgtaaccaagcttattggagtatatgtccctgcaattaatacgtatatcatagagtgatcccagaggtttcttttcgatttttttctgagatttttactcccgtgaaaaacggtcgaggcaatatataatgatatcattgacgaaccaaaaatactaaagcttacaatcttccatgcattcccttcaattgatgcaaaaacaacgagtaaaaccaagcatgcaatcgctatcattatcccaacagcatggcttagactgttaaatagttcttcggcttttactagttttctggatttactcatatcttttttatatattaacatagcaatttagaaaatatttcatcgtattcaaatgttttagtatttttaataatccaaattaaaataatgaaggaagagtttttacactttatttttaaaaacagactttggaacaaaagccaattatgtcttactgatggtaggttattcgagattgttgatgttggtaatcataaccaggattcggggcctgatttctttaattccaaaattaaaattgatgatactgtctgggttggaagtattgagattcatattaattcgtcagactggtacaaacataagcatcaaaatgaccttgcatattcaaatgtaatactacacgtagtttataagcatgatgaagaggtcttttattataatgataaaccaataccggtatgggaaataagctttccacaagtactgtataataaatattcagagttaaagaacaatgagacagatattccttgcgctgaatatatagatatggttgacaagtttaaattagggatgtggcttgagagaatgggggttgagcgtttagagtacaaaagctaaataatcgatgattatttaagcagatcaaataatgattgggaatatgctttttatttaagtctgtcaagaagttttggtggaggattaaattcatttgcatttgaacaacttgcaatcagtacaccattaaaactcgttaggaaatattcagatagtcaatttaaattagaagcattacttttcggacaatcaggcttgttagaggatgctattgtagatgattatgttatcaaattgaaaacggaatataattacttgagaaatctgtataaacttagtccgatacctgctcattattggaaattttcgaaattaagaccggcaaattttccacaaattaaaattgctcagctagtttctgttttgcaaggatttcaagctttattctctgaggtaataattgaatctgataaaagcaaattgtttaagtattttaaagtaaacgtaagtgagtattggaaaacacattacgtgtttggaaaaccagttgataaaacaagttctggttttggtaaaaccttatttgaatcgatagtaataaatacacttgctccatttatctttaaatactttaaggatatgccggattcaaataatggaattaatcattatagcatactaagtggtataaaacctgaaaacaacagacatattagaatatggaagaaattgggttttgaaccacatgatgcttttagttctcaagcattattacatctaaaaaagtactattgtgataaaagaaactgtttgacttgtcaaattgggcataatataatgcaacaaataagtaaaatttaggtttataaattgtaattattggagtattttattgctccgagatctaagtacatgataaaaagcaatattattaaatttgagaaaatgaaccatactcaaagcctgtcagggcttacaaaaccaattggttctatttttggcgtatatcattgctgcaaccgttccgaaagctttcggaattgggttggcaaagattatgacaaaaaattttgtcatgtacatagctacgagatacataaaatagtaactttgtactaatgaagaaaattcttcttttaatattatctattttgctagtctttgaactgtttgctacacataacagggcaggagagatcacgtacagacaaatatcggatttgacttttgaaattaccattataacatatactgctaccggacccggttggacagccgacaggccggaactagagattgagtggggagataatactacaagtattttaccacgtagtgaagagatatttttacctgattattataaacgcaataaatatgttggaacacatacatatcccggtcctggtatatatgtaattgttgttgaagatccaaatagaaatttgggagtgaataatattccaaattctgtaaatactgttttttcaatttctacaacaatgcttattaatcctgagattggaacaaataatacaccaatattaactcagccaccaatagataaagctgcagttggacaagtttttattcataatcccggggctttcgaccctgatggagatagtttatcttataaattaactacatgtagagccgagaatggtgaacctattgaagggtatactttacctgctgcatcaaattcattaacagttaatgaaattacaggagatttggtttggaatactccggtaaatccgggagtttacaatattgccatgcttatcgaagaatggcgggatggaattaagattggacaaattattcgtgatatgcagattgaagtatatgaaacggataatcaccctcctgaggttattgctttagatacttgtattgaggccggtactttcttgcaatatgatgtaagtgcaacagatcctgataatgactatattgttttgtcagcagcaggagctccttttgagttagaagaaagcactgcctcgtttgtacaggatatttatgcacccggtattgctaccgggacctttgaatggcaaacactttgcgattatgtcaggaaacaaccctacactcttaatattaaagccgaagatgagagttcgccggtaaatcttgttgatataaataatgttagtattacaattgttggtcctaaagttgaaaatgttgccatagatgctacaacaacagagataagcttagtttgggatgaaaatgcatgtacaaatgtaacaggttataatgtttatcgtagaataacaccttctggttttatacctgactattgtgaagttggtgtgcctgaagaattgggatattcaaagatagcttatgtcgaaggtttttctagtactagttataacgatatttctgtatctcaggggcatgaatactgttatctaataactgctgtgtttcctgatggagcagaaggatatgcttctgatgaggtttgtgctgtacttgttcgtggtatcccaacaattactaatgttagtgtaaattcaactgacgaaaccaatggagagatttatgttgcatgggcaaagcaaactgaaattgatataggtgaagctcccggaccatatcaatatgtattatatcgatcagatggattttttggtgatgaccttattgaaattgccacaatggatgatatagacgacacaacatttgttgataccggtcttgacactaagaataatgcatggtcctataaagtagaattttataataatgaagctggaaacagatttttaattggaaccccacatattgcttcttcagtatttattgatttccaacaaatggagaatgctttaaaattgaattttaataaaaatacaccttgggtaaactctgagtacacagtgtataggtactcagaaactttggcagactttgattcaattgggactactggtgctgaatcatatattgacgatggcttaataaatggtaaggagtattgctattatgtcatatccacaggttcatattctatagatggaataattaatccaattataaatttatctcaggaaaactgtgaagaagcaatcgatactacagcaccatgctctccgtatatggttgcaacaagcacatgcgattcggtacgctttaatattgattgggactataatgacacatgctatgatgatgtaatggaatatcgaatttattttactcaacatttagatggtacatttgaattagttcatactgcgccggcaactacgcaatcatacgtttactatcctgagattggaatggcgggatgcttctatatgacagctgtcgattcatttagtaatgagagttttgtgtctaataaaatatgtttggatgattgcacgtattatgaattgccaaatgtatttactccgaatggagataatattcacgatttatttcagcctttcttcccatattattttgttgaaaaagtagatatgaagatttatgacaggtggggtttgttaatgtttgaaactgatgatccggatattaactgggatggaagaaattataaaagcggcaaaattgtaagtagaggtgtttattattatatctgcgatgtttatgagcaaaggctgacaggcgtggaagtaagacatttacatgggtttattcatgtttttgattcacaagaagaaaatccaattcaggaatgataaaacgattagtaaatatagccctgactcttttaattagttcgattgtattctcacaaaatgcaaatcaacaggctgtatttagtgcattaaattacttatcacataatcaaacggactcagctttaattgtgctggaggaacagaataactgcatcgaatgtaaaaagataatagctgaaatatatttttcggaaaagaatctgttaaatgctgctcatgcttataaagaactaagtgagttctatccttcagagtcatattttagattgtcggttatttatgcaggcttgggtttttctcaagaaagtgtaaaatatttagataaacattttgaataccctaatcctaaatcatactcaagcattatgttttataatgagtttgatgaaataaatactactacagagtggaaagaattttggaacgaagaaagatattcaaagaaagaaattcagcttgaagaagcaaaatatctgattagcacagaagaatatgataatgctttgaaaatactggaggaaataaatttcagttcgcaaaaagctcaggtgaattatttaatggcatatatatatgcaaattttgaaaattggtcagaagcctattcttatgtaaatgaagcaatagtcgcagaatttgattatgtagatgcattaacattaaaaagagatatagaaattgagagaggaatgaatgaggaagcattattaagtaacataagtttaatgaatgcagatccttataatccttatctgataagaaagcatgctgaattactatatcaaaacgaaaaacctcgcgaagcagaccagtatcttgatgagtatttagagtttttctctgatgatgaacaggcaaatcatttgaaaacaaaaatcctttccgctgacgaagattttaaaaatgccttaattaatttgaatttattaattgatcagaatccatcaaaatctgaatactttattgaacgagcagatatttactatacgctggaatcctggagatttgcttccaatgactattcaatggcactagatataaatcctcgtttacctgaggtttggtatcattttggtgtatgccagtttaatatgaataatcaaaaagctgcttgtaatgcatgggaacgtgcagcaaatctgaaatcaaaagaagcggtgaagatgttgtataagtattgtaagtatatttcccttaaataatcctatttgaaaatacaaaaaaactcctaccgaagcaggagtataggacattttatccttcggcatatagccttattgtgataagatgtaatttttggatattaatccgcatcaaatatatatgatttctttcaaaatccaaaataattttttaattttaagcagaattaagcagaatgtataattaaaaattacataattatgacaaaagtattgggtcttgatctgggaacgaacagtattggatgggctgttgtggataaggaaggggagaaaatattggatgctggagtacgtatctttccggaaggagtagagccaacaacaattggaaaaggagataatgaacaatcaaagaatgctacaagaagagagaaaaggcaattgagaaggcatttttatagaaaaaggctacgcaaaataaagctacttgaagtattgataggtcaaaaaatgtgtcctttgagaatagaggatttacgtaagtggaaaaactggaattcaaaagaaaaagccgaaggaagaagatttccttcgacaattgaatttgacagatggatacaaatgaacccatatgaattgagagataaagctttaagagaacaagttactttgtttgagttcggaagaattatgtataatttaatacaacggagaggttttttaagtagcagaaaaggagaacaagatcccaaaacactttttgaaaaagggaagccggatgaaaatattttacctgttaacgagactaaggaaaaaattggcaatactagtcttggctcatatttaaatagtattgcatataaagaaaatactccgtacaaaacaagaactgacgtaaaagggaatgagattagagttcgaggtcgatatacggttagaaagatgtatgtcgaagagtttatgaaaatttgggacaaacaaaatgaatattatgatctagatgtaattaaacttaaaacgagaaagattagagagttaagaggttcacttaatggtgcaaggaatagaaataaattagaatatctggtaagtaaatatggtgaagaaaatgttataattgaacaaaaatcaaataatattacacaagttattacaattagtgaaattcttttaaagaagtatctgggaggagaaatatattatgttgaaaatgaagaaggagaaaaaaagctaaaattcagaagtaatgagagtgtgttgttttggcaaagacctttaaaatcacaaaaaagtttattgacagattgcaggtttgaaagtaatctgcctgttattatgtcaaattgtgaaataagaaaagataaagaaggtaagtttgttttaagaagtaaaaagccttgcccgatatctcaccctgaatttgaattgtttagagcttatcaatttgttaataatattcgttttggtagaaatacaaatctaacaaatgagcaaaaggatacagtgttagatcttattaattcaaaagatgcaagtttttacttttcagatattagaaaaaaattagaattaacttacgagaagtttaattatgatgataagtttaaagttgttggaaatcccacaataaagaaattatcatctctttttgataagaaaatctgggaagaaaactatcaggatatttggcattgcttttatttttacgatgataatcagaagttatttgaaaaacttaagaaagattatgattattcaaaaggtatagacctgttggtaaaagttaaattaaaagatggttatagtaatgtgtcattaaaagctattagaaatatattaccatttttgaagaagggatatcaatatgataaagcagtaatattgggcggagttaaaaatgcttttggaaaaagatgggaatactttaaagattcacattacaaaattgagaatgaaataattagtattctttctgaagataatgcagaaggggacgcaatctgtaaaatcaaagaacacctgagttcacctgtattcaactatggttttagcaaggatgataattggtttgcgcatttgtaccatcatagccaggaaattgagaaggcatcgaaattttctgataaattgcctattccggaaaacttgcgtaacccaattgtgcagcaagggattaacgagatgcgtagattggttaattctttaatggagaaatatcaaaaccaatatggagatgattttcgatttgatgcaattaaagttgaaatggggagagatttgcgaaatagtaaatctgccagacaagaattaacattcagaatcagagacaacgagtcaaaaaacgaagaagcacgtgcaaggcttgctgagtatggtctgcagcaatcgagaagtaatattaataagtatttgatgtggaaagaaattgaagagaaagcaggagcagcaaaatgtccatacactggtaaaactatttccattagtgatttattaggaacagataattctgtgcaaattgagcatattattccatacagtgtctctttagatgatggatttggtaataaaacaatctgtgaatctcattttaataatttaaaaggagaattaactccttatcaattttatcaaaaaagatctgataaagatttgtggggcgtgaattcctgggatgcagtagttgaaagagcttttcagattttgccatataataaggcaaaaagatttacttcaaaaaaagattttgagaaatcttcctttattgaaagacaattaaatgatagcagatatattgcaaaaaaatctattgaattactttcaaatatctgtgagaatgttcgtgttatgccgggacaactaacagcagagctaagacatctatggggaataaataatgtattgcaaaagcctgttgttggaataaatgaccatgtgttaaaattggctaaagaagaaactgtaaaatgttatttagtggttgacgaagagaacaatgtaatagactttgtaaaaaagcagaatgatagacccaacactaaggagggagaaatcttaattccagtttcagtaaataagaataagttaataagcaatttgttttcatttgatatagacgtcgatgatttacaagatggtaaatattggattaaagttaacttaagtgatgattttacagtaatcccaaagcatattgataaagctaatgtggatgatgacagaattgtattcagaggtaaaattgagaaacaagtattcaaaaatgacacttcgggaaatgttaataaaaccggtaaagaagatggtgtttattgggcaaactttggtattaaagacaaaaagtttgtagatttaaaaactaataaggaacgtccgaaaactaaatcaaagaaacaaattgtgctttttggtaatgtagccaatgatgaatttaaatgctacatttataattgtcagacaaatctacctgatggtaaatactggttaatattagatattgattataatgatgtgtcttttgagaaagctattaatgagaagcctgaattacgtaatgatcaggtttgtttaagtgctacagttgatcaaaattcagaattaatactggatgttgataaaacttataaaaagcaggtaggattagctccgggtaaatattattctgtgtatcaaatagttgattatacaaaagaactttgtccaattgagaatcaaaagccaaaagttgcaaatgaacaaaaaattattgagggtagtatatgggttgacaaatatacaggagaagcaaaatttgatcctaaaaagaacagagatgaccatagacaccacgcaatagatgcaattgtgattgctctgacagaacaatcttatttacaacatttaagtacgtataatgcgaaacaaaaggcacggcaaagaggcaagattgatagtacagaaaagttttctctgccttggacaggctttataaatgacgtgcataaaaaagctgatgaaatacttatttcatataaaaagcaaaacaaagttctcactaaaaacaaaaaaggttttagtgttaggggacaattgcataaagaaaatgtttttggaaaaagacaagcaccaaatcaagaacaagggtatcatagaagaacgaaagttacagatttagaaaacaataagcatatagcaaaagttgttgatgatagtgttcgtaaaataattttagaccatttaaggtataactgtgctgtggatataagtaatcctaaagggtttaaagtgccaaaagatgcatttgttaaagatggagaatggcaattgtttttaccaaacaaaagaggagataaggtgccaattaaaaaggttagaattaaggaatctattggaaatgcagcacaattaaaatcaaatattaatcagtttgtgaatcctaggaataatcatcatgttgttatttatgaagactttgacggtaatttacaagaaaatgtcgttcaattttggacagttgttgaaagacaaatgaatggtgaggagatatacaaattgccacatgatggtaaaaatattattactacactcgaaataaatgatatgtttattttaggattaagtgatgaagaatttgaagataataaaagcaattatgcatttttaagcaaatatttgtatagggtacaaaaagtgtcgtcaatgtactatacttttagatatcatttagcatcgacggttactaataatgaacaggaattttctattcgaagtatgaaatcatttgtcgaagctaatccaattaagttaaagataaatgaacacggaaaattagtttaacttatgctaaaacgcaccctatttttttcaaacccatacagattgtcattaaaaaacaataagttagttgcagaaccaaaagatggtactgaaacacgaaccatcccggtagaggatatcggttttattgttctggataatatgcagataagtataagtttgcctttgattgaggcattggtctcaaataatgttgctgtagtttttacagattccaaacatatgcctcagtcaatgctattgaatctggatgcacataattcccagactgagatctttcgtaatcagataaatgcttccctgccactaaaaaagaatttgtggaaacaaacaaccgaagcgaaaatcaaaaaccaggcaaggctattaaaactctgcgacagacaaagtctggatattatgaaattatctgcaaatgtgaaatctggtgatgttgaaaataaagaaggaactgctgcccgtttatactggccccgcttaatgggggatcagtttattcgcgacagatatggtgacccacccaacaatttgctaaattacggctatataattttgcgtgctgcagtagcacgttcattggttggttcgggtctattgccgacactggggatccatcaccggaacaagtataattcatattgccttgcagatgatattatggagccatacaggccttatgttgacagaagagtttttacaatgtttaaaaacgagccggatatttttattctggaaaaagaacataaagccgaattgcttaaagttttaacagatgatgtatttatagatgatctgcgccgtcctttgatgatagcactgtctatgacaacatcctcacttgcaaaagtttttgcagtagagattaaaaatataaaatatcctgagttgagataatggaacaacttagattaaatgcatatcatataatgtggttatttgtttattttgatttgcctacaaatacaaaaaaagagcgtaaagcagcttcgcaatttcgtaagaaacttttacaggacggctttacaatgatgcagtattctgtttatacacggcattgtgcatcaaaggagagccttgcagttcatgttaaacgtgtagaaagctttattcctgagtttggtatggtaagtttattaaaaataacagataaacaatatggagatatgataaactttgttggaagtaagcagcaggcagactcaaaacagcctgttcagcttgaattattctgacaggcttaaaggtctttgaaatatcggattaaaatcttaaatttgtatgatcatgccacttcatagtagcagaaagacaacttttttgtgatggaagttagtattaaagcctttaaattcagggcatacagagcactatgttgtggtttgatgtaattttggaataagatacaacagtgtcccagtttgctgtttgctcgaaacggttgtggtttgatgtaattttggaataagatacaaccataaggtagtgcttaattgtgtctgccgggttgtggtttgatgtaattttggaataagatacaacatatgagtcaattttatcgtcaaggtatgagttgtggtttgatgtaattttggaataagatacaaccaaaataggaaattatgttttacctggcatgttgtggtttgatgtaattttggaataagatacaacacgagaaaggtttcctttacgttgatattgttgtggtttgatgtaattttggaataagatacaacaagcagtcatttttaatattgaaacccgtagttgtggtttgatgtaattttggaataagatacaacttggatagtttacattaagagatacatttcgttgtggtttgatgtaattttggaataagatacaacaaaaaggttcaaagcttaatgactaacttagttgtggtttgatgtaattttggaataagatacaacccatgtggagtctttatacttaccacattagttgtggtttgatgtaattttggaataagatacaacacagtaaaagttgatggtaaacttggatatgttgtggtttgatgtaattttggaataagatacaactaaattattatttaatgcacctagtttacagttgtggtttgatgtaattttggaataagatacaacaaaactggtaatcaaataaagcaagttttagttgtggtttgatgtaattttggaataagatacaacgttatgcctcattgcaagaagttcgtttcagttgtggtttgatgtaattttggaataagatacaacaatatttgttaagaataaggcagacggtaagttgtggtttgatgtaattttggaataagatacaactaccactttcatctaatccagtaaacaagtgttgtggtttgatgtaattttggaataagatacaaccttattgtggtgggtttaagcaactgaaaagttgtggtttgatgtaattttggaataagatacaaccaaaggaataagcaaactgaccttagtttagttgtggtttgatgtaattttggaataatatacaacaaatacacagaagcccgcaatatgttattagttgtggtttgatgtaattttggaataagatacaactgagaccaggaaaagaaatgcgattaatgagttgtggtttgatgtaattttggaataagatacaacataatagcaaaagatccacctatccgcatagttgtggtttgatgtaattttggaataagatacaactaggctgtaattcgtataaatagttttctagttgtggtttgatgtaattttggaataagatacaacaccaacaaaaagggcaacaatagatcgcccgttgtggtttgatgtaattttggaataagatacaacacacttccctagtgtttgcattcacaaccagttgtggtttgatgtaattttggaataagatacaactgtaaccgctatttctgcagttagcagccagttgtggtttgatgtaattttggaataagatacaacatccaaataattgtgtaatgttgctatttcgttgtggtttgatgtaattttggaataagatacaacggaaagaatataaagattttctattaaattgttgtggtttgatgtaattttggaataagatacaacaaaaaatacttccaataaaggaagcgtgtagttgtggtttgatgtaattttggaataagatacaacgaaaaacagcaaataatgcaagttgttcgagttgtggtttgatgtaattttggaataagatacaaccaaagttcaagaaccctattacgtaaacttgttgtggtttgatgtaattttggaataagatacaacaaaacaattagattatgttttacaatactagttgttgtttgatgtaattttggaataagatacaacatatcattatgttgatactttaataaatgagttgtggtttgatgtaattttggaataagatacaactaaagaggaacgtaaactttacaaccaggagttgtggtttgatgtaattttggaataagatacaacacagcgtaggttgttccatttccgccctcagttgtggtttgatgtaattttggaataagatacaacttaaatcaattgttattgatattacaaatagttgtggtttgatgtaattttggaataagatacaacatgagctaagtttgcattttgccacaaacagttgtggtttgatgtaattttggaataagatacaactgcgtttgttttatacaacaaaggtaagttgttgtggtttactcccttcggtcgtgagctccacttcgttccggttgatgtaattttggaataagatacaacgcgggagatattctaaaacataaagaatacgttgtggtttactcccttcggtcgtgagttccacttcgtttcggttgatgtaattttggaacttgaatatacgcttgaatttatgtaaatactaaatttggaggtaaataaaagagtgcatatattagctgattgaaaaagatattgtgatgaaatgtccggcactttttaaacgtgatcgttagtaataataaaaaaactgaaacaaatgatattaagagtagaagaaaatactaaacgggagatagacaggcttacaaatgaagcgtttgaaatttttgacctggataaccctaaatcaggtatcaacttattgatagaagcctataataaaattcccagtccgaaaacaaagtattcagaaagtttcgacttactcaaatatatctcaattggctatttcagagccggatttattgatgaaagtgaaaaatggctaagtgattttttagaaagcgatttcaaccttatgagatatggcgaaagcgaatatctggctggtaaaatagccttgaaacgaaacaatgaacggcttgcaatacaacattttatcgtggcaaatcaaaaatcaggagggagaatattcggtgatggtcaggaagacaaagaatactatgatttctttagaacccacgctaaagagtatgttcgccctgttgattttgacgaaatgcttaatgtcgctttaaaagaaattaacaatcaaaattactcttacgcattatcacttctgtatgattgtttgaacttacaactggacaacgcagttatttattacaacaagggactttgtcattttgaattgaacgagcctgatcatgctgcagattcttttacaagggcttttatgttagagggtgaagttatttttaaggaacatgattcaaaatacatcgactttttaaaaactaaaattgagattaaataacgattgcttggttattatgttttttaggacttgatagttaataaaacaaggtactgaaaacagacacttagatcagggaagttgcattacaggctttaaaactatttacacgccaatcaaataggaatgttgctgttgtattattacaattgtttcagtgatttatgcttttcttttatgagaagtattatttgaaatttttaatatgtcggataaatataatgtgtaataaaagtcaacgaattataaagtaatgtctattagtgtcttaaattattgttatcaaccttatttatcaactctttaaaaataaatatcttgttttggaatctattttggttgtgttgaagtggggaattttggctaatctgtttaagattaatagttttttattttgctcacagtctttgctgtgctttggttgatgtattttttgggaaagggagtttttttaatatttttgatattaatttgatagtttgaaaccagtaatttagatagatgtagtgtaattcaattaaatatatttgtaaaatatgccaacaatacatgagctaaccgaaagatatagtcaatatactgatgaagaattaatggaaattcatgaaaaaatcgatgaatattctgatgaggcaaaggctgctttgacaaatgttattaatgctggcggtggaataggtgcattgaaggatagaatttttaaaaagattgagatagaaagagaaatcaggaaaattgaatttcaggtatctgaattatttaacgggaatgcagatatagaatacatgaagaaacatattcactataatttaatatctgacaataggtttaatgagataattgaaaatacaattgatcgcctgaaattagaaaaggcagataaagaaattaagctgaaaacaattgtcggtggcttaaccggaggggctataggtggaactttgggaggtgtattatgggggattcagatgatatatactgggcatatgtatttcataattgtatttggccttgccgtattgtaatatgcttttattaaactttttactagacaatcaaggaaaaatatcatggtgtttgttatgactattctgtctgttatttatgctttggtcttaggtcaggtgttgtttgagatctttggttatgccggataaacaggcatgttaaacataagtttttcgggatatttaggtgaaattcaatgaacttcataatacaaagaatctctctcaacaggtacaaaaccatgcaaacttattagttcttccatttctgctttacttatttgaggtttttgttctatactacctgccattgagtagatcttggtagagtcgctgattgtaccgtccatatcgtctgcaccatacgacattgccaatgctgcgttttctattcctgtcatcggccaataggcttttatatgagggatgttatgtaagaaaattcttgcaatagcgtatgtttttagttcttcgggaagatttatttctgtatgtatatttaatctgttaccgtaagttttatattttaattgaatgaaacagttaaaaccgtttgtttcttcttgtagttcacgtagtttggccatatgatagatacggtcctcaacggattcaatatgcccgtatagcatcgtgcaattgcttgacagtccggtttggtgagcaattttatgaacctttagccatgtttctgaatttgttttctcaggacaaatttttcttctgatcttatcatcaagaatttccgctccaccacctgcaagtgaatttaatccgtgagtttttagttttgatattgcctcttctgttgttaaaccatccgattttgcgaaatattcaatctcaacagctgtaaaggctttaatatgtatttgcggaaactgtttttttatttctgtaaataaatcacagtaaaactgacttgttttttcagtgtgtaaacctcctgtcagatgaacttctgtaaggttttcttcggactttgattctagaaaccttaaaacatcatcaatttcgaggtcccagcaatccggatcacctttttttcgataaaaagaacaaaacttacatttatttacacatctgtttgagatttcaatatgagtattgacgtttaaaaaggctttttttgcatataatctttcacgaatcgaattagcaagaaatgcacaaaatgcaagtgatgagttttttgcaaggtaaatgccatcatcaatactaattgcttgtttagcctgaatcttatcgtaaatctgtaattctgttttatttaattgtgaaaacaaattattcataattgcaaagataaagactgtttttattatttttgttagtgttcaataaaatcttacaaatagagcagaaataagtttaaataattgaaagtatccaaatataaatatagtttagtagtatcggtcttcctgattgttgtttttgctttgtttaaatcattgtcttatgtagaaaatgaaggctttaatccaactgatgaaggtgtggttttagcacagtcatggcgtttgataaatggtgagattcctcatgaagattttatatcaattcgccctgcagtaagtggatatctacatacaattagttttttactcccctgaagtttagtgacaaatgcaagatggttcgttctattacagttctttatcattgcagctgttttgagtacattgttttttaagattcaatcgtagtatagagaaaaagagaagagtataatattttttattgctttattaatttcgggttttactattagtgtatttaactataatttgtattcctggacgacaattgatgcggtgttctggacaatattagcactgccattactttattctaagaataagtggaaaaatagtcttgcattagtatttatttcgttagcagcattatcccgacagacttttgggattattgttatcctggcttatttgtatgtcgtaatcaataacagacgaagctttgttaaatatattcctgtttttgctattggtgctataccatttttgctttatgcactaatgctattttggacgggttcatttaatgagtttttacatcaaatgacaggtcgaacagagtttgttcaaactgctgttattcaatttgcaaaaaagtttgttgtaaactataacactccattgaatatcattaccatgattgttgcagttgtattgtatttaaaacgcaaaagcggaattattgatagattcaaaaataaatctttacatactttatttgcgataatttatttctttgtttcattttccctgattattcatcattttataaagccgcagatggatatttatagtttgccatttagttttttctatatgacaatcttttttggaattttgcattttattctactgcccagacatataaatacacgtaaattagtgttttatgttcttgttatatcatgggtttctgctatatctcttggtgataactcacctgtttttgctacagggattttgtttatatcacttattgtaatgtgtattgatgttttggtaagtattgaagttccaaagattaatcttcttatgaataaatggtctttgttggtttattcgattgttgtatttgtttttggaatatacggacaagccaatgtaaattatcgggatctaggtaaggataaacttattttaggtttaaatagttcgtctgatgagtttggtaatatcagggcaaataagtttattgtaggatattatcaggagctggctggtatttataattcacttgatggatctaaaaacaacacgattgtttttcctcataatgcaatgttttatccacttatgcaaacaaagaatcctgcacctttagattggttgattgcaaatgaatatatagggcaggaggatagaattaaagcagattttaaaagaattattgaatctccacgtgacttatatattattgttgacaaggttgacgtccggattattagagatggcatatcagcaagagaatatgaaaatgatctgatttataatttgattattgaaaattgtagtttgatggatgtagaatcagattattttgctgtttataaaacaaggtagttacaaacctactcataaaaaaacgccccttacaaaggagcgcttctttaaattttatttatcaactaagcgtgtttttcttcgaattctttcattgcagcaacaagtacttgaacatcttccattgttgatgcattgtaagtagaagctctaaatccgccaacagatctgtgacctttgattccgatacagtttttagatgcagcaaaactaataaactcagcttccagttctttatattgatcttccataacaaaaacaatattcattcttgaacggtcttctttagcaacagttcctttaaacattttgctttcgtaaatagctccatatagaaggtttgctctatcatcagcaagtttgtccattgcttttaatccacccatttctttaacccaattaaaagtttcacgaatagcgaaaatattaatacatggaggtgtgttaaacattgattctttctcaacatgagtagaatattttagcattgttgggattggacgatcaacaactttatctaagaaatcattttttataataacaaatgtagcacctgcaggaccaatattcttttgtgctccaccataaatcattgcatacttagaaatatcaaccggacggcttaaaatatcagatgacatatcagcgataagaggagcgtcaaaatccatatcttcaaggatctctgtgccgctaattgtgttatttgttgtgatattaacataatcaacatctgcaggcacattcaaatctttaggtatataagtaaaacctttatcttttgaagatacttcaacaacttcgccccacatttttgcttctttgattgcttttgttgaccaggttcctgtgtttaggtagaaagcttttttattcatgaagttgtaaggaatcatgcaaaattgcatactagctccaccacctaagaataaaatagaataattttcagggatgtctagtacttcatggaataaagctactgtttcgtcaataactttttgaaaatctttacttctgtgagaaacttcgagaattgattgtcctgagttttcaagctcaaggattgccttggaagtgttttcaagtgttctgtctgataacttacaaggacccgcgtta

SEQ ID NO: 411 - DNA, 24479 bp, synthetic construct
  source 1..24479: mol_type = other DNA
  misc_feature 1..24479: note = Synthetic
gctgcccgggatttttccagggcatccggatcgggattgcctaaattaatcaggtaactgtcatgtggcaatatgtgactggcatcatatcccaactcccggcaccgctgatgaaacaactccacattattcgccgtataaggtgccgcagcccattgacgctggttctttgtaaacaaagcaaaagccttggctcctatccgatgggcatttaacggtgcattttctacacccccggttgtcgatacatgagctcctacgtatttcataattcttccctttctctactaaagtcaacggacctgtttatcaattctctcttttattttatcaaatccacacttctctttacaaaccgattcaacgcctcgcccttcagcaagccgtttgccagtaaagccaagtctataagttgtcccacaatcttattttccttgccatattctttcagtaagttttgtttgcggctcttcaactcatttatcttatccgtatactccttttttctgtctttgtctacctgaggaatctcttcttctttcttatccttgttcaattcatctatctcagtccgtttgctttcattttctttaatctcaaaatcaattggttccaactgaacagacatctttttttgttcatctgccaaaacagattttaccaatttgtggtcagtattcacaaccaacgtaaactggtcccccatagcaccatagaatcccattcccggattcatagccgccatttccttcatccgtcgcataaattcggagcgggtgataatcaccggatcagcactttctcccaaagcttcaaaattaaccataaacatccctccctctgtcggtagctgagcattgaaaacatcccgcatttcctcttgctcagcctcactccaatctgtatctttcacatcgctcttcggtatcagcttgtccactacatccgagtctacccgtaaaaacttatgattggcatttttctgttccaggtggttgatgaaatgggtatccaactgaccgtccataatcagcacatcataccctttgtctttggcagcctgaatgtaggtatactgttcctgaaaatcggtggcatagagatagacgatgttattgtctttatccgtctggttcaccttaaccagattctcatactcttccaaagtaaaatattttccttcggtgtctttcagcaaaacaatagaattagcacgctcggcaaacttctcatccgtcagcatgccatattgaataaataccttcagatcgtcccattttttctcataatcctcccggctattcttaaaaatatcggtcaggctgtcagccacttttttagtgatatggctggaaatctttttcacgttccggtcgctttgcaaataagagcgggaaacgttcaggggaatatccggcgaatcgattaccccatgcaatagagtaaggtattcgggaacaattccttccaccgaatcggaaacgaaaacctgattgctgtataattgaattttgtttttctgaatttcaaacttgttgtcgattttcgggaaatagaggataccggtcaggttgaacggataatctacattcaaatgaatatggaacaagggatcctgagccatgggatacaactcatggtaaaatttcaggtaatcttcttctttcagttcagcaggcttccgcgtccacaacggagtagtgtcgttgatgatattgtcttcgtcggtatccacctgtttaccgtctttccattctttctttttaccgaacacaatttctatcggaaggaatttgcaatattttgtcagcaactcctgaattttgctatcttcaagaaaatctttctcttcctcgctgatatacatgataatatctgtaccgtgctctgctttttctgtattttcaagcgtatattcggtgtcgccctcacctgtccacttcacggcttgtgccccttctttataggatttggtcacgatctctactttatcgctcaccataaaggccgaatagaatcccaacccgaaatgcccgataatcgtagctgcatcgtctttgtgtttttccaggaattcctccgcacctgagaaagcgatctggttgatgtatttctccacctcttcctgagtcataccgataccactatcggaaactgtcaaagttcctgcctctttgtcagcttttacccgtacacgcagattagaaacatctcctttaaattctcccgaagaggccagcactttcagtttttgagttgcatccaccgcattcgacacaatttctcgaagaaatatttcgtgatcggaataaagaaactttttgataatcggaaataaattctgggttgaaacacctatttttcctgtagccatagtgttgtatttttagttattgaatttcgattttacgctacaattttcacaatagttgtgccaaagcgaataaaatgacaaaaagacagtctgcccgcaaataacaatactcgaacacaaaagtattccaatagtacgaattcgatggatattctctgtataccaattcctgaagctgcccgttttcatcacaggtataacaaatccggacctttcagaccttttcagccaaatacaaaattaagcatttaaacgtaataaaaaatcatagaaaatcgttttcttcgtgccagatatatcatgataaaattaaccaatatccttcaaatgaaaaattggcttacacaattcaaacacgaagactgggtagtcgttgccgtcagtattctgctactcgctatgtccgttagcataccttcgcatttacctcagattcccaaacagctaaccacatggacagatttcagtaatgccattcaattatttgtcattgttctcattatcttctatttagggtggattatgctgggacgtcccttgaaaggattgattttatccttactggctattttcggcatctccctgatagcacaaattactgcagctattccccaggtatcttattatggtttcgaatcggtgtttttctccgttatcttaggattgattatccggaatgtcttttatattcccaactggatgaaaccggctatccaaagcgagtttttcatcaaaatcggcgtagtatgtctgggcgcgactatactgttcagcgatgtcatgaaatcgggcgcaatgggactgatacaagccgttctggttgtcagtattgtctggtttttcgcttattttatttcccgccggatgaaagtagaccaacgttccgccatgattttatccagcggtgtttccatctgcggtgtttctgcctgcatcacggcagcccgagtggccggcggagacgataagaaattgtcttatatcgtgtctttagtacttattatcgtggttccgatgatttacctgatgccttggctggctcaggttcttttgccccgcttatttgataatcctcaggtagtacaggaagttgccggagcctggatcggcggaacaatcgacaccaccagcggcgtagccgcctccagcgcaatcgtcagcgagctttccaatcaacatgccgtcatcatcaagggcgcacaaaacgtactgattggctttgttgctttcttcattgcactttatctgtctacacggggagaaaaaaacagccattcaccctccttagacattgtctgggaaaaatttccaaaattcatcatcggttttgtagctgcttccttagtgttcagccttcttcagaccaatggccttttccacgtaaatctgaaagggaaattgctcgaacccggagtggctaaaatgttcagtactctgttcttcagcctggccttcgtatgcgtaggactggaaacgaggcttaaagaaatcatatcacgtgaaaaccgtcatattctctgggctttcctgactgcacagaccttcaatattattgtcactttggtgattgcctgcatcctgtttggagtgcttaaacctcttttagggtaaaagcaaatgtgtcaaagtttccccaaactccggagctacatcgggtaaattgtactcttcctggttcagatatatccgtctgtcagcccaattgaacatcagaatatcgcccgaatgatacttatccacaatctccggagcaataaggatgggcaatccccgattcaaagccatacggaaaaatctccgattaacggaacgggctataacggccactattcctgcagcaacaagcccggatgccgcatgttcgatcaatttcccacaaccgaaatcctctccgacaataagaatctgtcctgtttccacccggctggcaaaagtgacatccaaccctgctaataaatgtggaagcataccctttttatcttctgaagagatacgatatgtccactgctcagcaaacaactgctcagtagtaatgtggtctatctccttataattccatacgtttccgaacaagcgattgtcgaaatcatgaacagaaacaggctctgccggaacagaccaatagggataaaccgcttccctctcttcagccggcgaggttaacactcctgtcaaagctgtcatggctatagtcgccggcgaagccacatatttttctaccccaaacgaaaacatacgttgctgagaattactgttcgtggaagtcagataacgccgggtatcagccagaaccatagaactgcttcctaagcaagcaccgcaactcgctccaagcaccgcagctcccgacttgaatatcatatcaaccaatccctcttctatggcctgcatataaatctcacgggaagccggaacaaccgacaattggaatcccggtgctaactttttatcttttaaaatatgggctacaacccgcatatcttctatccttccggtaccacatgcaccgattaatccttgctgtacagacaatgctccccattcgcggacacttttaacctccgtatgaagacctactgacatggccaaaggcattacacccgacaaatcaatttcaaactcccgtttataagcagcattagcatctgtccaaactccttgtactgcatagtctccgaaataatcagccaaagcatcatcagggggaaatacggcacttttcacccctatctcagcagatacattcgcaatagtcatccggtcagcaatggataaagtacggactccttctccgtgatactccaaaaaagtgtaccccacaggttcattctttaacataccaataatccagagagccaaatcttttgcatatactccctccggtaaactgttcctcaggacaatctttactgtttcaggaacccggaaccacatcttccctgttttccacaaaacagccgtttccgttttattcaaccccactgccaaacagttaaatgccccggcagtacaggtatgactatcgttaccggcaatcaacatcccctcttttacctgttctgctaataactgatggcaaattcctttgtcgcaatcgaaaaaacggccggcttgctgctcctccataaaatgatggatagaattataatcccgaatcaattcttcggtcgtaccggtcattttccggtcaagtacgaccatcagcttttcaggatactttaccgcctttccacccatcctctcgaataacttttttatacgggccgaattatcatgactcaataccaaatcaggttcacggcatacaatactcccggcagaagcattcaaaagcttttcaacaaaagttcttcctgttttcataggtacatataataactgatgtactaatatactaataaaaattagtaattagtacatcagtacctgcatttttatatctcactaaacctgttagtcaatatccaacaccaccttataggtcttaccaggctcaaaatccgcattataaaccaatagaaagttctcgtcaagagccactttccattcctgtccgtcggccagacgaggatttttcaaacgctcaggaaaaaaataactgaacggcaaatccttcacatgctcctccttgaaatgatctcctttcattctttccaggttaaaattctcctgagtagtaatggtgacaatacattgctttccttttatctccgaagcgacagtaaaatcatgttcttccggtatttcctgcaaacgaacgtcccacttcggatcaccatagtaagccaatacatcccggtcatgtaaaaatcccagcatatcaagtgacgcttctattcccagcgaatcctttattaattgagttcctgcctgaaattcatcggacgcatcataaggatattccagatcagtaaaccggggattccattgcaccaactgattcatcatatcctgctgattcaggtaaaaagcttcggctattgtataacggcccggcgttgtcaaccaatatttcagtcctccccagccattacggccataccaggtagttaccacatacccgactaaagtagccgcatgggcactgttcatccaggctactgccatactctctttcgtattatttacattagcgatcaaacaatttcctataggcagataaactcttcgcttcccgctctccgtcaagtttcggggagctccgggaaaatccatgtataatactccagactgagacttgatattacccaaagaaaaaggcatttccaagttccgctccgttgcatgggcagccgtcacaatcaaatccggatcatattccgcataaatatcataaaaagtctgcatctcatccaccggatttacccggctattattcttcttgtctgccggcaactgataagtgactacactgtccccttttgctttcttctctccccacaatcccatccgatggtcatccacccaggcgaaacggtcaaaccatttaccactgtgtaactccataatggaagcaacggcatctttaatcaccaaaggttccgtactgttattcaccattcccatggcagcctcagcatcctgttataatcccccacaggaaatccgcatatttatcctcatctatctgccggctcagccggtttaacccgataacataatcccggcccagattttccggtttctccaccactgcaacatagcgcggattcaattgcttcaacgaaggcaataactcgtccggatgatgacgatacgccaacaatacagcttcatgcttagctcttaacgtctctgccaccagattccaggatgaatcttccatcacttcctgactggccatcacaacatactctgcagtgcggggtgctccctgacaactaaccaggaacaacagaataccccataacaaacgattgattttcatattattttaattttagtcccgtttcaatgatacatcttctccaattgctccttgatgccttcattcgtaatataatcatcaaaatccattcgcttatctatcataccagccggtgtcaactctatcacccgattacaaaccgtctgaataaactcatggtcatgagaattcatcaaaaccacccccttgaaagaaaccagcgtattgttaaaagcctgaatagactctaaatccaaatgattggccggagagtccagaatcagaacattcgcgttattcaacatcatccgggctatcatacaccgcatcttctcacctccggacaacacctttatatttttataaatatcctccccggaaaacagcattttacctaaaaatccacgtaaaaacgtttcactcgtatccgccgaatactgacccagccaatctatcaatttcatatcggtatcaaaaaaggcagaattatccaatggcaaataagctttagtaattgttactccccaggtataatctcccgtatccggtttttcatttcccgtaataatctccaacaaagcagtcattgctctcggatcccgggaaagaaaaacaattttatcatctttctctacagaaaattctacatccttaaataaacattgaccatctatacttttacttaaattccgaacctccagaatcttattccccacctcacgctccggtgtaaaaataatccccggatatttacgggtagaaggcataatctcctctatattcagtttctccagcatcttcttacgactggtcgtttgtttggattttgccacattggcactgaaccgggcaataaattcctgtaactctttccgtttctcctccgccttcttattcttagcctgagtctgccgtaaagccaactgactggattcataccagaagctgtaattcccggcaaacagggtgattttaccataatctatatccactgaatgagtacagacagcgtccaggaaatgacggtcgtgagaaacaaccaataccgtattctcataattggccaaataattttccagccacatcaccgtatccaggtccaaatcattagtcggctcatccaacaacagattatccggctttccgaacaatgcctgagccagcaaaaccctcactttctgttttccgctcaaatccttcatcaaggcataatgcaaatcctccggaatccctaatccactcagcagattggcagcatcgctctctgcactccaaccatccatagcagcaaacttttcttccagttcagcagcccggatgccatccgcatctgagaaatcctctttcatgtaaatggcattcttctcctgcatcaccttccacaaattcatatggccttgcaaaacagtatccaatacaccacactcatcgtaagcgaagtgattctgctgcaataccgacaaacgctctccagggccaaacatcacagtcccccgcgtcggttccagttctccgctcaatattcttaagaaagtcgatttccctgctccgttagcacctatcaccccatagcaattcccaggagtaaattttaaattaacatcctgaaacagggtccttttcccaaactgaatctctaaatctgaaactgtaatcatctctatttttatttttctctgataatcaatttattccccctaaaacggagtggcaaagatagctcttatttctcggtttagcaacttcttattttgtaaataataaggatttagcatgaaacaaaatgacatcccgaccgtaaaccccaaatcgtaatcgtaaacttataaaatatggaacaaaacaatctccctctggtaaaattcctgaacattctggttcttctcagtagtattgctattctggtcgttatctcgatagaactcctatcttcttccgctatcctgtcagaacgtttcatcctgaattttcatttggttgtctgttctttcttcctggcagattttctcgtccgctggttttacagccataacaaatggcacttcctgggccggaatatatttctgctcttagtagcaattccctatctcaatattgcatatgccacttctgcacacctctcccacaccgcctgggtcctgttacggttaatcccgatagcccggggtatttatggtgtttccatgattgtcagttggatgacccacagtaaaatgactaatctttttaccacctatctggtgattctcttcaccaccatttatttctgcagcatcatgttttactttgtggaacacggaccgaatcccatggttaaaaattactgggacgctttcaactggtcactcatgaatgtcaccacagtcggttccaacatcttcggcgttacaaagctcggtcaatccttagctgtcacactcgccgctgccggaatgatttttttccccatttttactgcctatgtgacaaccctgtttcaaaacaaacggaaaggaatagaaaataatcctcccctgtaaacatacgcctgcacacttccatgacaaataaaaaactcccaccgaagcgggagtataggattacatccttcggcatatagccttgctgtgataagatgtaaataattgatttgtttaatcaacggagtaaagatatacaattatttgtatatgtaaaacattttacataaatttaacgattgtatttttactcttaatatcatggaaacaactttaggcattgatttaggtaccaatagtataggaatagccctcacagaccagaaacaagcccggattctgtacagcggcatacgcatttttccggaaggcatcaccaaagacaccatcggacaaggagaaaaagaagaatcccggaatgccacacgccgcatgaaaagacaaatgcggcggcaatatttccggaaaagactgcggaaaatcaaacttttagaaatactcgttgcctgtaatatgtgccctttacaaccggaagacatccggcgttggaaaaactgggacaaacacctaaaatctaccgcccggcaattccctgactcaccggcattccgagaatggctgaaactgaatccttatgaattacggaaaaaaggcgttacggaaaatatcagccggcaagaattaggacgcatcttgtatcattttatacaaagaagaggattcctgagtagccggaaaggtaaagaagacggaaaaatatttacaggcaaagaccaaatgaccggtattgatgaaacccggaaaaatttacaaaaccggacactgggaacatatctctatgaaattgcccctaaaaaaggagaaaaatatcgtttccgcacggaaagggtaagagcacggtataccttacgggatatgtacgtccgcgaatttgagacgctttggaaccgtcaggccgcccacttagaacttgacaacaaacaaatgccgcaaaaacgccatatatacttaaaaggtacttccacaaacaaccgcaatcgtaaaataatcactcacctacaacaaaaatatggtacggaaaatataagcattgaaaattcccgcatcaccgtatcctatttacttccgctgaaagaattactgggaggtaaaatcgaacaacaggacgggaacttgaaatttaaatgcaatgaaagtgtgctgttctggcagcgctctctccgcacacaaaaatccttactttcaaaatgtgtttttgaaggacggcgtttttatgattccattcaccggaaatggattaccgccggacctacgccagcacccctgtcccatcccgaatttgaggaattccgggcttatcagtttatcaataatatcacttacggaaaaggagaacacctgaatgccacccaaagagaagacctttttaaactcatgtgttccgaaagcaaggaattcaactttgacaaaatacccaagcatttaaaactatacgaaaaattcaatttcgacaaacagaccaaagtaccggcctgcaccacaatcagccaattgcaaaaactgtttccgccagaaacatggcaacaacaccgggaggaaatctggcactgtttctatttttatgatgacaatgaactgctttttcaaaaactgaaaaaagattacaacctgcaactcaatgaaagcgaaaaattaaagaaaatacggcttgctgaaggttacggacacgtatctctcaaagcaatacggcggattaatccctatctgcagaaagggtatgctttcagtactgcagtacttttaggaggtatccggaatgctttcggaaagcgtttcgaatatttcaaagaatctgaaaccgaaatagaacaggctgtctgccggattttgaaagaaaggaacacagaaggaggaacaatcctaaaaatcaaagactatctgacaaaaaatcaatacggctttactgaacatgaccgggcgtttcaaaaactgtatcaccacagtcaacctgtcaatgccaaaacattacaagaaaaattaccagcaacagaaaacctacgaaatcccatcgtacaacaagcattgaatgagttacgacggactgtcaataaattattgtccgactgccgccaaaaatacggacctgaatttcaattcgaccacattcacgtggaaatgggcagagaccttcgaagttccaaaactgagcgggaaaagcaaacccgcttcatccgggaaaatgaaaagaaaaatgaggctgcccgccagaaactacgggaattcggtcttcaacccaatcgggaaaacatacaaaaatatttgttatacaaggaaatagaagacaaggcaggcatcgtcagttgtccgtacaccgggaaaaccatcaaaatttctgatgcattagggagtgacggatgtgtacaaattgaacacattataccctacagcatatccctggatgacagtttcgccaataaaacgttatgtgaggctactttcaacagggaaaaaggagaacggacaccttatgaattttatgaaaaaaatccctcttcctctctatggggagacgtccattgctgggaagacgtcgaagaacgggcgtttcgtctgcttccttaccccaaagcccaacgtttcatccgacggaaaaatcccgatacaaatgaattcatccgccgtcagttgaatgacacccgttatatgggaaaaaaagccgtcgaatacttaagtagcatttgcaaagacgtgaaagcatttcccggacaattaacagctgaactccggcatttatggggtctgaacaatatattgcaatccgttcccgacattacatttgcaacccccgtacctgtcggaatgcgaaaaaattattacttaatcacaaacgaacagtaccaggttactcagatccttccccaagaagcagaccggcctcagacagaaaataatgaagttttcattaccggtacagtcaaacacaacagttttaaatatcggggaatgcaagactatccgacagaaagaaatgacgggaaatacggggcccggctgaaattatccgcccctgtcgcctggcatcctctgtttgcccaaaaaccaaattcctcggaagaacagcttgtattaaaaggaaaaatcgacaaaggcatatttgtctgtgactacctgaaacaaaaaataaaaacaaatttacccgacggcagctattgggtaagtcttccggtccggaaccgttctttccaggacagtgaatctgttaaccgccccaaattaactccacagcaagtacagctctacggcaccatccatgagggaagattccattgtgacacctaccaatgccaaactacaggaggtgacggtaaattctggtgtatactggatgtcgataccgaacagcctgaatttaccagaatcaaaaacgaattccccgcactggaagaaagacagattattcttaccggcagcatagacgaaaaaggcatcttttgtgcagatgatgacttaaattataaagtatcaaccactctttccaaagggaaatattacggaatctttccctgggaatcccaacagccggagttaagcgaaatagaatttacagccccaaaaatcaacaaagacgaaaagctgattgaaggacaaatctgggtggatgagcacaccggagaaatcaagtttgatccaaagaaaaacagagaggaccagcgtcaccatgccattgatgccattgttatcgccttatcctctcaaagcctgttccaacggttaagcactttcaatgcccaacgggaaaacaaaaaacggggaatcaactccacagaacactttccgctaccctggtccgggttcatcggagatgtaagtcaaagtgtgaaaaacatcctggtatcctataaacaaaacctccgtacgcggtgtaaaatcagtaaaaccctcatcaaagacggacggcaaatccatagtgtgggcaatgcagtccggggacaactccacaaagacagcatatacggacagcgacttgctcccggaaatacggaaaagacctaccatatccgaaaagatatccgggacctcaaaaccaaaaaacacatcgaaaaagtagttgatcccaccatccggcaaatgctcctgacacatttacaagaaaattgtcacatcaatacaaaccaggagttcgatattccttctgatgctttctttaaagacgacaaataccggattttccttcccaacaaatacggagaacctgtacccgttaaaaaagtccggataaaagaaaaaatggaaaatgcagagcaactgaaaaataacgtcaatcaatttgtcaacccacgaaacaatcaccatgtcatgttgtacatcgacagagagggcaatctgaaagaagaaatcgtatctttctggacagtcatcgaaagacaaaaccaacaccagcctgttttccaacttccggccgacggcaaagcaccaatatgcaccttgcaaatcaacgacacttttattatcggactaaaagacgaagaactggaagtataccggaatgaccgttccaccctaagcaaatacctctaccgggtgcaaaaattatccagtatgtattatactttccggcatcatctggcttctacaatcaaaaatgagaaagaagaagttcacattagaagccttgaggcctggaaacaagcaaatccggttaaagtatacattgatgaaatcggtaacctcactttttaaaattgcggtatgttaaaaaggactctgttttttaccactcccagccgtctctccacgaaagacaagcaattggttatcgaatcaaaagaagacggcgccatacacaaagtaccgattgaagacatcggctataccgtttttgaaaatcaacaaatcagcttcagtattccgctgattcaggagttgatggccaataatgtagctgtcatattctgtgatgccggtcacatgcccaactccatgttactgaatctggatggccaccatctgcagaatgaattgttccgctttcagatagatgcctcagaacctctcaaaaagaatctctggaaacaaactatcgaagcaaaaatacggaaccaggctgctttactccacaaattagggaaaaacgggaatttattaaaacctttttacagtaacgttaaaagtggtgacccggacaatcgggagggagtggcagcccggatatactgggcagaaatgtacggtccggatttcacccgggaccgttacggttcctggcctaacaatttattgaactatgcctacatagtcttacgggctgccgtagcccgggcactcacgggttccggacttctgccgacttttggattatttcatcacaatcgttacaatgccttctgtctggcagacgatataatggaaccttatcgtccttttgccgatgaaatgatatttactctctttcaggaaggtgatcaggaactaacaacagaagtaaaaaccaaaattttaaaaatattagccaatgacatctattttgaaaacaccacccgcccattaatggtcggattgtcgcagacaacagcttccttagcccgatgttttaccggtgagcaaaagaaaatggtttatccgcaactaaaataaacatcaatatcctgaccaatgtcggacaatcgcttaaatgcttatcggattatgtggttatttgtttttttcgatttgccggtaacaacgaaatcggaacgccatactgctacccattttcgaaaatttctggaaaaagatggttttacgatgatgcagttttctgtttacatccgtcattgtgccagcaaagaaagtgcagaagtacacacttcccgtatccgaaacaatatcccggaaaaaggacaggtaagtattttatcggtaactgataaacaatatggagaaatccttaattattggggaagtcagtcaaaatctttaggagaaacacctaaacaattggaacttttttaatatttttgttctttgaaatgttgaaataaaaaaataccatcaaattaacttccttagaataacaaatctcattttttctggcttgaataaaaggtaaagttttgaattatatgattttaatgacctaaggctgtgatttgatgtaatttcttaataagatataacagataggtatgacaatatttatgccgcattgctgtgatttgatgtaatttcttaataagatataactggttagtgatcagtttttgcttttaaatagctgtgatttgatgtaatttcttaataagatataacagtatcccaagtactattaactcgaactgagctgtgatttgatgtaatttcttaataagatataactctcggtatacaatgtgatatttgtccttgctgtgatttgatgtaatttcttaataagatataacaagagtgacaatagttgataatgacggtaagctgtgatttgatgtaatttcttaataagatataactgtacccggtgcggcattttcaaccgccttgctgtgatttgatgtaatttcttaataagatataacgagttgacaaggcagaaataacaggaaactgctgtgatttgatgtaatttcttaataagatataacttcaggaatggatgtaaggctgctcaaatcgctgtgatttgatgtaatttcttaataagatataacccttgatggaagcaaagcttcccttcacaagctgtgatttgatgtaatttcttaataagatataaccgccggatttgaatgcacgctatatgctctgctgtgatttgatgtaatttcttaataagatataacgatgagaaaatacaatcgtttattgtgggcgctgtgatttgatgtaatttcttaataagatataacaatcatcagaaaaaggagatggtttaacacgctgtgatttgatgtaatttcttaataagatataactacgaagaaaagcagccgtattaacaggctgctgtgatttgatgtaatttcttaataagatataacatcgcttaagaattccaagaccaccaaggcgctgtgatttgatgtaatttcttaataagatataactacctggaattgctgaacacagacactattgctgtgatttgatgtaatttcttaataagatataacagtatcccaagtactattaactcgaactgagctgtgatttgatgtaatttcttaataagatataacagtatacatattccgagactccatgcgatcgctgtgatttgatgtaatttcttaataagatataacagctatggcggttgctcgttaatatacgatgctgtgatttgatgtaatttcttaataagatataacagcatgaaatctggggaagtggaagaactggctgtgatttgatgtaatttcttaataagatataaccagaatacggtgatgtctattcttcaggctgctgtgatttgatgtaatttcttaataagatataactggtggaaagatattttgatccctggttccgctgtgatttgatgtaatttcttaataagatataaccaggatgtgtacgagtaaaatgacgatgaggctgtgatttgatgtaatttcttaataagatataacttctatagatttgcttggtgcaggtatttcgctgtgatttgatgtaatttcttaataagatataacctcgagagaaagatctggaatagtcgaaacgctgtgatttgatgtaatttcttaataagatataacataataagagccccttccttgtcatatagtgctgtgatttgatgtaatttcttaataagatataacttttcaaaggccgtccgtcctctacaccacgctgtgatttgatgtaatttcttaataagatataacaagaagcgcccggtattcgcccatcgtttggctgtaatttgatgtaatctcttaataagatataacagtaatgcaaatataagttatttgtattaattctgaaacagagccagctatgctgcggcatgtgcgctcgtaggactacttcggtagttactgctgaagcggaggttaatcacctgccgcttcttttatataatagttttgtattttattgagaaacatacaataaaggaatttctggatttaaaagaagtcattataccggataaaaaagagaaactgatttctgaaaaaacatccgcggataacaaatgtaaacattagctgtccgtggatgtgcttcttaattgacaatgccttgcacttcttgcaacgtcagctttcctatgataaaaataaggttgaagtcttctttttgcctgttcaccaaaataaactcgttggtaccattcttattctgtttcagataaatagtggttttttctccctcctcgtttatatccattagttcttcataaccatttttagaggtaataaaagaagtttctttcttcaacttagcaatgagttctggtttctcacaactaactatccgaatacagtccagtttggaagctactttgcctatgtccaccccctcagcctgcacatcaggtatcaacctgagcatcgctttggatatatagacggacgtcacaccttccatatcggcaaccttatcgaaaaaactgtcttgtgcataagtaaacaaagaacacaaggaaaataacaaaataatgatagaggtacgtttcataattttatgttgtttattcggtttaactgtttgtttacactctcttgaacttttccggtagtttcctgtaaggattctacctttgccactcctttgttaaggcagacagaaagcatgacgagtgccttttgagcctgtacgtacgcttcttcggaagtaacacaggtatcttgcatcgtggaggaataaggtttgtataggcatatcccaacagagaacaagataaacaaaccggcagctatgcttccgacccatcgtgcccgggtctgtccagttctgtttactttcagcgttcgtttctcacagatagcccactcatctatctttgcactcaacctgcattccaacccgtccggtatttcgggttcagagaagtcacccaattgcatgaaaatttctttctgggcaagcagatgagcgggcacgtcttcttcagtaaagaaacgcttcaattccttttcttccgcctcgtcagtcactccgtcatagtaacgaactaatattttgtctatttcacttgctttcataattcatcataatactatattgttcacgtatctttttccgggcacggctcaacaacacacgaatgttgacggcactcaggcctgtggcctctcctatctcttcaaaagaaaagtcattcacatcccgaagcaaaagcacctgtctctgctggtcaggcaaacggtcgatcagtcgcctcaactggttcacctcatcttgttgttccacctcccgaattatgttcgtgtctgccggaagttttagttcttcagatacccgtccgtccttatccggttgaacccggcgtaaggtatcatagcacaggttcttgataaagacgacacaataggcttcggggtttaggatttcagtcagttcattacgcttgttccacaatttcagatacgcttcctgcaccatatcttccgcatcccgggaatttcccataagccggtaggccgtccggtaaagtttctggtggcagggcaaaaattgttgtttgaattcagctgcgtccatgcttcttccctgtttcctgatttaccagtttatctatatcgtctttggtaaattttccgtttatctgtactattgcacagtcttcttttccggcacacacgagcaataattcgcaaatagtttctttcttcatcctcatcagcacacgcaccttttcaccttcatcgtttacacgtatcagctcatcatacccgttaaagcatagtttatccacttcccgatgaaagcgttcctttacgttcgtctgacagtcatccaaatccagaactcttattgattttatctttctcaatatccaggcatcttcatcctgtccgacaaacatgctccctaaggacatgattagacgagagactttcacacattcggcattcttttcgctgctaaatttatccaaaagcccgtctacattttgggcaaaactcatgcaacagacgcaaaatagcaataaagtaaataaacatttcttcatggttcgatttttttgttcacactaaacttgttttttaaagcgctttcaacatcatagacggggaatagaaaaaagttgttacaaacaaaaatgataataatatttcaattacactaaaattctccctttattccttcaaattaaagacctacggactcttccccccctcagacaaagtctttcagagatatatccataatggccatatctgaaccgatactgatatcttccaaccacaaagcccgactgattaaccgtacagttatacacccggccgaggcaaaaataaacagagaaaaaaatctaaaggaaagacaagtcacctttattcaggataaaaacattctattcttttaccccatacactttttgggccagcaatttcacccaataaacaaaaactccggtcaataacagatttaataccaaactgaacacggatataatcaggaaagggccgcctaaattataccccaaagctattactatgataccagctccaacctctccgcgggtgaacataccgatagaaagagccaaccgttcctgtatctggcggtcacgatagaaaaacaaaggaaacatctttcccaaattagacaaaaaagtaaccaccaacacatgtccgaacaaaactccccaggaaggcatgggctgggatgcaatcacaccgcttgcctccactgcccgggcagcatggtctatccccataaattgaggagtacttaaccccaccaaaaacataaataaataggaaatgattccggtcatcctttcctcctgccggccgtgttgatgtacggtttttattaccatccccagcacgaaagcaggtaacaacacttcaatatgtattcccccatccgctcccatcaacatcttcgataacagataaatactttccgtagcagcaacgatacacactgcatacaacaaaacagccttccatccctgcggtattcgaaaagcacccaattttttccatccgatagccagcaatacacaaaccaccacgatcaccaccagcaattgccacttgaatccgatcatcagaatctgcaaaggaatcatcaacaagatggtatccagatcatcaaagatagccaacacctgaaccttcttgtagatccacttgggttttcttataaatccactcctttcgcaaacccgccgcagccaacatagtaaaaagaatacccgccgaagtcggagcagcaaaccgactcaacaataaattttctttacaagcctcccaattccagaacaaatgggaaggtaaaaggcacatataataaaatgcaatcaataaccagggaacagcagccgtggcgattgctataaaataatccgcagtataggacttccaacaacttttatccaattcaaactccctgccaacattaatcatgataaaggccagacagacaaacatcaaagtcttgatccccttttcaataacatcaaacgaactctctaaccagacaggcaaacactgtgagaacaccaatcccaacaccaaaaagaaagaaaacaataaaacttttttcatatacgctaattatccatttattgtctaagaaagtaaccattctttcttaatccggggacaaaaataaaaaaataggcagatacccccaatgataccaaagaaaaataccagcgagataaaccataaggatttgtttatctcgctggtattaattatttaatcttctaaaacagactaatattcatcctcgttgaagaaaaaatcatccttgctgggataatccggccagatatcttctatactttcaaagatttcttcatcatcctcaatatcctgcaaattctcaatcacttccagaggagcgcctgaacgaattgcataatcaattaactcatctttggatgcaggccatggtgcatcttccaattttgaagcaagttccagtgtccaatacatagctatattgttttttaacgtttccctaaaaatttccgcaaaagtatatttttttctctaataaacaagaataatacattaaattaacaccttgactttacaagaatgttgattttaaaacgatataaatgcggaaatgttacaatatcagagaggttcaatatgaatagttgcctccatattcattttttccttaatttgcttttcaacaagggttgcctgggtgtgagcctcccggacagtctcgtcccccggaaccttcacatgaaaagtaaattctatatggtccccgtaatgatggatgtggtaatgatgaggatatgactgctcccccatataagttttcacaataacagcaacctgccgggtaacatcttctgccggttcctcgccaagaatcttattaacagcttcccgaataatgccataggcagcatgaaaaagcatcagagaaacaattattcccagacctgcatcaatccaccagaaataaccgcttaaaaataatccggccaaaaccaccaatgaagacaaggcatcactccgatgatgccagccatccgcttttatggaagaatttccggtcaaacgggctacacggaaggcatattgtgccaatgcctctttccctacaacagaaataatcgtcacaacataagcaagccaaccgaaatcggcagtctcatgctgttggaacttccggaaagcacttgtcacaaattcaattccgacaaataccagaaccatagctatcatcaacgcaaagacctgctcccatcgtccatgcccgaaaggatgcttcttatccggtttctgtgaagaaagacggatgccccaaatcaccataatggaagtcagggaatcggacaaagtatgccacgcatctgccaccaaggcaacagaagcggagacaattcctgcataatattttaccgcaaaaaggaaaagattcaccacaatcgaaacaattccttcccgataccctaaaccggtatgctgttgcgtatccgtattcattttctttgactattcatcagaaaagtgttgcaacaccctgcgataagtgttaaatattttcgctttagatacgaaaccgacgtacttctcgttttctatcaccggtaaattccaggcttgcgtatcttcaaatttcttcataacaacatccatcggatcggttacatccacaacagttggaggtgttgtcatgaaatcccgcacaaaagtagtatcgtataaatcctgattaaacattatcttacggatatcatccaacagaacaatacccagcaaaccttcatcctcatctatcaccggaaaaatattccggctcgaacgggatactttcttcaccaaatcacctaaggtggcatttaccgaaatagttttcaggtctgtctcaatcactttatccaatttcattaaagtcaagacagccttatccttgttatgtgtaatcaaatctcctttcatggccagacggcgggcataaatagaataaggttccatcccccgtcctgtaagatgagcagtaaccgaagcaatcatcaaaggcaccaacaggctgtacccgctggtaatctcagcaatcaaaaacatagccgtcaagggagaattcataacacccgacatcactcccgccattcccgccaagacaaaataacttaccggcactgtcacgatccccgtcatattaatcaaagtagctatcaagaaaccagtcaccccacccgtaaacaaactgggtgcaaaaactcctcccacaccgccgctaccattcgtcaatgccgttgcaacaactttcataaaaaccagacccagcacatataaaaccaacacaaacgcataattccggaaatcaaagaaataggtattttttaaaatagcatcggcattatcagtcaataaattttccaaagacgtatatccctccccatacaacgaaggaaaaacataaatcaataatcccaacaatgcacctccgattaatatcctcttaaactgattctttattcccgtaatccacttttcaatctttatattcagacggataaagtaaacagacaccaatccgcaaagaatgcccaaaagaatataataagggacattcgccaaggcaaaatggtcatgcacggcaaattccagcacaaccccttctcccatcagaaaataaacaataacatacgaagaaatggcggaaatcatcaaaggcaccaaagaagccatcgtcaagtcaagcatcagtacctcaagggtaaaaacgataccggcaataggagctttaaaaattccggcaatggccccggcagcaccgcacccgatcatcagggtcattaccttataattcatccggaaaaaacgggccaggttagaaccgatagaggcacccgtcaaaacaatagttgcttccgttccgacagaacctccgaaacctatcgtaatcgtactggcaatcatggaagaataattattatggggctttatcatgctgttttgcctcgagatggcatacaacaccttagtaaccccatggctgatatcctccctgacaaaataacgcacaaataaggaagtgagccagataccaataaaaggatagataaaaaaaagcagactgccgctgtcta

SEQ ID NO: 412 - DNA, 19807 bp, synthetic construct
  misc_feature 1..19807: note = Synthetic
  source 1..19807: mol_type = other DNA
ttcacagcagcggatactgttgccgacttacacggcattcccttttcatcctccggcattgaatatgcttttggaaccaaacgtgtgcaaaagtaatggaattgacttaggtaaaaaatttatttgaaagaaaagttgtcttctttagaaagaatatagaaatggttaaatggtgacttgttaatttgataattcggttatttgcagacagttttagtatcatgatgaaatggcaaattgcataaataagtaactatttcaattctatagttcatcaatgaaccaaaccaacttataatctcatcaatcattaatgacaacatttcacttcctgtgtttcttctttaaattctggacttatataaggaattccaaggttcattcctctaaggataaataataagcctagaataataataaatgcaggtattgccattcttagtcggtgcagaaggcgacttttaatgatattggcgaagtaggccactgcaaacatcaaaggaagtgttcctaatccaaaaaagaccatgaatattacactatcgctcaccgtgtcggatgtgactgctctggatatagcaacataaaccaaaccacaaggcaagaatccattcagaaatccaattatgagaagattacctaatcgcttacgattcaatgagtcacctattttctttttaagctgtgaatatatactattcgatactttatttcctgacttaggcatcttaatgacgccaggtaacaaaacagataaaatcatcaatacaccacaggcaattgatacccattgctggatacccgacaattttaaaccagcacctaacaaaccaaaaattagccccaaaataccataggtaaatgctcgccctacattatacagcattgccccacttgctttttgagcaactgattttgttggtaatggtaaggctaaggctaacggtccacacataccaacacagtgcaaactacctaaaaatccaaaaataaatccttcaactatatacatataatagcttgttagtcacgatatcgatcgtgatagtcagaaggcagtagcttaatcgctaaccaactaacatctataattttacaaaaaactggttaaaagtataaataactgacaatcttactaacaagatacttagcgacacattgtgcataaataactaatcaatatagacatcaagcttcgtcaaataaggcttttgaccatcttcccactcgataattaattcatatttccccttttgaaacgtcttcttatcaaataccatcttaaactcattgtctaatttgatttccttttcgatatccaactgcttatctgatggccgataaaaatggatacctccctttatctgcttttcattatctactatttgtggaaaaacaacatttatgtcggcatctgtcgtaatggtcactttatctgttaaagcattatagttacgcgtcttttctatttggttatcgtatttcaactctttagggtaataatcctcagtaaccatatctattttctctcccgtggttataaataccattgtcaagaaaccaccaatagcaattgccagaactaaaacgattccgtatccccaattaaatttcatatctaaatttgatttttatgaattatggtcctacaaatgtggtatgaattgtttcgatcaattcatctccattatatattccaaggacaatttttgtgcttgatccacttaactgctcttctttaagcttaatcaaaaataccccctggatcttctcttgttttttaacaactaatgaactgccggctaactcaacttttccgtcgggtgataccagtttaatacttaaatcaccttcattatccgttttgtttacgatcttgtagttataaatatttgaatacaatccctcatctactttctgatacaaactaccttgcacacgtaaaatagtggtttcgtagcttgatcgaagtgtaaataatacaatgagagctccaattaaagcagccgttaatgcggtataagcaaccacacgtggcgtccatttaaaggatgttccctttgtaatattattttgcgatgtaattcgaatcaatccttcaggcaatttataacgcttcataacgctatcacaggcatccatgcacgccgtacaattaatgcactcaagctgaattccatttcggatatcaatgccggtaggacacacactcacacacttaccacagttaacacaatcgcctttgccggcttcaactcgatcctcaccctttcgcatcggcgcacgagcttctcctcgtttgaaatcgtaggttaccattaaggtattattatcaagtaaggctccctgaaagcgcccataaggacataccaatgaacaaacctgttctctgaaataggcaaacacaaaatagaaagcaccggtaaaaaccataatggcaataaacacacttatattttcacctggcgaactaacgatgtattgcttaacctcatctgcgcccacaatgtaggccatcattgtatgagtaatagcccacgaaataagaatgaaaataaagtgcttgagaagcattcgccagattcggtcaaaagtatcttctcctttatccctaatgcgctgctgatcaccacttccttcaatccagtattcaatacgccggaacagcatctccataaaaatggtttgcggacatgcccatccacaccaaatacgaccataaacaacggtaaacgtaacaatggaaacaataatggtgattaggccaataacaaacaaatgaaagtcctgcggccagaataccacgccaaacaacacaaactttcgttgtaaaatattgaataataaaagcggttcgccatttacatagatatgcggtgctgcaaagaggaatatcattaagaagatggcaacgatagttcgtgccgtataatattttcctttgggctggttggcataaatccaattacgcctgccctcttcattcatggtgacgatgcgatcgcgaaagttgttgtctgcattgttggtcatataattgtcgaattgtcaaactgtcgaattgattaactgtttaatagctttctatgaaaagcatttagtttattcgatagcaaatcaatatccttcctaaaactcaatagctcttcttcatttataaatccaaggtcatttgacagtattatttggttcaaaacctctaataaactcgaatacgctatttcaataaatctagctctttctttatttgtaatacgtccaatcccttcagctatatttgatgatattgacacgctcgctcttcttaactgatttattaacccatatttctcattttcaggaaagtattgtgtagtgatataaattttcttaacgagttgtcgggacagttgccaaacttctagcttttcgaaattataaatgtgcatattttaattgattaactacaattcgacaattaagcaattcgacaatatccaatatacaagttcaacttttaaacaattaaactcataaactcactataacaaacaacctactccccttccggcacatacttctccccttcaggatcttttgggtttggtggattggtacctactaaggtcattacatagctggacacctgatgtatttgtttctttgacagctgtcctttccaggcaatcatacccttttcaacaacgccattgttaataatacgaacgacatcatcaaaactaccaccatgaatccaatattcatcggtcaggttgggaccaactaatccttgaccttctgccaggtgacagacagcacagttcgtcttaaatattttagcacctttttctaatcctgctgcatctgccaacggcacggaatagtcaatatcttctgtttgaattgtaattcctccggccgcttcttcttcctcttccggattagcagccagcatctcactttcatattcctgaatctgcaattcaccatcgccataaaaatgatacttggccagataaacataggcaaacaacatagagccaatgaatatgaaggtcagccaccagggtggattatttgccaactccctgatgccatcaaattcatgttcgggaacaaacttatcattcgttaacggatcaatttccggtaaatggtcttgttttttattctcttccatagaaaatagtctgtaagttattagtcagtaggcagtagtctattatatttctttctgatgcttaaacatttcataaacccaaccattcagactacctattacattaataattaatcaatcaactctcatttattgaaggcatttcatccgccttatccgtagcataattcgaaacttcatcaatgtattctttcttcatacgaatcaccatgtatgtgacgagtaaaaagaatgcaaaaaagataatgaaggatataatcgggtatatttctacacccgatattgattccaaataatatcttactaacttcatagtttgtttctttattcattttcagccacctctgcaggagctgttttataaatatcggttcctaatcgttgcaagtaacctatcaaagcaattatttctttatcacgatttgcttctttaatacctgccaccttcagattattaacaatcttatctgcctgctcataataagcatctactgctttctcgtcataaccttcttcataaggcactcctagtgtttgcattgcacgaatcttggctggcaaattgctaatatcaatatcttcttctattaaccaagggtattttggcataatagaattctcatttaatttctgaggatctaacatgtggttgtaatgccatgcatccggtttgtagatttttccggtcataacaccttcacgcgccaaatcaggtcctgtacgttttgatccccattggaatggatgatcgtagacaaactcaccagcttttgaatactctccgtagcgttctgtttctgatcggaatggacgaatcatttgtgagtgacagttataacatccttcacggatgtagatatcacgtccttccagctctagcggtgtataaggtttaacacttgatatagtaggcacatttgatttaatcaggaaggtaggaatcagctctataaaggttccgatcaataccgtaattaatgaaatcaccataaactgaacaggtttacgctctaaccatccatgagctttttcacccttctttcctttctttatatcttctactacagcagtggcttcttcatttgcggccactttacctcttgacgctgttttaaataagtttatacccattaacacagctcctatcaggtagattaatccaccaaaggcacgcatgtagtacatcggacgaatttgtgttactgtttccagaaagttcggataagctaataatccctcttcagtaaattctttccacatcaggctttgtgctaatcctgcccagtacattggaattgcgtagaacagaatacctaatgtaccaatccagaagtgagcattggccattttctctgagtagagttttgttttgaaaatctgaggtactaaccaataaagcactccaaaagtcataaaaccattccatcccaatgttccaacatgaacgtgggctactgtccaatctgtgaagtgactgatggcattcacattcttaagtgatagcataggtccttcgaatgtggccataccataacaggtaactgccacaaccaggaatttcagtgtcgcactttcgcgtactttatcccaggcacctctcagggttaataaaccattgagcatacctccccaggaaggagccaatagcatgattgagaatacagttcctaaagactgtgcccaatcaggtaaagccgtgtataataaatggtgaggccctgcccaaatgtatataaacagaaacgaccagaagtgaacaatcgaaagacgatacgaatataccggacgatttgacgcctttggtatataataatacatcaagcccaaataaggagttgtcaggaagaatgctacggcattatgcccataccaccattgcaccaatgcatcctgaacaccagcataccaggagtaactcttaaacagggtcactggtaattccaccgagttaaccacatgcaaaacggtgacggttataaaggttgccaggtagaaccaaattgccacatacaagtgctttacacgacgcttcatgatggtaccaaacatgttccatccgaatatcagccatacaacagcaatcataatatcaattggccactccagctcagcatactctttaccagttgtaaaaccaagagctaaggtgagagcagcactaacaataattaactgccatagccaaaaatgcaggtagcttaacacatcactatacatgcgagttttgagtaagcgctgcatggagtgataaacccccataaaaataccattacctacaaaagcaaatatggcggcgttggtatgaattggtctgacacgaccaaaagttgtatactccaactcgaagttaaagattggcattgccatttgaagtgcggccagcactcccgctgccatacctaccaatccccaaataatggtagcatacataaaatatttgacaattttattgtcgtaataaaacgtctcttgcttcatgtgttcaacatttttctataactaaataaagcattgcctacagccgttgctttgacagtgctttatccgaaattttggattttatatttgtttctttttcctctttattatgctgatcaaatagtattcgaacggatggagagtaatcatcttcgtactgcccggatttaacagcccaaacaaaaagccccaaaaaaatcagagctacacataaactggccaccacaagtacgattattatttccatgtatcgaaatacttatttaataagagattaggcaaaaatagaaaatatattaagactttagtatcttaattacttcattttaccatttacgattaccgcctatatgacaatctgtataaggagtttgtttaacatttattaaagtttttaccgtcaccatgagcatcttattaataatcaaactccaaagcattttgtcattccttaatttttaattctatccgattgatttcgataaagattcatcacttataaattccgcttcttagccgacatcattacactaatgcttgtaaaaactacaaccgagacactacttaatggcatcaaaactgctgcaaaaagaggactcagatttcctgaaacagcaaatgacagccccacaacattgtagatgaaagaaatgataatggcagcatatactattttcaaagccgattttgaaaagcgaatgaatcgtggcaaatacaccaaatcattcgcccggattatgacatcactcgatggtgagaattgatagacttcatccgccactgcaataccaacatctgctgcttttaatgctccaacgtcgtttaaaccgtctcctaccattagcacacgcttgcctgaggccttcaatttctcaacatagtgctgtttgtcgatgggcgattgataaaaacgaatattatcattcttcttaataacatcttgcaatacttcacgctccacatcattatcacccgataaaacatgaacttctgaatacgcctgaactttttgcaatagtgttttccagttgctgcgataaaagtttttaatggtaaaatgccctaattgacggttgtctattttcacataaacacgagctgcctcagaagcttcttttgaggaagcatcgacatactcagcagaacccagcttaaccgaatgattcatgacaattcctgtgactccggctccttcctgttcttcgaaatcgataacttcaaaatcgttataatctgccaggtaacgatataaagcccggcttaaggggtgacgcgattgatgagcaatagattttatcattgacagactatagtcatccaactcttcaccctcaaaattaacctcaaaattatccggatcagtcagagtccctgttttatcaaatacgatcgcatccaccttggttaatcgttcaatgatggacgaaagttttagatacaaatgatttcgtcccaaaatgcgactggcatgaccaaaagcaaacggcactgacaacgctaaagcacaaggacaagcaattatcaaaacagaggtaaaagccataaccgccttggatgcatcctgccaggcccagtaaaaccctgtggccgcacttataaggataatcgcaatcgtgaagtatttactaacagtattaagcgtctgcgatatcatcgattccttttcctcattctcgcttcgctccttccacaactcagccagataacctgtctccacttttttctcaacttcaagcaaaagggcattaccaattaccctgccgccggcataaatcagttcttctttcttcttggcaacaggaacagactcacctgtaataaagctgtaatcgatggaagccgacaaagagagtagctttgcatcggcaggtataatctcaccattacgcacctgtatcttatcgcctgtttcaagttggtgaatcggcacaatttcttcctggttatcattaatgcgcgtaataccaaggggaaaatatgagctgaaatcattatcaaagctcaatgcttcgtaggtttttgcctgataccatttacctatcaggaggaaaaataccaagcccgtaagcgaatcgagataaccagaaccagcatcagtgattatttcaaataaactacgcagaaaaatggctataatacctaatgcaataggcatatcgattgatacaattccacgtctgatatttttccaggcggtgataaaatattcgttgcctgagaaaaacatggcagggattgacagtagcacactgatccacttaaaccacgcaataatatcggcattcaaaacaatgtcatccgacaaataatcaggaaagctcaaaagcatgacattcccaaaaataaatccggcaacacccaatttaataaccagttgccgactgcgcttaaccgacttcttctgctcttcagtttttatgtgtggcttataatttatggacgatagcaaagccatcaactcacttagttttaactgctcttcatcaaaggtaatagacgcttcgcggcgattaaaattaaccgacgactgaacgacgcctttatgcaagcgatgtaaattctcaatcaaccaaatgcacgaactacaatgaatggatggaatatacagcttgacacgtccgattgaaccatcgtaaaaatcaagcacagttctcttaatatcatcctgatcgagataatcgtaatactctgctgaagccgctttttttctaattccaggtgccttttcaatatcgtaataagcacccatatcattatctttcagtatatcataaaccattacgcagccttcacaacaaaagtctttatcgtcgtgacgaacccacgattgagatgggcttccgcaatggtagcatgttttggacataaacctgttttaaagatgtgcggtagtataaagaataaagaggttgaattgtttaatttggattttttaaaacaaagagctaacaggttttcaaaacctgttagctctccgacaaaaaaaactcccaccgaagcgggagtataggattaatttccttcggcacatggccttattgtgataagattctaataagcatttatccaaaatcttactccaaaaatataaaaagttaattaacatacaacacataaatcatgaaaaataaaaacacaattacaaagtcagcttaaaaccactcagtatcacttcataaccatcattgccatacccaacccattattttaatgtcataaaaacaccctttaactacttaaaagttcaaatgtaaatcattaatcctgatcatctattggtagaaaccacttcatttgctacatttaatgtcgattttatgaacaacaaaacattaccctattaataatacaaatccctaagagatgagcaaaatattaggacttgacttgggcactaacagcattggctgggcagtggtggatgccacattcaaaaacaataaagtagaacaatacaactgcattgatgattgtggcgtacgtatatttccagcgggcgttagtgatattggtaaaggagacagcgagaaatcaaataatgccacccgaacagaaaacagacaaaaacgtcgccatttttaccgaaagcgccttcgtaaaatcaagcttcttcaagtcttaattgaccaaagcatgtgccctttgagtcatcaggaattaaatagctggaaaaattgggatcgtcaacaaaaatcagagggcaaaaaatttcctgatgcggaagaattcagaaattggataaaactcaatccatacgaattacgtagcaaagcactttctgaaccaatcagcctctacgagttagggcgtattttctaccatctcattcaacgcagaggtttcctaagttccagaaaagggaatgacgaccccaaaacactatttgaaaagggcaaaccggaagaaaacatcctgcctgttaacgccacaaaagaaaaagctaaaaactcaagcttaggcgactacctgtattctattatcccgcaagaaggagttccgtacaaatcaatccgggatgaaaatgggcaaagtattcgcgtaaggggcaggtacactacccgtgatatgtatattgcagaatttgaagcgatctggatcaagcaagctaagcaccttggcttgaatgagcgcatggcagaactccaaagaaccagggaactaaaaggttcgcttgatggtaaacgtaatcaatccagaattcaatatttaaatgaaatatatggtgctaaaaatataaccatcagcccgcaaaaagatggacacattactaaggttacaacaacatcaactgttccgttaaaaaacttcctggcgggaaacatacaggagatcaatctggaaaacggtgaaaaagcactccagtttaaaagcaacgaaagcgtcttgttctggcaacggccacttcgttcgcaaaagggattattagccaactgccggtttgaagataatctgccggtaattaacaatgaggataactttgtatttgataaaaatggtaaacagattaagcgaagtaaaaagccatgccctctctcccaccctgaatttgaactatttcgcacctaccaatttcttaacaatatccggtatggaaaaaaccaggttttatcagacgagcagaaacaacaggtactacaattaatcaataaaaaagataagaattttaatttctctgaaatccccaagttattaaaactcacttatgagaaatttaattacgaagatgacctgaaagtagccggcaataccactattaaacagttacaaccgctgtttaagcctgaagtttgggagaagcacatgcttgatatctggcattgtttttatttctacgaggacaatgagaaactatttgaaaaactacaaaaggactttgcttacacaaaaagccttgatatcatcaggaaagtaaagcttaaagatggctatagtaacacatcgctgaaggccatccgaaatattcagcactttctacttatgggcttacagttcgatcgggcggttattttgggcggtataaaaaatgcctttggtaaacgttatgagcattttggagaatcagaacaagaacttaaagcgggtgttctaaaaattttaaatgaaaacaataaagaaggtgaagcaatcgagaagataaaggcctacttatcaaaccctgataatcactacggctttgccaaagatgacccgcacttttcgcacctttatcaccacagccaggagattgaagaaaaagacgaattggcattgtgggtacctgaacttgaaaacctgcgcaatccaatcgtacagcaagctttacacgaaacacggcgattggttaacgcattattgcttaaatacagaaaagaactcggtgacgattttgaatttgctcagatcaaggtggaaatgggtcgggatttacgcaacaacaaatcccaacgtaaaaaaatcaccgataacatttctaccaacgaaaccaaaaataatgaagccagagagcgattggccgaatatggcttacgcccttcgaggaacaacgtccaaaagtatttaatgtataaagaaattgttgagcgaagcggcaaatgcacctgcccatatacaggtaagatcatttctataaatgatttattaggcaacgctaatgccattcaaattgagcacatcatcccttacagtgtttctttggacgatagctttggcaataaaaccctttgcgaagcacatttcaataatgataagggtgaaaaaacgccttacgaatattacaccgaaaatcctgactcgaaaatttggggagctaatagctgggacgagattgtggccagagccttccatacattgccttatccgaaagccaaacgcttcacatcgaaaaagaagtttgagaaagaaacatttattgaacggcaactaaacgacagccgctatatcgcccgaaaagcagtagaattgttatccaatatttgtcatgatatacgtgtgatgccgggtcaattaacagccgaactccgtcacctttggggacttaactctatattacagccaactcaaagcctcgtcgagcatacatttgacattaacgatgataagccagttccttattatgctatcactaacgaagccggagaaacccttgccctgcataaaaaatacaacgaacgaccagccacaaacgaaaacgaactccttctatcaggatacgcctctaaaaacaaatttgatgctaaatccttcaaaattgactttaaggatgttgacgttaaagatggtcattactgggcaaaagtgaatgtaaacggttctcttcaactgatgcctcagtacaccagtaaacctcaatctgataaaaaccacatagtattaaggggtaaggttgaaaaagggcaatttaaaaacgatacttccggcaactataagactacaaacattgaagacggaagctattgggccaaatttgaaataacaaacacccaatttcaggcaccggaaaaaaacaagcaaccaaaaacaaaacgcaaccagttattattgtttggcacggttcataactgtgagttcaattgctatatctacaattgccaaaccaacctgcctgacggaaaatattggttaattgttgatatttcaccagacagcattgaatttattaaggctgttaacccacgtccgcaagcgcataacaatgaggtttgtatttcagctaccgtggatgaatatggttatatggtagccgactgtgaccctcaatacaaacgcaaaacagaacatttgcccggaaaatactttgcaaccctaagtattgagtcgaaaccaaaggaattgtatgcggttgaaaaagaacaacccaaagtagaaaaagggcaaaagctggtagaaggctctatctgggtggataaatactccggtgaaattcaattcgacccgaaaaagaaccgcgacgaccaccgccaccatgtcattgatgccattaccattgcattaaccgaacagggctacttgcaacgcctaagtacagagaatgcaaaacgtaaagacaaacaaagaggaaaaacaaacagcaccgaaaaattcccggaaccctggaacggatttaatctggatgttcagaaaaaagctgccaatatcctgatttcatttaagcaaaacaacaagacgcttaccaaaaacaaaaagggatttagcgtaagggggcagttgcataaagagaatgtttttggtttgaggcaaagcccgaatatggaaaaggcgtttcatcgccgcacaaaagtaactgaactgaagaataataaacatgtggctaaaatagccgacattaccattcaagaacatatcaagaaatttttgaaagaaaaacacggaattaatacagaaaataccaaggggtatactatccctaaagatgcttttgtgagtaatggcgaatggcagttattccttcccaataaaaaaggaggggatgaagttccgattaaaaaagttcggattcgggaaatgcttggaaatgcaaaccgcttaaaaggcgatttaaaccaacatgttaatcctcgaaataaccatcatgttttaatctacaaagacagtgatggaaatttaaaagaagataccgttcaattctggacagttgtagagcgcaaacgtcaaaatatgccaacctacctattaccggaagatggtgatacaatagtagccactttagaaacaaacgatatgtttttattaggattaagtgatgaggaattccattcgaacatagagaataaacagattttaagcaagcacttataccgagttcaaaagctatcgtccatgtattatacttttaggcatcatcttgcatctacaattcaaaatcaggaagaagagtggcgaattgtaagctttaaagcctgggaagaagcaaaccctattaaggtaaaaatctccccactcggcaaaatacaaaaactataatttaaacctaacaggtttttaaaacctgttaggtagtaaaacactattaccactacaactaaaccttcataataacttaattcagataattatgaccgaccttactccacctcagccattaagtcccgttgcatagccaaggtatagcttacagccagtctacaggattagatgacaaagacaatagcattctaatccctggcataaaggtgcaaaccacgacgatctggtatcaaccatcggagaaacctttaatagttgagcgaaaagctaactgtaaaatcaattatacctgatattgatgcgaactgtttgatacgacagatattctgatgcaaacaaacgcgataagttacaagctgaaaccaagtaataggcaacattagcgaaataaaccttgccaccggcgaaatgatactaaccgcagcgaacaagcctattacaatggtttagtagagttcgctagcgtacctggcgtttcgctctggcataaagcagttcgctccattcaaaagcactttagttaagtacaaaagctatatgcttaaataatgaatcaactatttgtcaaaccatttaatattttttaatcatgaacatgtcaaaacttaccgttgccgaatttctgtaccaaagtcgccttcgtatccgaaactccattgaagattcgtcgatacagtcggccgttgcccagttgggctatacacctgaacgactggaaacaggcgagattttactgacagaatcggagcaattatgcaaggtctttgaaaaagagcatggcgaggtggctcaggcctttgccaaccggaacagcgaacgtgaaaaggccaacaaaacctacaagatacacctggccattgccatcatcgtatttaaaaacgataaagccgcccaaacagcgcttcaactgtcaggccgacgtgctactacattaagcggctggattcagcagtgcaataacttttacagtaacctattggccaatccggactggctggctgaaatgaacaagcacagtattagtgaagaagccctgacagcaggcaaacaattaattgccaatgtggcgagttatgccgaggtgatcatgcgcgaaaaaggcgatgcacaacaggccaccaaggagcgcgatgctaaacttgaagaactggcagagtgggtgaacgactacgtgtcgattgctaaactggctttagccgacagtccacaattgttggaaaagctgggtattgttgtgaagtaaattccagacctaacaggtttttaaaacctgttaggtcttcaccttgataatactaatggccctatgaaatatcagccctttgaacccgaccgttactaccacctatataacaggggcaataaccgggaaaacatctttttcgaaaccaaaaactatttatattttctaaaacttatttcccaacattgcttaccctggatcgatatttattcctattgcttactgcccaatcatttccatttcattttaaaaattaaaaatgaagatcatttaccaatcgattataaaaacggtaagaaagctctacatcaaccattttccaactgctttaatgcctactcaaaagccatcaacaaaagctatatgcgttcaggcagtctctttcaggaacacctcaaacgcattgaaataaccagcccggactacctacagaacttaatcatctatgtcaatacaaatccggataaacacgagatagctcattcatttaactatcggttctcttcttaccaaagcctgatcaccaataaaaacagccacatctgccgagaggaagtaattgaactattcggtgatgtacagaacctgaaatacatgtttgaaaagcaacaatataatttatcactgataaatgaattaacttttgaataaccaatacctaacaggttttaaaaacctgttaggtataaatacaccaaaccatgttaaagcgcaccctattcttcaccaacccggcccatctaagcataaaagaccggcaacttaacatccagttaaaagatagtaacacaagtcgcaccgtacctgttgaagacattgctatggttatattggaacattggcaaattaccattaccatacacacccttcagcaactaaacgaccacaatgtagcagtggtatgttgcgacgaaaaacacctgcctgcagctatgttactcaacctgaacagccaccacctgcaaaacgaactattttcgcaacagatcaatgcctcactgccattaaaaaagcaactatggcaacaaaccatacaggcaaaaatcaaaaaccaagctctgttactgaaatccaaagggaaagaacctggctcactgatggctttggctgcctctgttaagagtggcgacagcagcaatcgcgaagggacagctgcacgtgaatactggggacgcttatttggcagcagctttacccgcgaccgctatggcgatccacctaaccaactgcttaactacggatacattgtattgcgctcggcagtggctcgggcgttggtcggctcaggcctgcttcccacccttggtattcatcaccacaaccgttacaatgcctactgcctggccgatgatgtcatggagccttatcgcccatatgtcgacgatgtggtgtacgacatgtgggaagccggcaactacgacctcatccttgataaagaaagtaaggctcatttgctaaaagtattgagctgcgatgtgctgattgggcaggtcaaacggccgctgatggtagctctgtcgatcactaccgcctcgcttgcacgctgttttagcggggaggataagaaaattacttatcctatgttttaagctttaacacctaacaggttttaaaaacctgttaggtctcagttaggtctctgcataataccgactatggaacacacgcgattaaatgcctaccaaattatgtggttatttgtattttttgatttgcccgtaacaaccaaaaaagaacgtaagctggctacccgctttcgcaaagagctgctgaaagatggctttacaatgatgcaatggagcgtgtatacccgtcattgtgccagccgggagagtgccgatgtacatgaaaaacgcatacaaaactttgtgcccgataaaggtcaggttaccattctgcgcatcaccgataagcaatatgccaacatggtcaatatctggggagcacaaatacagccctcagaagatgcaccgcagcagttggagttattttaaaatttcgtaacagacctaacaggttttgaaaacctgttaggtctccataaaaaaagatttatacctttacaaacgctctttgacatgctgaaaaaaaataccactttgttagtttcaaatatacttccgtgttaatttttgcaataaaaaacaagctgaatacaccataattagtgagttgtatggcgcgcggttgtggtttgattctaataagcgataagatataccaatttcacagttaactttagttgtaagtcagttgtggtttgattctaataagcgataagatataccagtgacacacgcgccgcgcgttatccttgcgttgtggtttgattctaataagcgataagatataccttcgtaagcgcgaatatagctttgttcgctggttgtggtttgattctaataagcgataagatataccgcaatcgtatttaaagcatcacaaatattgttgtggtttgattctaataagcgataagatatacctcgccttgtgttattttttttgtaaaggaggttgtggtttgattctaataagcgataagatatacccagatctattgatttaaaacccgagtttcggttgtggtttgattctaataagcgataagatataccaacggaaggagtgttgcttatttgccccctgttgtggtttgattctaataagcgataagatataccctcgtcgcccacattaatatcgctatcaatgttgtggtttgattctaataagcgataagatatacctatatcattattgggataaagcaccgtttgttgtggtttgattctaataagcgataagatataccaacttggtaatatcaagagatttattaattgttgtggtttgattctaataagcgataagatatacctttgatgtaaatataagtaaaaaaattttagttgtggtttgattctaataagcgataagatatacctttacaagtccgtttacaacgcctccggcagttgtggtttgattctaataagcgataagatatacccaaactgtgtttaaaattatcaagtcgtgcgttgtggtttgattctaataagcgataagatatacctaaaaacaatgtggtgtttggagcaagcctgttgtggtttgattctaataagcgataagatataccgtaggtttctaactcttctcgctctaccccgttgtggtttgattctaataagcgataagatataccgttttccataaacgaatcgattattatacggttgtggtttgattctaataagcgataagatataccgcctttttctacagatccggttagtgtggcgttgtggtttgattctaataagcgataagatatacctcaatgaaactctattaggagataagattggttgtggtttgattctaataagcgataagatatacctccgaacggatcggtaatactatttaaatgttgtggtttgattctaataagcgataagatatacctaaatgtactgtttcgtgcaaaggcatagagttgtggtttgattctaataagcgataagatataccaaaatttgaaatggtatgaaaagtaaaatggttgtggtttgattctaataagcgataagatataccgctgatgcttatgctgcttatgctgctgctgttgtggtttgattctaataagcgataagatataccagatatgaaattacctcgaatatttagccggttgtggtttgattctaataagcgataagatataccaaagcgacgaagtaatcgaaaaggaaatgagttgtggtttgattctaataagcgataagatatacctaacgaaattgaaacgcctccggctaatatgttgtggtttgattctaataagcgataagatataccaccgacacacacatgaactgcatgataaagttgtggtttgattctaataagcgataagatataccatataaattaaatcatatagttatgaaaaggttgtggtttgattctaataa

SEQ ID NO: 413 - DNA, 16075 bp, synthetic construct
  source 1..16075: mol_type = other DNA
  misc_feature 1..16075: note = Synthetic
ggtaacctgaatttttaccggcgctttacggtgtttggcaatttcagtgtcggcttcacttttccaggtttgggcatgcaaaacacaggttgttaatagaagataaaaaggtataagtaattttttcatggtactattttagttaaatatccgaattacttcattcaattatttgagtaatgtcctgatcaccaagatcaaacagatttgaaatcatttcacaacaaatatattttttcattagttcgtaaaacgtaattctaattgaactctttaaaaaactgttttttcaagcgtgtcgaaaaatataatattcctactttttgtacgtctttaacgcaagttaaaaacacaaaggaaaaaggaaataaccgtcaattcaaacaaaaaagaattggcattagaaatcataaaccatcacatggcactgaatattttacttttgttttcctcaaccaatgccccggggatggtaaaaacaaataccgatcctacctctgatgtgctttcaatccatattttaccctggttacgttcaacaaattctttgcttagcaacaaccccagcccgtttcctttttcttttagcaagcctattgtagaataagcatacttcttgttaaatagttgatccagatgatctgcattgataccaacccccgtatcatgtactttaatatacacctgattgttcttttcgaaacattcaatggtaatgtttccggaatctggagtgaatttaagtgcattggaaagtaaattacgcattaccagcttcaccatttcaggatcggcataggcttgtataggcttgcttatactggtctgaagctgaatatttttctgtgttgccagggggttaaaatgcattattttttcttctatcaattcatttatcgaaaacaattgggcttttacatgtatacggtttaattgggcttttgaccagtttagcaggttatccataagatgataggtggcttttgcactttcatcaagcgattgcaatgtgtgttttatttcgtttttagtcatagtgtcgaaatgctgtgacagaagttccaccaaattttttgtccagaaaaggggattgcgcatttcatgggaaataattgaaaacaagcggtctttctcataattaatgcggtttagttccttattgagttttttaaaagattgatttgtcgactggaccttgtggttgaggtcattcagcatacggttggctttgtttttttgtcgcatccgacttacgatcaacccgataattcctgccaatagcacaagaataaatgtatatagcagaatgaactgatttttgcgttggatggataaattcttcaattcattctctttgcgcaacagttcgtttatatgttcctgctgatcaagctcataagccacctgcatttcggccagctttttattacgttgttcattaaaaaaatagtcgttaagaccgatgtacagttccacataatgcagtgccctttgcttattacccagagcgtcgtgcatttgataaagtagttcgcaggatttccgtaaatcattcctaaactcttctttttgtgctaattcgatggtttggagtaaatagtactcagctttatcaaaaacttcaatttgtaagtactgccctgctaaatcgttggccgctttaatctgacccttgacataccccacctcttcggccatattaaaagccctgtgaataagataaaaggcagttgaatcatctccattgatccaataaatccttcccaggttgttggatgctttaatctggcctttcttgtatttaacctgctcacacagtagcagggatttttggtagcatgccctggctgtatcatattggccgagtgtttcaaaaatctcaccaatatttttcagcgactttccctcaccctcagtgtatgcaagctctttacgaatcaaatacgcctgtgtatgataatgcagggctttatccaggttttcaagtatgtggtaaatattacccaaatgattataggtggtaccgattaatactttatcatcgatttgtttcgtcatgctgtcagcctttatatattgacccagagcaccggtgtaattacctattgtctcaaaatgtttacctattttattatacaatgaaacctgtaattcggcatttccggtttgaatggcgagttcaagcgattcttcataataagcaatggactcatccatcttgcccatagtatggtagtatttacccatgtaatgcaggcccaatgcctcgtttgctgtgatattataacgacggctaagttgaacagcatccaggaatatcagcagcgatttatcgtatagtcctttgttataaaactgttcacccatcagcatcattgagcgggttaatacatcatattgctgatgggctttggctaattctattgcttgcttaaatacccgaatggcctgattcacattcccctgatatgccagtgcttcggcttgaagcgacaaagactttatttgttgcaatgtatcattctttgtaatggccagttgaagtgccctgttagcgtggagtaatgcactgtcgttatcaacattgatccaataggctgctttttcgttttcttcttcaatgagcaaatgtgtttttcgtttttcaattgtcttgcatgccaccagcagaaaaagcagacatattccaattttagcgtataatgccttgatgaactgcataaagagttaattcggtgtttgacttcagactaagtttgcgcataatattgcttcggtgattatcaacggtattggagctgaccgaaagttttttggcaatctctgatttctttattcccgagacaatcaggtacataacctgaaattcacggtcggtaagttgttgatgcccggacttggtatcaccttcattttcgatcatatattccgaaataagctccaattgcctggaagtatagtactttttacccgtaagggctgtacgcatgcaatcaaccagtatggcagggtccgattctttattgatataaccggaagcccctttttggaacagcctcagggcataattatgttcgccgttcatggtaaatacaaccaccggtaaggtaggattcatcagttttatttcatccagaatgccaaaagcatccttgccgggcatggataggtcgaggatgattccgtcataatttccgttatccagttttacaagcagctcctcgccggttgagcattcatctacaatacgcatatcgtgggtggcattaaatataatttgcaccccggtacgcacaactgcatgatcatcagcaacaatcaaccttttcatttcttgatattatgggtgctgtaaaaatccgaatactgggttaattgtgtataagtttagctttaataaatggttagcataagtttaagtttttggttcaagtgcttcaagcattttatatacttaactgaatgatatgtggttataaactacttagtaaaaagtactatccctttgccataaaatgtactattgatatgattgggtattgggtataacattgcctgaaaatttgaaacaaaaaaacacattaattatgaaaaagattttactaagttttgcattattaaacatcatgttcttggcagtaaatgcccagggaaaacttgaaatacccattattgcaacgggtggcttacaactcgacaccctatttgttgaagatgaaaacgaggtggttattgataccattccaattgaatttgaattgtcttcggacgatgcagagcaagagaatgatgctgttgacacaccttacgatgatgatttggatgctggttgggaaggtactgaaggagatgccaacactcttacatgcggtatgcgctttcagaatattgaaataccacagggagaaactatcgattcagcatacattgttgtatactctcacgaagcgaaattcgatgatgatgtagctgagattaccatttatgcagaagatgctgatagcgcccacacctttgattcggtaggttttaataaagattttttattaaccgatcgcacagcaacaaccgcacaagttgagtggacggtagctgaggaatgggctatttggaaaccgtatcgcacgcccgatcttgcaaccatcgttcaggagcttgtgaatcgtgacggttggaaatcaggtaatgccattgcctttatatttgctggtgaagatcaaggtgcaagtgatgtagaaaatgctcgtgaatgggaagccttcgaaaatattgctgatccggaagatgaagatgcggatggtaatcctggcgatggacaaaaccacccggaacgtgttccaaaattggttgtatattggggcggatatgtagaggtaaccgatattcaacatcaagaactagctacgttggaaatttatccaaatccggccgacaatggcattttaaacatcaatttagagaatgcccaacaaacagaaattgaaatagttgatattacaggtaaaagtgttttgaaccaatcaactaaatccaatcatgtttctcttaacgtatccggatttaattcaggtatctactatattaaagccacacaggacaatattacttatacgcaaaaagtaattatacaataataacataaagtacttaccatattaaataatgtggtaagtactttttccactctcttttagttaaatatcccatgctacaatataaacttaccttacttttttgcattgctttttcaataattgctgcaaaatcacaagtaataactgttggtggtaaggtagtggatgcaaccacccaagaaccattacccggtgcaaccattcgtattgagaatacaacatccggaactaccacagatttaaatggttcctttcagttaaaaacaaaaaaatcgcaacccactcttatcatttcctatgtgagttacgaccaggccataattaaaattgatgccaatacacaagatgttcaacacttaaatataaaattgcaacctgccactactgagttagaagaagttgaagttttggggtcggccgaaggaaaagttaaagccatgctggagcaacgtacagctgaaaacataaaaaacgttgttgctgccgaacagatagaacaattcccggatatgaacgctgcggaagcagttcaacgcatccctggtattactttacaaagagaccagggagaaggcaggtatgtacaactgcggggcactccgccagaatacactaattttagtgtaaatggtgagcaaataccctcacctgaaggagatgtacgttatgtgggcctggatattatttccgctgaccagattgaattcattgaagttaccaaagtgttaacccctgatatggatgccgatggcattggtggcaacgtaaacatacaaaccaaaacagccaaggaaggcgaccctgaaataagcgcttcggtggcaggtggttataataatttaagggaaacgcccaattatcagttgcagtttgcctatggccaacgaacaggcaaatttggtatttacctcaatggtagttattatcaaaatcaacagggtgccgacaatatggaattcaaataccgaaaagatgccttttttggcagtgccagccaggaagaaggtgttaataactatcacattcagtatgacgattttcagcttcgccattatgatattacccgccaacgaaccgggctgagtgccacgattgattataaattcccggatcgttccatgatatacctacggggcatgtataataattttattgatgatgaaacccgaagacgtgttatttacacacttgatgatgccgttacggaaactttttatttatatggcgggattgatcgtgatttaaaagaccgtaaaaaaattcaaagtattcattcactgaacctcggtggtgaacagaatatttatggcagcacattgaattacgaagttgcatattcaatagccgaagaatccactcccgaccggttggaaattgcttttgataatccgggccaggctatatttatggaatttgatcgaactgaccccaattggccgcgtgtaacattccctgagccttcgaactcaggtgaagtagacaattatgaagaatatgaattcgatgagatgctcctggaaaataccatgatccttgatgaaaacatatctgcaaaaatggatttaaaattaccttttgactttggccagggtaaaggttacttaaaatttggcggaaaaatgcgtatgaaagaaaaaatacgcgataacaaagcgcaatacttctctcgttatttttccgaagaagttccgggacatacaggaacaggaccggaaaatcttctgcccgaattaaatgatggatttagtgaaaccgatttactggataaaggttatgtggttgatcatgttccttcacctgagttaaccagggagtttttggaattttatccgcaacatttttatttaaataaaacggaaaccaaaactcgtacatttgctgaagattatgaagccaacgaaaatatatatgccggttatggtatgtttcgctacgacttctatagattaatgatattaggaggagcccgttacgagcagaccgatatcgattataatggaacgaatatcattaccgaccggagaggaaatttcgaggacaaggaagacaccaatgtggttagaacctatgcattccttttgccacagattcaattgaaatatacgatcaataataattttaatatccgggcagcagctactcagtctttttcacggccaaatttcgaggatatcataccctatctgcacgaagaacgagacgaaatttcattgggtaacgctgatttggattttccacatgcaaccaatttagactttttattggaatattatggccgcaatggtagccttttatcaggaggcgtgttttacaagcaaatcgaacgctttgtgtattattaccgtatatatgggtatcgggaagacccgagtacaggtgccagtcgcctgcgcatagaggtgccactcaatggtaaacgggcaacggtttatggtgccgaattgcagaaccaatttaaacttaacaatttaccagtttctctgccacgaatcattggaaacctgggtttgtatatgaattacacctatacattctcagaagcaaccattaataaaaggtttccctcaaatgatcatagctattcatttattataggtgaagatttgctttcggacctttactcacaccaggaagaggaaaaattctccttacccggacaagctgaacatgcggctaatctggccgtattttttgaaaatgattggttatacatcaaactttcagccaattaccatgatgcctttttgcatacattaggagccgatcccgatttagatgaattttatgacgaggcctggcatttcgattttacagccaacatttcagcgaccgatcaaataaccgtttttacagatatcataaaccttaccaacgaaccgttaaaatattatctgggctcaccagatcgtatacttcaacaagaatactattcctggtggggccgcataggtcttaaatttaatttttaaaacgtatttatcatgacacaaatttcatatttaatattgcttaccatcacagttacattcactttttcccaatgccaattaagcaaaaacgatgaaaccagggaaacaactatcgattcctccatacacgccattgcagaaaccgatcccgtatcctccaaaaaaggagaagacgcagccgatgatccggcaatatgggttaatccgcacgatccaacgcaaagtcgtgtgataggcactaacaaaaagggtggcctgcatgtatatgatttggcaggcaacgatttattcttcacccccctgggcctgcctaacaatgttgatgtaagaagcggttttcccatgcaaaatgacaaggaaataattattgtcggtgccagcgaccgatcctttaatggtatgagtctgatgcaattcattcccgaatcggattcgctaaaagaaatatctgccgataccgtttttacagccgttgatgaggcgtatggcttttgcctttacaatccgggcaatggcaacgacttttatgcattcctcaacgggaaagatggtcaggttgaacaataccggcttactgccaacaaccaccataaaattaaagccacgctggtgcgtaccctgcaggtgcccagtcagcccgaaggcatggtagccgatgatgaactgggatacctctatgtgggtgaagaaagtagcgggatatggaaattctatgcccatcacgacagtacaacggtagggtggatgattgaagacagccgtgccgataagcatgattacatagtgcctgatgtggaaggcctcaccctgtacaaaaaagatgatggtaaaggttacttaatcgcttccatacagggcagtcattcgtttgccctattcacccgaaaggaaaacaattttataaccactttccgtattactaccaacggtatcgatggcgctgaagaaaccgacggggtagatgtggtaagccaggcattatcaacgcaatatcccaaaggtttattggtagtgcaggatggtttcaattatacacctgactcggtattgcaaaaccagaactttaaatatgtgagttgggcagatgttgaaaagtttatggagggaaactaatctattgttgttaacgcactcattttcatttttcatgtattcggtgtaaattcttaccgtcataaaacggtatatggaatagtttttgaaatatcttttgttaaaaaaaataatacccatgaaggcattaataatagtagatatgcaaaacgatttcttaccgggcggatcactggaagttgcgcagggtaatgaagtaataccggttattaacaaaatgcaaaatgattttgagctggtagtcgcaacacaggactggcaccctgccaatcacggtagttttgcatcgcaacacaacgataaacagccattcgacaaaaccgatctctatggactggagcaaattttatggcccgaccattgcatacagagcagtaaaggtgctgaatttaccaatgagcttcagaccaataatatagagatgattattcgaaaaggcatggatccgaaaattgatagctacagcgggttttatgacaatggccataaaaaatccaccggacttaccgatttcctgaagggaagaaaagttgatgaagtatacgtagccggattggctggcgatgtttgcgtttattacacctgtatggatgccgtaaaagagggattcaaaacccatttaatgataaatgccacccgcccggttgaccagaacgcatttcagaaggccgtggaagacatgcaatcggccggtgtgatcatggaacaatccaacgtataaggcaatccaatgctgttgaattctttattgcctgccaaaatgcgtgaattaaacgttcgcactatggtgtcgtgcgggagtttgaggcgatttcctattgaattagatatagcttacctttatccatccgtaatgctatacgtgtcgtggaatgattaaattataaccacccgatatttgaagacggaatacaacttattgacatgatttatctcagtaaaaaattataatactggccttccacctttacaaaagcgtttgaatatttcataaatccttacagttagtgtagtcacctaactatctatcagttagttattggtggcaatgttttcataaagccaactatattgctgttttacagaaatttattatcttaaatatacaaaatgaaaagatgaccggagaaatgtcagaacggccttttgctaaaaaagaaaccccaccgaagcggggttataggattaatttccttcggcatatagccttattgtgataagattgaaaaattaaattttttctgacaccgaatataacgtataaatacataaaaaccaaaaagaatgggtaaaatattaggacttgatttaggcacaaactctattggctgggcggtggtaaaggcgaaatttgacaataatggcaaagtagaaaaatatgagcaaattgaagatacgggcgttagaatatttcctgaaggagttaaaaaggaaaccataggtaaaggagatttggaagaatctaaaaatgctgccagacgtgaacatcgtcaatccagaaagcaacagtaccgtaaaaaactccgaaaatataagttactgcagatattgattagtttggatatgtgcccattgacgttagaggagttgaagaaatggatgaaatggaataaaaatgagaaaacagagggacgtcaatatccacaaagttcggaatttattgagtggttaaaattaaatccgtatgagctaagggcaaagggagtagaagctgatttaacgaaacccgaatttggaagaatactctatcatttaatacaacgaaggggatttttgagcagccgtaaaggaagtgatgaaggagctatatataaaggaaaggaaaatgttaaaggcattgagagcacaaaacaacatctcaatggtaaaacgttgggacaatatttaaattcgttatatccaaaagaaggagagagttataaaacacaaaaagaaagaattagggcccggtacactttaagggacatgtatattcatgaatttgaaaccatttacaatagacagcgggaacacctcaaactggaccaaataaatattccattcagtaaaaaaagatatttgaccggcggaaaagaccggaaaagaaatcaaaagaaaatggaatacctgattaaaacgaaaggagttgaaaatgtatcgatcaatgaaataaaacacggtaatcgtacagtaactgaaattattacccgggaaattcaaccatttaaacagttcatagccggggatataaccaatgagaacggacaattaaaatacaaaagcaatgaaagcctgttattttggcaacgtccgcttaaatctcaaaaaagtttattagcaaagtgcaggtttgaaagctccgtgtttaagcaaaatggtaaatcaagaaccattggtaaaacaccatgtcctctatcacatcctgagtttgaattattcagatcgtatcagtttattaacaccattcagtttggtaaaagaggcagactggatgagtttcaacaaaagaaagtgatggatttaatggataccaaaaaaggcaattttggattttccgatattcctaaaacattacaccttaccttcgaacggtttaattacgcagatgatcaaaaaatagctggtaatacaaccattagtcaattaaaaccattgttcccggatactatatgggaacagcactatgagcaaatatggcattgcttttacttttatgaggataatgaaatgttgttcaccaaactaacgaaagacttccagttaaacaccaaaagagtccctaacccggaaaaattaaaagatatccaattaaaggaaggttatagcaatgtatcgcttaaagccattagaaatattcttccttttttaaaaaagggatatggttacaacatcgccgtcattttaggtggtgtaaaaaatgcatttggagacaagtgggagtactttcagtcatttcatgatgaattagaaaaggatatcacggctattatttttgaacccaataaggaaggggaattaattgaaaagataaaagattatttgtcaaccagagctttcgattacggttttgaaagaaatgataagcgttttaaaaagctgtatcaccatagtcaggaggttgaacaaaaaacaataaaagagcagttagacccggttgaaaatttacgaaaccctattgttcagcaaggtattaatgaacttcgccggatagtcaattccctaaataaggaatacggtccgtttgatcaaattaaagttgagatgggacgtgatctcaggaataataaaaatcgaagacaagaaatctcctataacattagaagaaacgaagaaaaaaatgagaaagcacgtgaaatcctaagagaatatgggttacagccgacaagagagaatatgcataaatatttgctgtatgaagaaataagtaatcgcgccaatgtagtaatgtgtccatatacaggaaatacaattaatatttcggatgtcctgggaagtataaattcatatcaggtggagcacatcattccttatagtgtttcattaaatgatagttttgataacaaaaccttgtgtgagtccaactttaatcgcaaaaaaggagaattaacaccttatgaattttatcagaaaaatccaaatactgaaatttggaatgcggcctcatgggaacagattgaggaacgagctttcaggctgttaccttatcaaaaagcaaaaaggtttatttccagacgtaaaccagatgtgaatgactttattgaaagacaattaaatgacagcaggtatatcagtaaaaaagcgaaagaaatccttagccagatatgcaaagatgtgagattaatgcctggggctttaacttctgagctacgtcacttgtggggcttaaataatgtgctacaaccagttcggattttacaattcgatggatacgatgtgcatgaaaacaaaagattggcgcactatttagtatatgatgaggacgataatcctgttgagattaaaccagtaatgaataataaaccagcagctgataaaaatgagtcagtcataacgggatatattcataaaggtgtttttgagtcatcattgctaaaaattaaagttgatacccctgatttagaagatgggaaatattgggccctgattggtacacaatctcatcagatacctttgaaggtttttgcagagaagcctgatacggagcaggataggattgtacttaaagtcaaagttaataaaggagatttctatcatgagaatataggacgcaaattaccggcaaaattagaagatggatcatattggagtgtatttaagataacaggaaaagattttattaagccatcgaaagataaaccacccaaaaaaacgacaaggcaattaatgctttacggaactgttaaaggaggaatattcaaaagctatatttaccaatgtgaaacggaatttccggaaggaaattattggctgattctggatatcgacctggataatattgaattcgtgagcgcaaaaaacaagccccctgaggcatcagagaatgaactggttttaacagggagtgtgaatgaaaataataacttcaccgcagataatgatccggactttaacctggcgattaatacagaacccgataagtactatcttaaattggaaataacgcgtaaaccacatgggtttgtgaatatttataataaaccacctgatttaaaaaaaggtcagcggttggttgaaggcattacctgggtggataaacaaaccggtgaaattaaatttgatcctaaaaagaaccgggatgatcacagacaccatgccattgatgccattaccattgcagtaaccgatcaggctttcctgcaaaaattaagtaccgcaaatgctaaaaaaaaggaaaaagagcggggtgtgtctcatgaaataaccttccctgagccatgggcagggtttagaagagatgttgagcaagtagctgaaaaaattctggtttcctataagcaacagaaacaagtgttaaccacctttagcaaatcagtgtataaggaagggcgtaagtttgtaagtaaagggaaaattgccaggggacgtttacaccgggagttttattttggcaagcacgcacggcccttaattaacgagaatggcaaaatgattcataaggataataaaattgtgcttgaaacagatagtcagaatactgagaaaccttattatcacatcagaaaatccattgcaaccataaagaataacaagcatgttgaaaaaattgtagatgagcacataaagaaactgattaaagaccgacttgtttcggagtatactataaatattaataaaaactatactattccggatgatttcttttacaaaaagaatgaaaatggtgaaaaagaattgaatttctttcttcccaataaacatggaaaccctgtaccggtgaagaaggtgagaatgcgtgagaatgtaggaaatgcagttcatttaaagtcaaatataaaccaatgggtgaacccgtataataaccatcatatagttatatacaaagatgaaaatggtgtgctgcaggaagaggttgtgagtttttggacagccgttgaacgtatgtaccaaaaacagccactttatcagttgccctctgatggaaaagagttcattgctacgctgcaggaaaatgatatgtttttgttgggtttgaataaagaagatatacaaacactgaaatgggataaaactgaatatgaactcatatcaaaacatttatacagggtccaaaagatttcttcgatggattatactttcagacatcatctgtcctcgaaaattgatgataaagaaacctcagtcaggttgagtagttttagttcgtgggaaaatatgaatcctgtcaaggtatttaacaataatattggtaaaataaaaggctaatgctaaaacgaacagtgtatttttcatcaccctgctatttatcagtcaggcagcaacaactaattgttaaaaaggaggatgaagcgaccccggtcacaatcccggttgaggacctggggtttgtggtgcttgaacaccaacaaataagcgtaagtctgccactgttggatgcgctggctgaaaacaacgtggccgttattttttgtaataaaagtcacatgccccattccatgctattcccgcttgaaggcaaccatttacagagtgagttataccgtcagcaaattgccattagcgaaccgctcaaaaaacagttgtggaagcaaaccgtagaaaccaagattattaaccaggccggtttgttaaataaactgggtaaagcctggcaggatattaatgccttgtcgcgggatgtaaaaagtggtgatgccggcggacgcgagggcatggcagccaaaatgtactggaaccggttatttggcaaggaatttacacgtgaacggtatgggccctatcccaataattttctgaattacggctatattgtcctgcgtgccgccgtggcaagggctttaacaggaagtggactattgcctacttttggcattcatcatcacaaccggtacaatgcctattgtttggctgatgacatcatggaaccctaccgcccctttgttgatgctgccgtatatgagatttatgaaaattaccctgatcaaagtgaattggagaaagacatcaaagctgagctattgcaggtgcttactgtggatgtgcaactcggacaaactacccggccgttaatggtggggttatcacaaacaacggcttccctggcacgatgttttgcgggagagcagcgtaaagtggactatcccttgttgcaataaatactaaacccggtgaatatggaacaaattcgcctcaatgcctatcatgttatgtgggtatttgttttttttgatttgcccgttgttacgaaaaaacaacgccgaaaagccacacttttccgaaaaagcctggaaaagaacgggtttaccatgatgcagtattcggtatatacaaggcattgtgccagcagggaaagtgccgatatgcatgtaaaacgaataaagtcaatggtacccgaagaaggacaggtaagcatattaatgatcaccgataaacaatacggcaatataattaatttctggggcgccaaaacagagccattacgtcccggcccaaaacaactggaaatattttaacccgaaaagtttattatctttggtggatacagaatgccttgttctttgacattatggatagcataaaaaaattgattcaatcatgctacttccgcagcgcataattccgttttttttagtatggaaatacacctgaatcctgtgataattcaggctttaaaagcctgccgttgtggtttgattgaaaaattgaataagatataccatacga

SEQ ID NO: 414 - DNA, 8450 bp, synthetic construct
  source 1..8450: mol_type = other DNA
  misc_feature 1..8450: note = Synthetic
agctgcggtaaagttattggcccgtacccgtgcgttaaattgcttcaatcccaaataaattgcatcagccccgccacgaatggctgcgcgaaacgactccacgtttcctgccggcatgagtaactccggttttgtttgccccatcttcttcgtttatttctgcaaaaataggattattattttgagtggagatgcccgtacccgcgattcgggttgcttcctttttagataggattttatcgaatggaacgcctgttcataaatatttttgagtttatcttttttgtttgtacaaaatagtttaacttgaaaagtcatttgataaatacagatctgtattggattctcagtttacttgaatattcaacaggcaaataataagcattttggcgttaccggaatacttgccggtgtaacaaacaaaaacgagaagaggggtaaaataaaaactcccaccgaagcgggagtgtaggtttaacaccttcggcatatagccttattgtgataagatgtaaattgagttcagatttaatgggagctaagttaatgatttgatatataaaaaacaataaaaactttaaaaattaacgaactattatggcaaaaatactcggactcgatttaggcaccaacagtattggttgggcggtaattgatgcaacaatgaagaatggaaaagtagaatgttatcattcaattgttgattctggtgtgcgaatttttcctgaaggggttgaaccaacaactattgggcaaggcgacaaagagcagtcgaaaaatgcaacacgtcgcgagcatcggcaaatgcgtcggcagttttatcgcaaaaaattgcggaaagtgaaattacttgaagccctcattgacttaggaatgtgccctttgtctgttgacaatttggataaatgggcaaaatggaggaaatcatttaaaacaaatggccagcaatttcctacggaacccagttttattgaatggcttaagctaaacccatacgagttgcgagcaaaagcgttaacacagcccattagcttgttagaacttggacgtatcttctatcattttattcagcgccgtggttttttgagcaatcgtaaaggaagtgatgatggcactatttttaaaggcaaggatagtatgtcagggattgatagcactcgcgaattgatgaacggagcaaccttgggtaaaacaatgtatgatatttcgactaagacaggtgaaaaatattatctaaaaacggatgaaaaaggcaatgcgctaagggttcgtgcccgatatacccaacgggacatgtatgttgatgagtttctcaaaatttgggaacaacaagctccgctcttaggcctgaatgagcaaaaagtggcagttcgaaaagtgcgttatttaaaagggagcatgagctgtaatcgaaatcagcataagcttgaaaaatactatgagaaatatggcaaagataatttggtaattgacaagaataaggtcacaagcattgctgaagttccgttgaaggaattctttgcaggggaaattaaagaattaaatggtcagttaaagtttaaaagcaacgatagcctgttgttttggcaacgtcctcttcgttcacaaaaaaaactattggagaattgtcgttttgaaaacaataaaccggtattaatgactaacggccaatatcgagaaaaaaatggaaagaaagtccttcgcagtaaaaagccatgccctttatctcatcccgagttcgagtcattccgatctcatcagtttatcaacaacattcgttttggaaaaggacaaaagctgactgatgaacaacgccaattggtattggatttgatgaacggtaaagacaacagcttcaattttgaagaaatacccaaagctctaaacctgacttacgagaagttcaattacgataacgatcagaagatagcagggaacacaacaattaaaaaattgaaacagctttttcctgaagatgtttgggaagatagttacgaaaccatttggcattgcttctatttttatgaagacaatgagcttctgctagccaagctgcaaaatagctttcgggtgaaaaccaatgaacttgcaaaaattgcaaaaatccgcttaaaggatggttattccaatgtgtcattgaaggcaattcgtaacattagcccatttctggagaaaggctactcgtatgctgatgcggtaattttgggcggagtgaaaaatgcttttgggaacagatgggaaaattttgaaatctaccagagtgaaatagaaagagctatttgccaaattctacgggaagataataaagaaggagaagcgattgaaaagattaaagactggttggccttgccaataaatagttatggtttcgctaaagatgatccggcattttcgttgttatatcaccatagtcaggaaattgcagaaaaggaaaaacaagacttactcccggaagttgaaaatcttcggaatccgatagttcagcaagcattacaggaaatgcgacgcttagtaaacagtcttatcaaaaaatatgaagaaactgaatcaggtttttctttcgatcgcattcatgtagagatgggacgtgatttgaaaaacaataagaccaagcgacaggttttgaccaaaagaatccgtgataatgaaaaacggaatgaggaagcccgacagcgactggaagagtttggactacggccaacccgtgacaatttactgcgttacctgctgtatgacgaaattcaaaagcatatttcgggaccggtactttgtccctatacaagtaaggttataagtattgccgatttgatgggaggaggcaataccgtgcaaattgaacacatgattccatatagtgtgtctctggacgatagttttggcaacaaaacgctttgcgaagccaatttcaatcggatgaaaggcgagaaaaccccttatgaattttatttggtcaacccggattacaaactctggggcattaataaatatccggacttggaagatggttggcaggaaatttcggaaagggcatttaaggtcttgccatataataaggcgaagcggtttgcatctaaaaagaagtttgataaagatgatttcatcgaacggcagttaaacgatacccgatatatcagccgtaaagcagtagagttgctttcttcgatatgtagtgacgttcgtatgttgcccggacaagtaacggcagaattgcgccatctgtggggcatcaataatattttaaatccggtttttggcattgagaacttcaatgcagatgtacgggcagaagaacgtttagcctactatgtgctgacagacgagaataatcaggttttaagcctttatcgtaaaacgaatgatcggccaaaaacagggacggggcaattgctattagcaggcaaaacgaataaagggacttttgcttcaaaatatatgcaattgaaagtggctgttcccaacctgaaggacggcgagtattgggcaatagtgaacgtttccgagccacactcatttcaacctgtctatgccaaaaaaccaatgaccacagaggatcgcatcgtatttaagggacggattgagaaacaatttttcaataacgatacaattggaaagcggattaaagctgaagggaaagaggacggtgcttactgggctaacttcagtatcataaataaaacatttcaacttgccgaaggaaaaggtaaattgaaaatgacaggttcgaaagttgccctgtttggtcaaatttacaacgggcagtttacttgtcatatttatcaatgtgaaacaaatttgcctgatgggaaatattgggcagtactcgaactcgattttgagcgggttgattatacccgggctttaaatccaatccccgagagcaaagaacgacaattggtgacatatgccactgttgacaaagcaggctggatggcagccgatccggatcctggttaccgcacaaatgtccaagttcaggaaggtcgttactattgtctgttcgatattgaatcggtcggtcaagaactatatccgatggaaaatgaagcacctgtacctgccaagggccaacgactgacggaggctgtggtttgggttgataagatgaccggcgagataaagtatgacccgaaaaagaaccgcgatgatcaccgccatcatgctatcgatgctataactgtggccttgacagagcaaggatttttacagcgcctgagtacttaccatgcacaagaagaaaatgaaaaaagaggaagtgacaataccgaaaagtttcctgaaccttgggatggttttggtaacgatgtgaaaaatgcagctgcttccatgtttatctcgcataaacaaaataataaggtgctaaccaaaatttccaaaacagtttctaaaaatgggaggacatatagaagtattggagatgctgttcgtggagaactccatgaaatgactttatatggaaaaaagggctactgtgaagcaaaagaatttactactcgtgtacatattccaaaattaaaatttgcaaaaacaaaaggtcaagcggtttatttagatgatattattgattcagcaataaaagaatcgatttataaaaagataagggaaagattaacagaaagcgaaaaatcagttttatgtgagattgaagaaggggttagacaaattcataaaatctcaaaagtcaaagatcgcgaggctgagttaaagcggataaataagcttaggcaagaaattaataatactgttgaaaatattctacagcaagaaaagttctttttggagaatgtagggaaacgatctaaaagacagggaaaataccaggagagtgataggcgagacccggtgccgataaaaaaagtaaaggtaaaaaaggtcttaaataatgcacttcaacttaagcaattaacgtcgtattcgccaagaaaacaagaaatagttgaaacttctcaatatattaatccaggtaataaccaccatatattgatatacgaggattttgacgggaacatgaaagagcaggttgtttcgtttattgaagtagtggaacggcaacgacaaaacaatccgatttacatgcttcccgaagatgggaaacgaatgattacaacgcttgaaattaatgatatgtttttattgggcgttgacgaagatctggagttgcgtaattctaatgcagcattgttgagcaagcatctataccgggtgcaaaaggtctcgggttcatattatacattccggcatcatttggcttctacattaaataacaaggatgaagaaatttacatccaaagttttagtgcatggcaaaaatataatccaattaaggttgttatcgaccccctgggaaacatcagtcggatttagttaatcccagatcgtcaagattttaaaaaccttgacgatctaattaaaataagctagcctatttacgtttcaggcttccctgggggcaggcgaaggccaaaaagtagttggttgggttgggcgagggcaggggagtttcaaaaaaaaaatattagctctcgccgatacccggaggaaccggaaaagctgtttgtcggcttcgccgggataaattgaagcccataaagaatttaggggccttcgccaagcttcggcagacattaaaaagacgttttttaacaacatcaaaatattcagtactaattttttaaatcgataaacaatgattgaaatttcgctttcagccctgaacaacaaagatttgttcaccctaagtaagagaacacacgaactgatcctggctgcaaaaacgccggaaatgggcatcgacctttacttcaacctgttcgatcaggtgtttcagcaataccaggcggctatggagaaaccggttttgagcgccggggttatcgcgcaaaaagacagtgcccgcgacgaaatgtggattgccttgcgcgcacatgtaaagaattacctgcgccaccccgatacggccatgtcaacgaaagccaaagcggtaatggccgagctggataaatatggcacttcggtttacagcaaaagttatgagtcggagactgccattatccaaaacgtcagccaaacactcgaaaccaaattcgcgaccgaattggttgaaatgaatgccaatgtatggttcgaattgctaaagcaggcggggaatgattttgaggattcgctgcgctactttaacgagcaaaaagcgaatgccaacgaagtggatgccgcttacaaggttcgtcctcagctggaagatgctttgcgtaaactgtttctctttcttccgatgcaggccgaagtttcgggcgataaaaacctggaaaagctggttaagcaactcaaggtcgaaataggcaggttttaataaacttttagattttcaaggtttccaaaaccttgaaaaatctttaggtatatagtaaatgaatacagaaccactcaaatacggccggttttaccacatctataatcgtgggataaacagctgtgccttgtttcgtgagccaaccaattacgagcatttcctggggctgtacaataaatacatcactccggtagccgacacctatgcctgggtgctgatgggaaaccattttcatttgttggtgaggataaaatctgaaactgaggttttgaatcttgaaggttttaaaaaccttcaagatctaaatagaaatagagtaaaccagcaatttgccaatcttttcaacgcttacaccaaagcgtataataaacgataccatcgcaccggcagcttgttcgaacatccgtttcggcgtatctgcattcgctccgaagcgcatctgaaatacttggtttactatattcatcataaccccattcatcatggctattgcgagcattacctggactacccgtggagttcgtacctaacaattctatcaccaaagcaaacccggctgaaacgaaaagatgttttggaatggtttcgggatgccgatcggtttaaaggttatcacagtaaacaatcgattgacagatatcagaagtttcatcttgatttcatttgttcatccaggccttgacggttttaaagccttcaatgtctaaaaaacatacctatgctaaagcgaactttatttttttcgaacccctaccacttaagtttaaaaaattgccaattggttatccagtcgaaagacgatttggtgaccaaaactgtcccaatcgaagatctgggcttccttgttctggagcatccgcaaattaccattaccatgaaggttttggagcaattaaatgccaataatgtgggggtggtgttttgcgacagtcagcacatgccctcctcgatgttgctgaacctggagagccatagtttgcaaaatgaactgtttcgggcacaaataagcgcatccgaaccattgaagaagaatttatggaagcaaaccatcgaggctaaaatcagcaaccaggcagctcatctcgagaaacagggacttaaggcgcatgaattgagagcttgggctaaaagtgtaaagagtggcgacaccgaaaacagggaggggcttgcagcccggatttattggggacggttggtgggcagcggatttttacgtgaccggaatggcggcccacctaatcatttgctgaattatgggtatatcttattgcgttcggccgtagcacgtgctttgtccggatcgggtttattgccaaccttggggatccatcatcacaataagtacaatgctttttgcctggccgatgatattatggaaccctaccgcccgtttgttgatcagctggcattaagggtttatggcgaataccccgacgaattttccctgaacaaggagatgaaaaccgaaatgttgggactgatggccggcgatgtatggattgaaggaaataaacgcccgttgatggtagccctctctcaaacaacagcttcattgagccgttgctttagtggcgaaagccgaaaaattgtttacccggaatttaattaggcattgaaggttttcaaaaccttgactgtctaaaagaaaatacgatggaacaaacccgattaaatgcctatcatattatgtggttatttgtcttttttgacctgccggtaacaacgaaaagggagagacgacaggccactcgttttcgtaaagatttgatgagagacgggttctccatgatgcaattttcggtgtatatccgtcactgtgccagtaaggaaagtgccgatgtacatgtaaaacgggtaaaaagctttattccggaaaaggggcaagtgagcatcctctcagttaccgataaacaatacggaaatattaccaattattggggaaagaaagccgaccccttgcccgaaggcccccggcaattggaaatgttttaaattcctacctttcctaaaggtttaaattttgggaaagtttaaatatcgttcattgacatattggcttttcttgctattttagctgacgataggattaaaaaaatcatacatc

SEQ ID NO: 415 - DNA, 7485 bp, synthetic construct
  misc_feature 1..7485: note = Synthetic
  source 1..7485: mol_type = other DNA
gcataagggcgcccgaaggtcttaaagacatttcgggatttggtagctagttgagatagtttaaacctttcggagtctgaaagacccgaaagcgtttaagataaaaataaaaactcccaccgaagcgggagtataggaatgttttccttcggcatatagccttattgtgataagatgtaaattgaaaattcttaatttagatattgttacgaatgtaaaaaaaatctgtttaagttccaaactttaaaaatattatgtaatttgttcgttcaaatataattttttcaacgcgaaaggcttatgggtagccccaaacttgaaaaattatcaataactaaactaaaaatatcatggcaaaaatattaggattagaccttggaaccaacagtattgggtgggcagtaataaatgccaaaattgtgaacgggaaagtggaagaatatctttcaattgaagattcaggcgttcggattttcccggaaggtgttgaaccaaatactattggacagggcgacaaagaacaatcgaaaaatgccggcaggcgtgaacaccgtcagatgcgccgtcagttttaccgtaaaaaacttcgtaaagtaaagttgctcgaaaccttgatcaatttaaatatgtgccctttatctgttgaagggttgcaccagtggagcaaatgggacaaagcaaagaaaaccgaaggaaaacaatttcctactgaaccggaatttgtagaatggttgaagctgaacccatatgaattaagggcaaaagctatagtcgaacctgtcagtttattggagcttggacgtatttattatcattttatacaacatcggggttttttaagcagccggaaagggacagaggatggggctatattcaagggaaaggacaacatgtcggggatagatgccacccgtaccctcatgaacgggcggccattggggaaaaccctctatgagatttcatataagtctggagaaaaattcaacatcaaaaaggattctacgggaaatgaattacgggtaagggcacgctacacccaacgcgatatgtacattgaggaatttcaaaaaatttgggaaaggcaagcagatgcacttggtcttggcaaaaaagaaatcgaagtaaaaaaggtacgttttttaaaaggcagttccgatagcaaccgcaataagaccagaatctcaaaattccttcaaaagtacggtaaagccaatgtgcatattgaaggcaaaaaaataaccactttagagaatatgcctttaaaagaatatttggcaggggaaatcaaaaccgatggtgaacaaataaagttcaaaagcaacaatagtctgcttttttggcaaaggccgttacgttctcaaaaaggtttattggataattgccgtttcgagaataatatgcctgtgataatgggcaatggtgaattccggagaaaaggcatggacatagttaagcgtagcaaaaagccttgtcctttatcacatcccgaatttgaattgttccgtgcataccaattcatcaacaacattaagtacggtaaggggcaaaggttgactgtcgatcagcgacaggtagcccttgatgtatttaactcgaaagacgggagcttcaattttgaagaaattcccaaagcattaaaccttacctacgagaaattcaattacgataacgatcagaagatagccggaaatactacagtaaaaaagctaaaacctcttttccctgaagaaatatgggatgccggttacgaaaaaatatggcactgtttctatttctttgaagacaacgacaaactgtttgccaagctggaaaaagattttgggctaagaaccgacgacccgagtaaaatagcaaagatccggctgaaagatggttattcaaatgtttcgttaaaagctatccgcaacattaaccctttcctcaaaaaaggttatgcttacagcgatgcggtgatattgggtggcataaagaatgcctttggtgaacgttgggaccgtttcaatgtccaggattttattgatcgtttagaaaaagatgtcatcaatattttgcatgaagataataaagaaggtgaggctatagaaaaaataaaagactatttggccgaacctctgaacatttatggatttgtaaaggacgatccttattttacccaattataccatcatagccaggaaattactgaaaaagaattacaagatgtggtccccgaagtggaaaacctgcgtaatccgattgtccagcaagccttacacgaaatgcgacgacttgtgaatgctttattgtttaaatatcaggaaacagatcccggtttcagtttcgaccgcattcatgtggagatggggcgagacctgaaaaacaataaaaccaaacgcagggaacttactttgaaaatacgtgaaaacgagcagaaaaacgaccaggcccgtaagcgtttaactgagtttggcctgcgcccgacacgtgataatttattacgttacctgctttacgacgaaatccaaaaacacgtttcaggtcctgtattgtgcccctataccggaaaggtaatcagcatggccgatttgctggggggtggcaataccgtgcaaattgagcatattgtcccatacagcatttcattggatgatagctttggcaacaaaacattatgcgagggtaattttaaccgaatgaaaggagagaaaacgccttacgaatattatcagtataatcctgaccctaaattatggggagtatcgtcatgggatgatgttgccgaacgtgcctttaaattgttgccctacccaaaagcaagacgttttacctcaaaaagagaatttaagaaaagcgattttatcgaacgccagttaaacgacagccggtatatcagccgtaaagctgttgaattgctttcggcaatatgtaatgatgtgcgtatgttgccagggcaggtaacagctgagttacgccatttgtggggtatcaacaacattctgaacccggttcatgatatcgatcaattcaagtcggaagttagggaagatgaacgtgtaccttattatgtggtaaccgatgaagatagccgtgtgctgggcatttaccgaaagaccaacgaccgccctgtaagtaatgacgaccagttgttattgaccggagatgtgagtaagggtgtgtttgcttcaaaatacctttcagtgaagattgaggttcccagcctgaaagatggcagctattgggtaatcgtaaatgtttctgccccgcattcgtttcacccggtttttgccgataaaccggtttccgacaaagatcatcttgtattcaagggccgtgttgaaaaacaatatttttcgaacgatacaattggaaagcgtataaaagcgaatgatatggatgatggcgcttactgggcaagcttctcgattgttgacaaagaatttaaactggccgagggcaaaggtaaaatgaaaacatcgggggcaaaaattgccttgtttggagaaatcaaaaaccgtcagtttacctgccatgtttaccagtgcgataccaatttgcccgatgggaaatactgggcgttgttggaactcgattttgaaaaggtagattatatccgttcggtgaatccaaaacctgtgacaggggagaggcaattattaagctatgccaccgtggacgaacagggattgatggctgccgaccccgatccgggttacgggatacaaaccagtcagcctgccgggcgttactattgtgttttcgaaattgaatcggttgaaccggaattatacccgttggaaaacgaaccccctaacctcgaaaaagggcaacgtcttaccgaagctgttgtatgggttgacgagtttacaggcgaaattaaattcgacccgaaaaagaaccgcgatgaccaccgtcaccatgctatcgatgctataacagtagcgttgaccgagcagggatatttacagcgtttaagtacccatcatgccaaagaggaaaatgcaaaacgggggatcgatagtaccgaaaaatttcctgaaccatggaatggctttgccaaagaagtgaaaaaggcagccagagccatgttaatttcgcacaagcaaaacaacaaggtactcaccaaaatttcgaaaacgattacgaagaatggagaaaaacaccgtagtgttggttttgccgccagggggcagttgcataaagaaaccatttacgggaagcctgaaaaaggtgaagggtttcatatccgtaaagaagttgttgccctgaaagacaagaaacaaattaacaaggtagtcgacgataccatacgcaggttaatccttgatcatttacgggatagttgtggaatagatatttccaaagataattttgccgtaccaaaagatgccttctttaaagacggggtatataggttgtttttgcccaaccataaagggggagaccccgtgccgataaaaaaagtgcgtatatgtgaaaatattgggaatgctattcagcttaaatcgaacattaatcagcatgttaacccaagaaataatcatcatgtattgatttatgaagattttgaagggaacctgcaggaaaaagtagcttcctttatcgaggtggttgaacggcagaggcagggagatctgatttaccagttgcccgaagatggtaaacgaattgtgacaactttggaaataaacgacatgttcttgcttggattgaatgatgatattgaaatcagtaaagctcatgcagcactattgagcaggcatttgtaccgggtacaaaaggtttccggttcttattacacattcaggcatcatttggcatcaactttagataataaagatgaagaagtatacatccaaagttttgtggcatggcaaaaatggaatccaattaaagtaaaaatcgaccaattaggaaacattaaacgatattaacccaacctttcagtgtcattaatacctgaaagctttttaattcatttattaaaagacgcccgaaggtcttttagacattgcggcgtcctgaaaaaacctttcggtgccaataagcaccggaagggttacatggttgtcatattttaaacggtttaaaacatcaaattatgccatcaacccaacaaaaacccgaatacgggcacttttatcacatttataaccgtgggatcaatggctgcgcccttttccactgctcagacaattacgaacactttttacgattgtacgaaaaatacattacacctgttgccaatacctatgcctgggttttaatgggaaaccattttcattttctggttcgcataatgggtaaggatgaaataggtgtatataaacaactaaattctgacaggactgacgactctgtcagatttcaaacgacccaaaacttgtcagagttcgaagtacctgacaaagttaagataccaaatgtttcccgccatttttcacatctgtttaatgcatatacaaaatattttaataaggtatttaaaagaaccggcagcctgtttgaaaggccctttaaacgtatcaaagttacatccgaagcccagttgaaatacctgatttactatatccatcataatcctgtgcatcatggattctgcgacgaaatggttgaatacccctggagttcgtatttatcaattttttcacctaaaaggacaaggcttaaacgtgcagaagtattgaaatggtacgagaatatcgataatttcaggaaatatcacgataagcagacagtaaaccgttttgctgagttgcaggtggatttgccggtttatcaaatgagcaaaaataaaaacatgactgaatgtaataggacacccgaaggtttggcagacacttcgagtccaggcaaaatcctttcagagtctgaaagacctgaaagagtataaaaatatctgatgcccgaaggtctaaaatatacttcgttggtcggtaaaaaaacctttcggcgtatttaaggcccgaaagtgtttaattcataaaatgaaattttatgctcaaacgaacccttttcttttcaaatccatatcatttgtcgatgaaaaacaaccaactgcttatcgaatcaaatgattcattgtcgaaaaagaccgttccggttgaagatattggttttatcgtgctcgaaaatccgcaaatcagtttcacaatgaaacttgttgagcagttaaacgcctataatgttgccctggtgttttgcgacagcaagcacatgccctcttctatgcttttgccacttgacagcaaccacgttcaaacggaaatttttcgcagccagatcgaagcatcggaaccgctaaaaaagaatttatggaaacaaaccatagaggcgaagatattgaaccaggcagccatgctggaaaaaaacggatataacgcccaggatataaaaaacatggcgcgaactgtaaaaagtggcgacactgaaaaccgtgaaggttttgccgcaaggctttattggcaaaggttactgggaaaagatttttaccgcgaccgctttggtcagcctcccaatcctttcctgaattatggttatattcttttacgttcggcagttgccagggcgcttgcaggtacgggtttactggcaacactgggaatacatcaccgcaaccgttacaattcatattgtctggccgatgatattatggagccatatcgcacttatgtcgatgaaatagcccttgaattgtacaaaaccgatcccgaatcggtaatgctaacaaaagagcataagtcggaactgttaaagctaatggctgttgatgttgaaattggagaagtgaaacgccctttaatggtggctctttcgataaccactgcttcgctggcccgctgtttttcgggcgaatcgcgtaaaatcatttaccctgtatttaaataacccgaaagtgtctgaaagacctttcggcgtttaagccaatattatggaacaaacccgtttaaatgcttatcatatcatgtggttgtttgtgtttttcgaccttccggttactactaaaaaggaacggaaggatgcttcccgttttcgtaaggatctgctgaacgacgggttcagtatgatgcagttctcggtttacaaccggcattgtgccagtaaagagagcgcaaatgtgcatataaaccgagtgaaggctttcgtacctgaaaaaggccaggtaagtattttggctgtaactgataagcaatatggcaatattacaaatttttggggaaagaaaagcaagcctttgcccgaaggacccagacagctcgaaatgttttaatcctttaaaatccaaaatcaaaaacctttcagagtctgaaagacctgaaagagtttgcctccaagaaaaaaataactaaattcatacccgtgatcaggatgaaaaaaatgaaacattaaaccacttctttggctgtcgaatgcggttttttaaattgtaaaagctcacaaaagccttaaatgataaggcataggcgcatcttagttgtggtttgatgtaaaattggaatgataaacaac

SEQ ID NO: 416 - DNA, 6851 bp, synthetic construct
  source 1..6851: mol_type = other DNA
  misc_feature 1..6851: note = Synthetic
agattaaagaaggtaccatcgtcaaccttgagtttgatatactggggaaatacatcagccgcatcatggccattaaaaactaaaacgtttacgtttaaaaataaattgagcagttaagaccatcatcttagctgcttttttttttgagggttttgagttcggagttgcgaggttcgaggttcggagtgcctaaagttataagtgtagagttacgagttgtaaagttaggagttgttaagtgtctaaagttggaaagttacgagtgcctatagttataagtgtagagttacaggttgtaaagtttggagttgttaagtgcctagagttacgagttataaagttaatacatagaataactcgtcacttttaactggtcacttttaactggtcactttttaacttgtaactttttaactcgtcactcttttcaacttgtcacttttacacctctcttccaatggtgcaaagaatctaccgggtgtggtttacgaaggggtgtaaaacaagaactcccaccgaggcgggagtataggtttaacaccttcggcactgaggccttattgtgataagattctaatgaactttcgttctgataacaaatatataaaaaagataagattaacctagtgctctaaaaaaaatattatatttatctctcttttattacatgtgtacaacaaacttaatccctaaacatgagcagaatacttggattagaccttggtaccaacagcgttggttgggcagtggtggatactgataacaaaactattgaagatgtaggtgttagaatatttacagaaggtgtcgaaaagaagacaattggtagcggtgacaaagaaaaaaccaataatgctacccgtaccgaaaaccgacagaaacggcgacatttctatcgcaagaggttgcgaaagattaaacttcttgaactgctggtggagcaaaatatgtgtcctttagatttaaaagatttaaagcaatggaaaaactgggataaacagttgaaagctgaaggtaagaaattccctagcacagaaaagtttgtggaatggattcgtttagatccttacgatcttagagcaaaagcgctgtcagaaatacttacacttgaagaatttgggcgtattttatatcatcttatacaacgacgaggatttttgagcagtagaaaaggaaatgatgaccccacaacactctttgaaaagggtaatcctaatgagaatattttacccattaatgttaccaaatccgaagctgatttaagtagtttagggcattatctaagttctgtaaccccacaaataaatgagccctacaaaaccattagagatgaaaatggagtagagatacgtgcacgaggaaggtatacgacaagggagatgtatgtggcagaatttgagcaaatatggcaagtacaggccaaagcattgggtttagatacgatagaagtaacttcaaaaaaagtacgtgaactcaagggggctttaagtggcaaacgaaatgcagacaaattagccaatcttcaaaagaaatatggtgtaaataatgtggaagttattgagaaagatgataacaatagcgttacacgcgttataacctatacaaaacaagatttgaaaacgactttgggcgggcatataaccgaagttgtagatggtcaaggtcaaaaagtaatgcaatttaaaagtaacgagagtgtgcttttttggcagcgtccactgcgctcacaaaagggattaatagcgaattgtcggtttgagaatgaattgccagtaatagataagagtgatcaattgcgacttaacgaaaaaggcgaagttattaaacgcagtaagaaaccatgtcctatatcgcaccccgaatttgaactttttagagcctaccaatttattaataatattaagtatggctcgcatccccgcttaacggatgaggagcgaagccgagttctaaatctattaaacaagaaggggggtgactttgataagaaggggggtaactttgattttgaattaatacctaaagagcttaagttaacctatgagcagtttaattatgatgctaaatttaaggttgctgggaatacaactatcaaacaactatcaaatttgtttgaggctaaggtatgggaagagcattacgaagatatatggcattgtttctatttttatgacgacacagaaaagctttacgacaagttggtaaaagattatgggcttaaaaaaacgctcaaggatgtagcgaacgtaaagttaaaagatggctatagcaatgtttcactaaaagccattcgcaatatgttaccttttttaataaaggggcgacagtatgataaagccgtggttttgggaggcgttaagaatgcttttggcaataaaagatggggttattttgaagagtcgcacgagcaaatagaacgtgatattctaaaaatattaagccaaccgaataaggagggtgaagctatagagaaagtaaaggattatttgtccgaccccgaaaatcattttggctttttaaaagacgatctccattttcaacatctgtaccaccatagtcaagatgttcaacaacaggaacaattaagtgatcatttaccacttattgaaaacttacgtaatccaattgtacagcaagggttgcatgaaacacgtcgtctggttaatcgtttgatggttgagtatcgtcagagatatggtaatgattttcatttcgatcgcatacatgtggagatgggtcgcgatttgcgaaatagtcgcaaacaacgacaagagatggggtttaggatagctaaaaatgaagcgaagaacgaagaagcacgccaacgccttactgagtttgggcttcaatcatctcgtcagaatattcataagtatttgttgtataaggaaattgaagagcgaaatggaacagcacgttgtccttataccggcaaaaccatttccatcaccaatcttttaggtggaattaatgcgatacaggttgaacatattataccctatagcatttcgttagatgatgcttttggtaataaaacactatctgaggctacttttaatggattaaaaggagaaaaaacaccctatcagttttatcaagaaaactcagacccaaaactctggggggagagttcgtgggaggatgttaaaaccagagcttttagattattgccgtatgccaaagccaagcgttttacggccgagaaaaattttgaaaaatcctcatttgtagagcgtcaattgaacgatacccgttacattgccaaaaaaacagtggaaatattatcacatatttgtgatgatgtgcgagtaatgccaggtcaattaactgctgaattacgccatctgtggggtttgaataatgttctacaacaaacacaaaaccttggagacgcgaagtttacggtagaaacagaatatgcaaccccttattatgtggttactaatgaagctgccgaggtacaagctctttatcgtaaggtaaacgaaaaaccatcttctcaagccaatgaattgcaaatacctggcgaattaaaaaagggcacctttgcatctaagtattacaatatcgacataacaaatacggatttaaaggatggaaaatactgggctaagttatctgtgtcagacaagataaaattagtgcctaagtatattgacaaaccagagtctgatgacaatagtattatatttagaggtcaggtagagaaaaatgtatttaaaaacgacactactggcaatagaaagattgttgcaagtgatggagtgtattgggctaaatttgaaattgtaaatcgatcgtttgaactcccacaaaaggataaacaacccaagccaaaagcgaatcagttattgttatttggcaatgtttcgatgggtacttttaaatgttatatttatcaatgccagaccaacatgcttgatggtaaatattgggtgttgttagatattaatcccgcctccattgagtttgtacaagccattaatgaagtgccaaaggtggcatctaatgaaatttgtatcacggctagtgttgacgatgatggacttctagtggcagattgtgataccgattacagaaaacaaacagagtatagcagtgggaagtattatctaacattagctattgagtcaaagaatccagagtttgtaggcattgaaaatccagcaccaaaaatagaaaagggacagcagctggttgaaggtcatatatgggttgataaatacactggtgaaataaagtttgatcctaaaaaaaatcgggacgatcaccgacatcatgccattgatgccattacgatagcattaacagagcagagctatttgaataaactaagtgccgaaaatgcacggcgcaaaaatagggaacgaaatattgccgattctacagagcatttcccagagccttggaatggttttaatgccgatgtgcaaaaggccgttaatgccattcttatttcgtttaaaaagaataacaaaacacttactaaaaataaaaaaggcttaagtgtaagaggtcaattacataaagaaaacgtgtttggaaaacataaagctcctcaacaaaaagaggatgcctttcatcgccgtacaaagattacagatatagaaaataataaagacattgaaaaagtggtggatgtaacgattcgtgagcatattaaaaagcacttgagcactcgttatggtatagatacgaatgcaaaaaaatacgatgtgcctaaggatgctttttataaggcaggagaatggcaattgtttctaaaaaacaccaaggggggagaggctgttccgattaaaaaagtgcgtattaaagagaatattggcaacgcgcaagcgcttaagagtgatgtaaaccaatatgtgaatccacgcaataatcatcatgtgatgctttatactaacttggaaggtaagttatgtgaaagtatcgtgtcgttttggaccgttatagagcgccagaagcagggtttaccaatttatcaattaccccctgaaggcgctaaagttgtagctactttagagattaacgatttgtacataataggtctgagcaatgaagattttgacgccaatagaaataatgcaacattcttaagtgcttatttataccgtgtgcagaaagtatcttccatgtattacacctttagatttcatttagcttcaacagtgttgataaataaacaagagtgttctatccgtagttttggagcatggcacacggcaaatccaataaaagttatgattaatgaattaggaaaaataaaaaaaacaatttaaattgtaaggccttgataaacaccctatcaaggccttattttttgtttaatccctaagatttaccgcatgacccacgtaccaagctgccccacccacgcgctgttttatttgttcacttacctcggcaccatcactccttatctcaattttaccgcgcatgacattgccaacacggcggacgcttgtgcccagggggctgatgcacttttttacgtggcggacgactaaggcaacacggctgatggcaaatttaacacggctgcttgcgtatttaacacagcgggttgcctaattggcacggcggaagggtactttgtttgtttaaatggccatccgccacctcctagaggccatccgcccacgttaataacccatccgccacctcctagagggcatccgcccattgggcgagcagatcagctgagcggtaaccgtcatcagctgttaaaggacctttattttcgatcttttttataccattctttttattgtttcacatttatttttaacaacatgaacaaatctaaattaaccatggccgagtttttactacagtgccgtttacgtgtgatcaattccattaacgatgccgaaatacaagcggcggtgagcgccctggggtatacccccgagcgtttagaaacaggtaaggtgttacttacccaatccaccgccttgtacgaaagcattagtaaagaatacggcgatttggaagcggcctttgcccgccgtaaccaacaacgcgaaaagttagaactggtgtttaaaaaccacttggccgtagccaaaattgtgtttaaaaacgaccacgctgccatcacggcgctcaaactcacgggttcggcgcctagcacctttagcggatgggtgagtagggtaagcactttctacaacaacctactggctagccgctcgtgggtaagtggcatggcctcgttcaacattagcgaagaagccctaaacgctactttgcaagaggtaataaagctcgatgcggatgccaaccgcatcatgcttgaaaagggcgatgcccaaaatgccgtgaaacaacgcgatgccctcttcgaagatttatacgagtgggtaaacgactacgagagcattgcccggttggccttagcggcaaaacctcagttgctcgaaaagctgggcattgtagtgcctagctaaaccagctggtactatataaacaaagaagttatcccttttttagttttcatacaaatgggtggaaattagaaaagggatttttcttttggtcacatctctcaacccattggttgatactaaaggtgcattagccaaaataataaatagttaagtgggtttggtttcacatttgttagctctccgcgttgtgtcatcctcaatctatttattatgctaaaacgcaccttagtatttaccaacccggcttatttaagcaccaagcaaaatcaattgctcattagtttacaacctagcggccaagagcacaccgtacccattgaagacatagcggtggtgatactcgaaaatcaacaaataaccattaccctgcccgccttacagcagcttaacagcaataatgta

SEQ ID NO: 417 - DNA, 6681 bp, synthetic construct
  source 1..6681: mol_type = other DNA
  misc_feature 1..6681: note = Synthetic
actcttaatcgcaccattttggaattgaaacttgctttgttgttaaatgccaattatggtgtaaactcttaatcgcaccattttggaattgaattttgctaaattttataaaatttggatttaaataaaaaactcccacctaagcgggagtacagaattttacatccttcggcatatagccttattgtgataagatgtaatattttggatttatatccagcacaaatataaacattaattttgtatttccaaatatattttataattttatcaaaaatattatgtgttgtataattaaattttgaaaatatggctaaaatactaggtttagatttaggaacaaacagcattggttgggcagttgtagatgatgagaagaataaaattttggatactggggttagaatttatccagaaggtgttactgctaagacaataggattaggagataaagaagtctcaagaaatgctactaggcgagatgctcgtcagctaagaagacaattttatagaaagcgtttgcgtaaaattaagcttttagaattgttgatagagcaagatatgtgtccactcaaacgtgctgagctttttgagtggaaaaattgggataaaacaaagaaatcagaaggacgtgtttttccaaattctcctgaatttgtagattggataaagttaaacccatatcaactaagggcaaaagccatcaacaaacaagttagtaaatatgagttaggaagaattttttaccatcttattcaaagacgtggatttttaagtagtagaaaaggaggggctgatccgcaaactctttttgaaagaggaaaacccgaagaaaatattttgccaattaaggaaacaaaagaaaaaattaaaggcactagtttgggatattatttgaattctattgcaaataaagaaaatgaagcatacaaattccaagaattgagattaagaggaagatatacaattagagaaatgtatattgaagaatttgataaaatttggacagaacaaaacaaattttatgatttagactccaaaactacaatttttacaaaaataagagaaactaagggtagcattaacaataagaaaaacacaactcgtttaaattatttgaaagagaaatatggagaagctaatgttgaggttgttgaaattacagataaaaacaatttaagcaataatgatgaaactcagagtgttaaaaaagaaactagacataaaataataactaaagaagaaatttctttaaagtatgtcttggccggagatattgaatatataaccgatgatgatggagaaagaaaagtgaagtttaaaagtaatgaaagtatattgtattggcaaagacctttaagatcgcaaaaaggattattagcaaattgtaggtttgaagatgaattgcctgttataaataaaaatggggagttttctaaagatgaaaatggcgaaataattaaaagaagtaaaaaaccttgtccactttctcaccctgaatttgaggaatttagagcttggcaatttattaataatatttatttcgggaaaaggaatccattgtctgacgagcaaaagcaaattgttttagatttaattaataaaaagaaaaagaattttaattttactgaaattataaaagcactaaaattaaattatgaaaaatttaattatgatgaaaaatttactgttactgctaatacaactataagtcaactatcagaattgtttgagcctgaggtttggaaagaaaaatatgatgaaatttggcattgtttttatttttacgaagatgacgataagctttacgaaaaattaaaaaaatcttatgcttattcaggtaatttagaaacagtttctaaaattaaattaaaagatggttattgtaatgtatcgcttaaagcaataagaaatattttaccatttttaaaacaaggatatttatatgataaagcagtgattttgggtggagtaaaaaacgcatttggtaaaaggtgggagtattttcaggattatcattatgacataataaataaggttgttgctgtcttgaaggaagataataaagaaggtgaagctatattgaaaattaaagaagtgttaagttcaaagactaatagatatggttttagtgttgacgatcctcgttttttccatctttatcatcatagccaaagtgtagagcaaaagaaagatttgaatgataggctgcctgtggttgaaaacttgagaaatcctatcgtacagcaaggtgtaaatgaaatgcgtagattggtaaacgctttaatgaaaaaatatcaaatagaatttggtgattattttcgttttgacaaaattaaagtagaaatgggtagggatttaagaaatactaaatctgcccgtcaagatatgactattagaattagagaaaatgaaaagaaaaacgatgaagcacgcagtagattgcaggagtatggattacagccttcacgcaacaatgtgcaaaaatatcttatgtggaaagaaattgccgatgtttctggtacgcctcgttgtccatacacaggcaagacaattgcaataagtgatttattgggtagctctaatactgttcaaattgaacatataataccttatagtatttctttagatgatagttttgggaataaaacaatttgtgaatcacactttaataatttaaaaggagaattaactccttatcaattttatcaaaaaaatccggatgtaaaattatggggtgtaagctcttgggatgctgttgctgatagagcttttcaaatactgccttatgctaaagcaaaaaagtttacaataaaaagcgaattaaaacttgatgattttattgaaagacaattaaatgatactagatatattgcgaaaaaatctgtggaacttctttcaaatatttgctcagatgtgagagtaatgccagggcaattaaccgctgaattaagacatttgtggggattgaataatattttgcaagataatattccaaatttacaagaagaattaggcaaagttaaaaatattgagaataataattgttttctagttttaaatgaggataatgaaattattgaaattgtgcctaagcaaaactcaagaccaaaaacaaatagtgatgaaattttattacctattattgttaaaggtaaaaaactagtttcagattcctttaatctggatattgatttagagaattaccctgatggtaaatattgggcaaaacttaaagtagataatgattttttaataattcctagatatgtgcaaaaaccactagttagtgaagatagaatagtttttagaggaaaaatagaaaagcaaacttttaaaaatgacacaagtggaaatattaaagttacaaacaaagaagatggtgtttactgggttgatattgcaattaaaaataaagagtttaagaatgcgcaaacacaaaagtcaagacctgatgtaaaaccaaaatctaaaattgtgttgtttggaaatgttaaggatgaaaaatttagttgctatatttataattgtaaaactaacttacctgacggaaaatactggttgattttagaattggatataaatgatgtaaactttactaaagcggtaaatgataaaccagatcttgatgctaataatcaaatttgtttaaatgctactgttaatgatttgcaggagttagttttggatattgacaatttaagtaattttaaagtaaatgaagcagctggaaagtattttactaaaataaagataaaagaaataaatccgaatttaaatttaattgaaaataatccacctatattaaaagaaaaaacacataaaatattagagggcgtaatttgggctgataagtatagtggagaaattaaatttgacccaaaaaagaaacgagacgatcacagacaccacgcggttgatgctatagtaattgctttgacagaacaaggttttttgcaaaaattaagcacttggcacgcatctgatgatataaaatataaagaaagattagatgattctgagaaatttcctatgccttgggatgagttttatactgatacaaaaaaggcagtgaacagcatacttgtttcgcataaaaaacaaaataaaactttaacgagaaataaaaaaggttttagcgtaagagggcaattgcataaagaaactgtttttggattgagacaggcaccaaaacaagaacaagctcaccattttagagttaaagttacatctattgaggacgagaaaaaatacaaaaagattgttgatgaaggaattaaagaaattattcgtaattatttattggcaaaatatggaaaagatattaaatatgctgaaaactttaaaattcctaaagatgctttttatgaaaacaatgaatggactttatttttaccaaacaaaagaggtgataaagttccaattaaaaaagtaagaattaaagaaaatttaagtaataccgtacaattaaagtcagatttgaatcaatatgttaatcctagaaataatcatcatgtgattatttacaaagatttggaagggaaattgcaagaagatgttgtgcaattttggacagctgttgaaagaaaacaaaagggggaaagtgcttatcaattgcccgaagatggattagaaattatagaaatacttgaaataaacgatatgtttttattgggattaagtgaggaagaatatgaagacaataaaaataataaagagtttttaagtaaatatctttatagagtgcaaaaagtgacttctaaattttatactttcagaaaacataatgcatcaacgctggataatagtgaatatgaatttagaatacaaagtatgtctgcttgggaaaaagctaatccgataagatataaaatttctctttagtttatgcttaaaaaaactttattttttaccaatccttataggctgagtttaaaaaacaatcagcttgtggcagaatctcatatagatggcgaaattagaactataccagttgaggacataggctttgttatactagataatatgcaaatttctataagtttgcctttgatagaagctttggttgaaaataatgtggctattgtgttttctaattctaaacatttgccacaagctatgatgctaaatttagattctcatagtttacaaactgaaatttttcgcactcaaataaatgcaagtttatctatcaaaaagaatttgtggaaacaaactattgaaagtaaaataaaaaatcaagcaaaattattagaattacttggtaaagataatttggatattttaaatttatcaaaaaatgtaaagtcaggcgatagtgataatagggagggaatagctgctagaatttattggtctcgtttatttcatcaaggatttattagagatagatatggaatccctcctaataatttattaaattatggctatattgttttgcgggcagcagtggcaagggcacttgtaggctcaggactattgcctactttaggcatacatcatcataacaggtataatgcatattgtttggcagatgatattatggagccttatcgaccttatgttgacaaaagggtttatagtatgtatcaaagttttgaagatgtatttattttagaaaaagaacataaagcagaattattaaaggttttaacagatgatgttaaaattgatggattaaaacgacctttgtcgcttgctttgtcgattacaacagcctctttatcaaaagttttcgcaggagaaattaggaatttaaaatatccgattttagaataatgaagcaattacgtttaaatgcatatcatattatgtggttatttgtatattttgatttaccaactaataccaagaaggagagaaaagctgcttctttgtttaggaaaaatttattgaaggatggatttaccatgatgcaattttctgtttatgttaggcattgtgcttcaaaagaaagttcagatgttcatataaaacgtgtatcatcttttgttccagactatggaatggttagtattttgcaaattaccgataagcaatacggcaatatgataaatttttggggtaaaaaacaaactgtaacaaaaaaacagccagttcaattagaattattttaatagagaaagttctttgaaatattgaaatagaattgtaaatttgcgtctgcaaatcacttcttagtgctaaattagcaaaatttagcataagacaaatgctaaaacactgtatagacaggcgtttgctaagcctaggttgtgatttgatgtaattttggaatgatataaaactctaaaacatattgttcgatacgctcattggttgtgatttgatgtaattttggaatgatataaaacaaattgctgaaggatagatttactaatgaagttgtgatttgatgtaattttggaatgatataaaacacaaatgacaagtctataatatcgcctttggttgtgatttgatgtaattttggaatgatataaaactttaaagcatttttaaatttttcaacattagttgtgatttgatgtaattttggaatgatataaaactaatatcaatattatatgtactgccattcgttgtgatttgatgtaattttggaatgatataaaacttgagttagttcattaaatgccctataacagttgtgatttgatgtaattttggaatgatataaaa

SEQ ID NO: 418 - DNA, 23330 bp, synthetic construct
  source 1..23330: mol_type = other DNA
  misc_feature 1..23330: note = Synthetic
cgtcgagccgcgcgggcgtccacaggccgccacggcgcatcaggcgttcgctgtaatggaaatagcgcaacgacgccaccgggcgcccgacgacgccgtacaggttggggccgatggcattgcccgcgcccggccaggccgtgtgacagacgaaacacggccgcgccagctgttcgccgcgttccgcgtccccctcccagacggtggcggccgcgtcagcgatgccagaagtgcccgtgtcaggagtttcagcttcaggggtgtcagtttcgggggtgtcagtttcggggatatcaggggcagggctcgcgggatcaacagggccggtatcggtatcagacccggtgtcggcatcgggggccgacggcatgcctggcggccggtcggggtccgtatcgccgggggtggcggccggcgccgcccgtgacagggacgccgcaggcaaaacggcggagggccttgcgccctttgtgtccgccatggaaggcggcatggcgcccgcgaaaaacagtgaccccgccgtcacaccccaaaccgtcagcagcgccgccgcgacacccggacccatcgcgcgtcccattgcacaccccccaatgccatgcacaccatgcacatcatgcgggcccgtccatatggcggcccgcgccggggcgcactgaaacacgcagggggtaaagggttcaattccattaatattttaatcattatgatttggctattcgcaaagaaaacaatccggcagcgcgatccgggcgtacatcatgatccttgaaatgcgtgaccgcgccgcacagataatgtgcgaccatctttccggaccgggcccgatgcgatgctggatgtaaacgatctgagaaaacgctatgacacgccgcagggccccctgcgggtgctggacggggtgtcgatgcatctgcccgccgggcagagcctggcgctgatgggcgagtccggctgcggcaaaagcaccttcctgcatgttgtggcgggcctggacagtgccgacggcggcaccgtcagcgtggacggcgacaatgtgagcgccatggacgacagcgcccgcgccgccctgcgccgggacagggtggggctgattttccagcagttcaacctgatccccagcctgacggtgcgggacaatctgtcctttcaggcgcggctggccggacggctggaccgggactggctggaccgtctgaccgggcggctggacctgggcggactgatggaccgctatcccgaacatctgtcgggcggccagcagcagcgggtggccatcggccgcaccttcgcggcgcggccgtcgctggtgctggcggacgagcccaccggcaacctggacgaggccaccagcgacagcgtcatggccctgtcgctggagctggtgcgcgagaccggctgcgccctgctggtggtcacccacagcgaccgcctggctggcgccatggaccggaccctgagactgagcgggggacggctgagcggcgggcggctggatggggaacgaccggatggggagcggtcacagtgaccggcaccgccgccattgccggtgcgctggccggccactggcgccgccacaaggtgcagctggcggcgctgattgtcgggctggccgccgccacggcgctgtggagcggcgtgcaggcgctgaacacgcacgcccgtgccagttaccgcgcggccgaggacagtttttccagaagccgggtgcccgtgctggcaccgccggacggcggcacggtcacggatgcggtctttgcccggttgcgccgggcgggatgggctgtcgcgccggtgctggaaggccggctgacggtggacggcagatcctacacccttgtcggcatcgacccgctgagcctgccggacagccaaagacttccgggaggacagggattcgacgccgtcgccgcgtatggggacgactttctgcgcttcgtcagtcggccgggcctgctgtatgccgccccggccacggcacgggcgctggccgccggcaccgggcggcccgtggggcccaaagaccaccccctgccgccgattgccgccggcgatggtattgccggcgatacgctgatcgccgacatcggcgtggcgcaggccctgctggggcagccggggcgcctgtcctatctgatactggacccggacagcgggcaccggcggggcgcggcgatggataccgcgcaagacagtctgaatgcgcaagatgatctgaatgcacaagataatctgaatgcgcaagacagtctggcgggcatcctggccgggctgccgggcgcggcgctggtgcgtgtggacccggcggtgacggtggacatttccggcctgaccgacagtttccacctgaatctgacggcgttcgggctgctgtcctttctggtggggctgttcatcgtccatgccaccatcggcctggcgttcgaacagcggctgcccacataccgtacgctgagggcctgcggggtgtcggcgcggcggctgaccgccctgctgctgaccgaactgctgaccattgcgctggccgccggcgccgtcggcgtggcgctgggctacgggctggcggccgcgctgctgccggatgtggccggcagtctcggcggcctgtacggcgcggcggtggacggcagcctgcgggtgcgcccaagctggtggctggccggcctggggatgagcctggccggcgcgctggccgcatcggccggcgcgctgtggcgggtgtaccggctgcccctgctggcggcggcgcatccgcgcgcctggcacgacgcgcaggcgcggcgcctgacggttcagacgctggccgccggcgccctgctgctggcggcggtggcggtgtaccgctacggcacgggactggtggccggcttcgccgtcatgggcggggttctgctcggcgcggcgctggccctgcccggcctgttgtcgctgatgctgacggcgggcggggcgttggcgcgccggccgctggcgcagtggttctgggccgacatgcgccagcagctgtcggggctgtcgctggcgctgatggcgctgctgctggccctggcgaccaatatcggcgtgggcaccatggtggacggcttccgcaagacctttgccgtctttcttgacgagcggctggtgacggaggtctatgtggacgcccgcgacaacggcgaaggcgaccggatcgccgcctggctggcggcccgcgccgatgtggacgccgtgttgcccaactggtccgtcgccggggcctatcggggctggcccgccgatatttacgggttccgcgaccatgcgacctaccgcgatttgtggaccctgctggacgcggtggagggcccctgggaccgtgtgcgcgacggggccggcgcgctggtcagcgaacagctggcgcggcggttcgacatccgcgccggcgacgatatcacactggacagtccggcggggccgtggacggtggcggtggccggcatttacgccgattacggcaacccgcgcgggcaggtccgcgtggccgccgccaccctgacgcagcggtttccaaacgcccggcgcacccagtatggcgtgcgcacgcagcaaacggacagggtgatcgccgccctgaagacccgcttcgccctggacgaccggcgggtgatcgaccagacgcgcctgaaacggttttcaaacggcgttttcgagcgcaccttcaccgtcaccgtggcgctgaaaaccctgacgctgggggtcgccggcatcgccctgctgaccgcgctgatgacgctgacgggcgcgcgcctgccgcagatcgcccccatatgggcgctgggcgtgccgcgccggacgctggtgcggctggaactggcgaaaatcctggcgctggccctgctgacggccgggctggccgtgccgctcggtacctttgtcgcctggtgtctggtcgcccttgtcaatgtggaggcgttcggctggcggctgccgctgtatgtgttcccgatgaaatggctggatatggcggcggtggccgcgctgacggcggggctggccgccgccctgccgctcgccgccctgcggcgcatgccgccggcccggctggccaaggtgtttgccgatgaacgctgaccgtctttcgcgtatggcgtcaaaagtcgtttcgaccggcctgaaaacgttgccgatcggggccgtgatgacagctgtggccatgatggcggctctggcgacagggtacctgccggcgggcggggccgccacggcgcaggagcgcggctttgccgggctgggggacagggcggacggtttcgcgcccgtggtgccgggccgggcccttgccttcccgcgcgatttcgggccgcacccggcctttcgccttgaatggtggtatgtgaccgccaatctgagcgggccggacggcaacccgtacggcctgcaatggaccctgtttcgccaggcggcgcgcccgcccgccccacggcatggcgacaaaaccggcagcgcaggcgcggggacggacgggccggagggcggctgggccagtccgcatttctggatgggccatgccgccgtgaccacgccggagcggcagtttttcgccgaaaagctggcgcgcggcggcatcggccaggccggggcggcggcaaggcccttcggcgcctggatcgacgactggcagctggccgggcacggcaaggacacggcagacggggcgcaagacagtgccggcggccctgagggcgggcctgagggtgggcctgaggatggatatgcgggcggatatgcggatggatatgcgggcgacgggaaacaccgctataccctgcgcgccgggggggcggggttcggctaccggctgacgctggacagcacggcgccgcccgtcctgcatggaaaacagggatacagccaaaaatcggacggcgggcaggcgtcctattatttcagccagccgttcctgacggcgcgcggcagcctgcatgtgaacggccggaccataccggtgacgggcacggcgtggctggaccgggagtggagcagccagccgctggccgccaaccagacgggatgggattggttttccctgcggctggcggacggggcgcgggtgatgctgttccgcctgcgccacgaaaacggcgaggatggcgggggtgccgacgcgggtgacgacgccggtggtgcagacagcggcggcaaggacgggcgtgacagcgattacatatcgggcacctggatcgccgccgacggcggcacccaccccctggaccgcgagacggcggccctgcgcccgctggccttcaccatggtggccgggcggcgggtgccgacgctgtgggccgtcagcgtgccggcgcgcggactggatgtgcgcgtccgcgccctgaatccggaaagctggatgggcacccgcatcgcctattgggaaggcccggtcacactgacgggcagccacagcggcgacggctatctggaaatgacggggtaccgggcacaaggcgaccggtgatcatgacggcagcggcaccaccggaccggataacacccctggcaacacccctggcaacacccatgccggggcgcaacactgacggcacccgcaccgcacatccgggccacaacttaaaataatcaagcacccttaaagaaaagaatattttcaacccgcagacgaaaccgatggccgacatgtattcgcggcgggcatcggcgcgggcagtcgcgacaggcagaccggttgactgaaaacaacccagtcgtgacttggccatttgtccagaacgaaatcagaacgcaacctgactgtttgcaaagtgcgcatatattgcgtacttctcaatacaattacgcccaataattgtttttttggtaaccttttcccggtaaaaaccaacactatccggaaaattgcagccaccgcgccgaaggacgcggaccctggccgtgcacggcaagccggtgtggcgacagggccgcataaacgacacaaccgctgaagacaagaccgatcatcaaagacaagactggccgccaaagacaagactggccaccacagattaagactggcaaaagatatgactgaaacaggacacggcgcggccacccggaccggcgcccgtgcttcacaggcacccgccttcaaacgcaccgggaccgtcatgcgggcgatccgcaagaccgtcgcgccacgggatgaggaaatccgtttttcccgcgatgaaatcatcgtctcgaaaaccgacaggcggggccgcgtgacgtatgtgaacgatgtgttctgccgggtgtcggaactgtcgacggacgcggtgatcggccagccgcacagcatcatccgtcatcccgacatgccgcgcgcggtcttcaagctgatgtgggagaccatcggcgcgggcaaggagattttcgcctatgtcaagaacatgtcggcgaccggccggtattactgggtgatcgcccatgtcaccccgtcgctggacgcggcgggcaccatcaccgggtttcattccaaccgccgggtgcccagcgccaggggcattgccgatatcctgccgctgtacgacgccctgctggccgaggaaaggcgccatgacaatcccaagacgggcctgacggccagcgacggcctgctccgggaaaagctggcggccgtgggccgggactatgacgcatttatctggaacacgggagactgagccatgttcgacaaattcctgaacagggcggacgcccccggcacccgcgccgatctggagcgcgagctggcggaggcaaaggccgaaaacgcccgctacaaggccgcctttcaggcgctggcggatgtgaccaaccgggccaaggtgggcgatatggaagcccgcatcaccgactgggacaagcacgggccgctgtcgcctgtgctggcggaggtaaaccgcgtgctggacctgacggacgcctatatgcgcgaggccaccgccgcgctgggcgccgcatccgaggggcggttttaccggcggttcctgaccgacggcatgaccggccgcttcggcgacagcgccgcgctgatcaaccgcacggtcgagggcatgcggaccatgaaacaggaccgtgtgcgccagcgcgccgacatggccgccaatttcgagggcagcgtcatggaggtgatcgccgccctgaccgccgccctggacagggtgtcggagaccgccggcacgctgaaaacccatgccgggcgcaaccggtccctggcggccgaggtcgccgacgcggccgcgcaggcgaccgacaatgtacagacggtggcggccgcgacggaagagctgtcggcgtccgtgcgggagatcgccgggcaggtccggacctcatccgagaaaaccgccgacgcctcggcccaggccggcaatgcgtccgccaccatgacggcgctgcgggacgcgtccgagaccatcggcaaggtcgtcggcctgatccacgacattgccgaccagaccaatcttctggccctgaacgccacgatcgaggccgcgcgcgccggcgaggccggcaggggcttcgccgtggtggcgtcggaggtgaaatcgctggcccagcagacggcgaaggccaccggcgacatcggatcgcaggtccggtccatccaggacaatgccggcgccacggtgacggtggtctcggacatttccggcaccgtcggcgggttgagcgagattgccggcaccatcgcggcggcgaccgagcagcagtcggcggccaccggcgacatcagccggacgatccagaaagcgtccgacatgacccggcaggtggccgaccggatcgccgccgtcaacgaaaccgccacccacaccatggccagcgccgacgccctggacacggcggcgcaggacctggcccgcgccgtcaccgccctgcaaaccgggtcggagcgtttcctcgccgatatccgcagcgcctgacggaccgggtattgagcccagaagaccggatatggggacgggacaggggaacgggcacggcggccggcccgttttccggcccgcgcggcacggggatgtggtatcatgcccctgccccgccggcgcatgccacagccggccgggcatccgcgtgattcgcggaaaaaaccagcaaccgacaggccccttttgtcaccatggacccgtttttgacaaaaaatgtccggaaaaagccgatggatttcatggccttatccggacatcagttatagcagatctgaaactgcgggccgaccgcaacgacgtaaagccgcgccttgaccatgaccggcgttatagcagatctgaaactgcgggccgaccgcaacacagtgcatcggcataatcaaccctgacctgttatagcagatctgaaactgcgggccgaccgcaacgagccagccgttgcatctgtcgagaccaaggttatagcagatctgaaactgcgggccgaccgcaaccggaggccggcgcttgttgcggtgagacgagttatagcagatctgaaactgcgggccgaccgcaaccctgcaggcgcacatgcgccagcgtgtccagttatagcagatctgaaactgcgggccgaccgcaacttctggctgtggcagacgcgggcgaaagggttatagcagatctgaaactgcgggccgaccgcaacgttggtatggcgcgcggtcggttctccattgttatagcagatctgaaactgcgggccgaccgcaactggagactgtcaccggatgatagctctttcgttatagcagatctgaaactgcgggccgaccgcaacctcacaccgtcgggcttagttgggtgtatgcgttatagcagatctgaaactgcgggccgaccgcaacttttttgtcgattgagaatggcgaccatgggttatagcagatctgaaactgcgggccgaccgcaactgtgatcttcaaggatttttttcaggcgtggttatagcagatctgaaactgcgggccgaccgcaacgcatgggtccggctggcatttcagagggtagttatagcagatctgaaactgcgggccgaccgcaactgtcctctatgacttcattcgccctgttatgttatagcagatctgaaactgcgggccgaccgcaactccagtcgcacaccaccgcgcaggacaccggttatagcagatctgaaactgcgggccgaccgcaacaggccgcgccgatggatatgcccatggggcgttatagcagatctgaaactgcgggccgaccgcaacgcgacgcgttgagggccgaccagatgctgggttatagcagatctgaaactgcgggccgaccgcaacgcgaacgcgacaacaccgacgccagaaattgttatagcagatctgaaactgcgggccgactgcaacttctttcgtaagcaccgctttgtggacttcgttatagcagatctgaaactgcgggccgaccgcaaccggtccccgcagcgtggcctctggtcccggtgttatagcagatccgaaaccgcgcgccggtcctcattgtcgcaggctggccgatcctgcgacactttaccagccacatatatgacgccaccgtcggaccggccggccgcgcgccgtggacagtaaaaaaagacaggggacagtaaaaaagggcaggccgtggcccaccccttatctgttgctctgaaagcttgttaacggtcagaccgcagtttcagatctgctagacaggtatgataataagcgagccccattgaaatggcaaggtggctcccccataaagtcaagaggtggagagaaagaccggcacgcgggtgtggaccccgccgacggcccctgcgcaagaggctggccggcctttctcccgcccaaggtgtggcccgaaggccgtcatcatcatctgattgcacgcttccgatgtcaaataatttttcctagacactagatatttttatacatgctgctatcattcaaattgacatttaagctcttgcaaagagttacaagtgtctgttgcggccagccgcgtttcagatctgccaaggccgggaattgcaaccccaggccgcgccctgtatgctttcgcgcgaggggcgcggccgcaaggggggatttttggacatgccgcagatacagcagacaaaaccggactatcgcctggccctggacctgggggccaattccatcggctgggcgctgatcgcgctggacggcgacggccggggcaccggctttgtggacgggggcgtgcgcctgttttccacgtcggaactggccgggcgcgaccccaagacgaaaacctcgctggcggtggcgcggcggctggcgcggtcggcacggcggcggcgcgaccgctatctggaccggcgcggccggctgctggcggccctcgtcgaccacggtctgctgccggaggacacggggacacgcaaaaaactggccgacctggacccttaccggctgcgagccgaggggctggaccggccattgcacccgcacgaactggggcgggcgattttccacatcaaccagcggcgggggttcaaatccaaccgcaagaccgacggcggcgacgacgggcaagacggcaagatccgcgccggcacgcgccgcctgcgcgacgccatggcggataccggcgcgcggacgctgggcgcgtatctgcacgcccgcaaggcacgcgggcagtgggtgcgcgcgcgcccacaggacctgccggcgggcgacggcaaacgggatagcggttatgacatgtatccggaccggtcgctgtatatcgacgagttcaacgccctgtgggcggcgcaggccccccatcaccccggcttgctgagtgcggcgttgaaggagaccctgttcgacctgattttttaccagcggcccttgcgccgggtgtcgggcgggcgctgcccgttccataccgaggaggaacgcctgccgcgcgcccacccgctgtcgcagcggctgcggatttaccaggagctgaacgccctgcgccttcagtcgccggacgcgccggaacgggcgctgagcctggaggaacgcgacatcttcgccgccaaactgctgggcggcaccaagctgaccttcgaccagatccgcaagcgcctgaaactgccgccgggcagcacgctgaatttcgagcgcggcgaccgcgactatctgaagccggacgaaacggcggccaggctgaaagcggcgaaagcctggggcaaggggtggacggccctgccgctggacgaccagatcgccattgtcgagcggctggaccgcgaacaggacgaggccgcgctgatccgctggctgacggacacatgggggctggagacggccggcgccgtcacggtggcgcgcaccctgctgcccgccggccatgccggcctgggcccgacggcggcgcgcaggatcctagcagagcttgaagccggcgtgcatgtctattccacggcggcggcgcaggccggttatcatcacagcgatttccgcaccggcgagatccgggacgccctgccctattacggcgaggtgctggaccggcacgtggccttcggcagcggcgatgcggacgacccgccggaaaaacggttcggccgcatcgccaacccgacggtgcatatcgcgctgggtcaggtgcggcggctggtcaaccgcctgatccggcgccacggccgcccggccgaaatcatcatcgaggtggcgcgggagttgaagctgaacgaaaaacagcgccgcgactgggagcgcaagcggcgcgagggccaggcgcgcaacgaccgctaccgcgagacgttcgcgcagcacggcatcgccgacaccggcgccaaccgcatgaaaatgcgcctgtgggaggaattgaacccgaaagacccgctggaccgacgctgcgtcttttccggcgaggtgatcggcctgagccggctgttttccgatgcggtggaggtggagcatctgatccccttttcccggtcgctggacgacagcccggccaacaagaccgtcagcctgcgcacctggaaccggcggaaaggcaacatgacaccgcacgtcgcttttggtgagaaagaatattggccggacatcgccagccgggcgcgggcgctgccgccggcgaaacgcgcccgtttcgcgcccgacgcggcggaaaaattcgaggaaagcggcggtttcctggcccggcatctgaacgacaccaaatatctgtcccgcatcgcgcgggagtatgtgggcgttgtgtgcggcggcggcccggatgcggtgtgggtgacgccgggcagcctggtggcgatgctgcgcggcaaatgggggctgaacagcctgctgtccgaccacaatctgaaaacccgcgtggaccaccggcaccatctgatcgacgcggcggtgatcggcgcggtggaccggtcgctgttgcagcgcatgtcgcgcgccgccgcgcgggccgaaacccatcagctggacgcgctgatggagacggtgccgacaccgtggccgacctttcgcgcggacctggacgcgctgaaggaccgcgtgaccgtcagccaccgaccggaccacggcctgtcgaaaggggcgggccgaggctctggcaagggctctggcaagggaacaggcgccaccaccgacaagctgcacaatgacacggcctacggtctggcgcggtatgacgcggccggggaccggtggacggtggtgacgcgcaaagcgctggatgcctttaccggcgccggcgatgtggcggccgtccgcgacccgcgcctgcgcgccgggctgacagccgcgaccgaggggctggacaaaaaagccttcgccgccgcgcgcgacgcctggggccgcgcggccggggtgcgccgcctgcgggtggaggaaaccctgtccggcccgtcgctggtgccggtgcgggacgcagatgggcgcgcctacaaggcgtacaagggggattccaaccactgtatcgacatctggcgcctgccggacgggcggtgggacagccgggtcgtgaccacattcgccgtcaaccagccgggttatgccgaccggcggccgcatccggcggccaaacggatgatgcgcctgcacaaggacgacatggtcgccgtggacatggacggcgggcgcgccatcctgcgggtagtgaaattttccggcaagaccgtggtgctggcgccgcatcacgagggcggcgcgctgaaggcccgcgacgccgaccgggacgacccgttccgctatgtcagccgcacggcgggcgggctggcgaaactgggcgcccggcaggtgcgggtggacgaaaccggccgggtgttcgatccgggcgcgttcgctccggcccgcgcgggccggaaacaggccgagaaactggccgagggacaggccaaggaacaggccgggaaacaggccgggcagagcggataaaagcgaacaggggagcgggccgccatgccgggacgcatcatcgagatcgccggcgaggagcgctatctgcatgtggcgcggggtttcctggtggtggaaacggatgacggagaggccgggcgggtgccgctggacgatatcgccgccgtgatcgtcacggcacggcaggcgcgctattccaaccggctggtctgtgcgctggcggaccgcaacgccctgctgatcccctgcgacgagcggttccggccggtcggctggctgtggccactgtcggggcattacggacagggcgggcgcatggcggcccaggccggcgccggccggccgcgcaacaaacgcctgtggcaacagatcgtccgcgccaagatcgccgcccaggcacaggccctgcgggcggcgggcgcaccgcatgccggggtggcggcgctggcggccagggtgcgttcgggcgacccggacaatgtggaggcgcaggcggcgcggcgctactggccgttgatgatggggccggatttcagccgcgaccggggcgcggacggggccaacgccctgctgaattacggctacaccgtgctgcgcgcggtgacggcgcgggccatcgccgccgccggcctgcacccgacgctgggcctgcaccacggcaaccgcaccaatgccatggcgctggccgacgacctgatggagcccttccggccctatgtggacctgagcgtcaaggggctgatgaaacaggggcagacggatgtgtcgcccacggccaagcgccatctggcggcgctgagcacatgggacatgccgtcaccgcagggggtcagcccgctgatgacggtgctgcaccggctggccgcgtcgctgggcggggtgtatgagggcgacggcggcacgctggccctgccggaggcgccgaccgacctgcacctggcggcgctgttgaacccggatgtgtcagcctgagcggcccggccatgcatctgagcggataccggatcatgtggatgcttgtcatgttcgacctgccggtcacggaaaagccggagcgcaaggcggccgcgcgcttccgccatttcctgctggacgaggggttcgagatgtcgcaattttcggtctatgtgcgatactgcaagggcaaggaacaggtggacgccatcgccggccggatcgagcgcgccctgcccgaagccggcaaggtgaaaatcctgagctttaccgacaagcagtatgaaagcatcaaaagcttttacggcaaggccccggattcgtccgaaaaaccgcccgatcaactgacccttttttgaccatggacccgtttttgacaaaaaatgtccggaaaaagccgatggatttcatggcattatccggacatccgttatagcagatctgaaactgcgggccgaccgcaactcttttccagggctcaagcctcgatcccgcgttatagcagatctgaaactgcgggccgaccgcaacggagccaggcaggacgataggggcctgatggttatagcagatctgaaactgcgggccgaccgcaacagtttcgcggcaatttggacgaacggttctgttatagcagatctgaaactgcgggccgaccgcaacaccagtgatgtattttgacgcgaagccacggttatagcagatctgaaactgcgggccgaccgcaactttttccacaggcttaagccctgtgcggtcgttatagcagatctgaaactgcgggccgaccgcaactatccaccgcgtcccccgcacgaaaacggtggttatagcagatctgaaactgcgggccgaccgcaacgacagcgtgccggaccccttgacgggtgaggttatagcagatctgaaactgcgggccgaccgcaactccggtcctgatccatgcccatgagcaggcgttatagcagatctgaaactgcgggccgaccgcaactgcgcaatctggcggaggcggaggcgacatcggttatagcagatctgaaactgcgggccgaccgcaactgaagggcacatttgcaaaaacagtggcggttatagcagatctgaaactgcgggccgaccgcaactttacggaaacttataattcaagccctttggttatagcagatctgaaactgcgggccgaccgcaaccgcgcatccatcacaccgccggaaaaacgcgttatagcagatctgaaactgcgggccgaccgcaacgcctcgaggtcgagcgcgccgccgccgacagttatagcagatctgaaactgcgggccgaccgcaacagacttccggaaggcgggtttcgccggaccgttatagcagatctgaaactgcgggccgaccgcaacattatttggctcctaaagactgatagatttgttatagcagatctgaaactgcgggccgaccgcaacgccatcaactgacggtcccgctgttccatggttatagcagatctgaaactgcgaaacggccataagaaaatgccggctgactgactgatcagtcccccggctttcccccggtggtcgtgtgcggcgctgtcccggcccggcccgccatgctgtggcgcgcgggccgtccctacacctttcccccacatcccgaacattacaccgatgtaatgcggcggccatgccggcgtaagggggcggctgtcatggtggggtcaatcctggccgttccgcttgtgggcggcgccttttggaaaggtgagagagaccttatgacagcccttgcgacattcgcggagttttaccgcagcctcggccccggttcggcggcgcgcctgccacaggtttacagcgacagcgtggtgtttaccgaccccgtcacccggcacaccgggctggcggcggtggcgcgctatttcgacagattgctggaaaactgcgtgtcctgccggttcgacatcaccagcatgtcggtgcgggccgacaccggctatgtgtcctggaccatgcggttccgccaccggcggctgcgcggcggcgcggcgatcacggtggacgggttcagcgtggtgacgctggacggcgggctggtgagcgcccagcgcgattattatgacatgggcgcgatgatctacgagcatgtgcccctgttgggccgggccgtcagcggcctgcgccggaggatggcggcatgaaacggatgctgatcaccggcgccagttcgggcatcggccgggcgaccgccctggcggcggcctatcgcggctggcatgtgaccgcctgcggacgcaacgaggagcgcctgcgcgcgctggcggagcagcatgccggggcgctggcgacgatcgagccactggccttcgacgtgacggacgcggacgcctgcggcttcgcgctggcggaccggcggttcgatgccgtgctgctgaacgcgggcacctgcgaatatgtggatgtggacagctgggacgccgacatgttccggcgggtgttcgacaccaatttcttcggcgcggtgaactgtttgcagatcctgctgccgaacctgcggcggggcgaccagctggtttttgtcgacagtctggcgcggctgctgccctttacccgcagccaggcctacggtgccagcaaggcggcgctgttttacctggcgaaaaccatggatgtggacctgaaggcgcgcggcatccgcgtgcagacggtctcgcccgggttcgtcaagacgccgctgacggacaaaaacgatttcgacatgcccatgcgcatcagcgccgaacaggcggcggacgccatcctgaacgcggtcaagcgcggcacggcgaccggctatttcccgaccctgttcgccgccatcatccgcaccctgtccagcctgccggtgtcgtggcaggtggcgctgtgccggcggatgaaaacgcagagcgccaaggcatgacggcaccggaccaaaacagcgggacacaaaacaccgggacacacaggaccgggaccggcccggcccccgacacagaggccggcccgttccccccgacacggaaaaccgacatgacagcggagacccccatgacacgcctgtcctatcccaaggttctgaatttccttgtctatcaagggatctggttcaccgccattctcggccgcgagccgtggacatggctgctggccgggcttttggccctgcacctgacgctgagccgcgaccggcgcggcgaagcggcggtgatgatgctgtgcgccggcatgggcatcaccctggacagcgtgctgagcgtgagcggcgtgttcgtcttcgacccggcgccggaggtgctggcgatcccgctgtggctggcgggcctgtggctgggctttgccggggcgctgcgcaacagcctgcgctatctgctgacccggccgcgcctggccagcgtggcggcggggatttccgcgccgctgagctatttcgccggcatgcgcatgggggcggtgaccttcggcgtcgaggactggctggccggcctgatcatcggcggcgcctgggcctgtctgatgcccgtgttcctggccgttgcccgaaaagcggacagaaaagcggacagatacgagaccggcacaaagaccggagcagagaccgggacggccgtgccggccccctccgccccgtgaccatagagatcccctaaggacagaaatcccatgagggcagaaatcccatgagggcagaaatcccatgagggcagaaatcccatgagggcagaaatcccatgactttgaagacccccacaccgtgagcgagagccttaacccccaacgacaaggattgaaaccatgacaaggatatgtctgatgatgatcggcctttgcctgctgatggcaaaccccgcgaccgccgacctgcaaaccgcccgccagcatgtgcccgacgccggccttgtcggcaaggcccggctgaaggtcctgttctggaaggtgtatgacgccgagctgtacgcgcccgagggcagctggtcgggcgatgcgccctttgccctgacgctgaactatctgcgcaagctgaagggcgagcagatcgccaagcgcaccatcaccgaaatccgcggacagggtttcgacgacgaaatcaccctggcgcgctggtatgagcagatgcgcagcatcattcccgacgtggacaagaacaccaacatcaccggtgtggcggacgaaagcggccacaccctgttttaccgcaacggcacgctgatcggcaccatcgaggagccccagttcagcgaacggtttttcggcatctggctggatgaaaagtcgtcccagccgaaattccgcaaaaaactgctgggagagcggggatgaaagcgtcgattcttctgatcgcggcggcgctgctgctgtcggcctgttcgaagtccatcgacggcagccgctatctggacgatccgccgacctttgacctgtacacgtttttcgacggcgaggtgaaggcctggggcatcgtgcaggaccggtccggcgatctgttgcaacggttcgaggtggatatcgatggcagcgtggcggacggcgtgctgacactggacgagacctttgcctacagcctgggcgagggggtggaaaagcgcatctggaccatccgcgagacggctgagggtacctatgagggcatggcggacgatatcgccgggccggccaccggcacggcttacggcaatgcggtctactggcggtacgagatggacctgccggtgggcgacagtgaataccgcgtcgccttcaaggactggatctgggcgtttgacgaccgcaccatcgtcaaccggtcctatatccagaaattcggcctggtgatggcggaggtgacgctgttcatgcagaaacagggatgagccagatatatcaggcccgatccgtagcgcggtccgtagcgcgatccgtagcgcggtccggggcctgatccataaaaagaccacgccgggcgggcaggcggatgcggcagcacaggccgggcccgccgccgccctttcccgtcgcgcccctgccgctttccgtttcatccggcccatcggccaaatcgccatcaatcaggtcgccaccggccaagtcgccatcggccagatcgccatcggtcaggtcgagcgtgccgccgtggaggctgacgaccgccgccaccagcgccaggccgaggccgttgccggcggccgtgcggcttttgtcgacgcggaaaaagcgtttcagcacatcctggcgcaggcccggcggcacgccgatgccgctgtcgcaaatatccagcgcgacggtctccgcgcccccgtcaaggcgcaggtgaatgcggccgccggcgggggtgaatttcaccgcgttgtcgacaaggttggagatcatctggaacagcaggtcgcggtcgccgaacaggggggcgggcacggtctcgaccatgagggcgaggcccttgtcctcggccaggggctgatacatttccgcgacatcgcgcaggatgggcgccagatcggtgcggcggaaggcggaggtctgcttgcgcgtctcgatctcggtgatgcgcagaagcccgttgaaaatggcaaggatattgtccgtctcgcgcaggagggcgtcgcgccggtcggcatcgtcgacggattcaaggtggccgcgcagacgggtcagcggcgtgcgcagatcgtgggcgatgctgtccgagaccgacttgaccccgtcgaccagggcctgaagctcgtccagcatgcggttgagggccatggacagcttgctgaggtcgtcccagctgctgtccaccggcagccgcgcggacagattgccggtggaaatgatgcggtccgccgtgtcggcgatgcggttgatgcggttcacgacatagagaccgaccgacaggctggtgccggcgatcagcagaaacaccccgatcatcacccagccgaaggtgcgggcgaaccactgggtatagcgcagatcgtcgatgccgcgaccgatcagcagatgggcgccgtcatccagtgtcaggattttcgccatgatcacccggtgcccgccggtgatttcagccgccgccgacaggacgccgccaccggaggggccgctgtcccgcgcggcatcaggggggcgggccgcgccctcgggcgggggcggcagctcgaacgagatcaccccctcgcgcaggcgggtgaccggattgccgggccaggcggccagattgccggcggcgatgcggccgtccggctctttcagggcgtaataaaacccgccgcgcggatcgccgagacgcgccgccagcagacggtcgaccgccgggcggccgcccgtcgccgcgacctcgcggaagccgcgcatgtcggcgtcgatggcggcaccggcgtcgcgggtcagggtctcgtccccggcgacgatgatgaaataggcggcaaagaacacccccagcagcagcacaagcgagaacaggccgccgagcgcgacgctggaactgcgggtatagcggcggatggcgcgcatcagccgtccgccggcacccggtagccggcgccgcgcacggtctcgatgacggcgcggtcgtggccacggtcgatcttctggcgcaggcggctgatatggacatcgatgacattggtctgcgggtcgaaatgatagtcccagaccttttccagcagcatggtgcgggtcaccacctgtcccttgtggcgcagcagatattccagcaggctgaattcgcgcgcctgaaggtcgatgggcgcgccgccgcgcgtcacccggcgggccagcaggtccatttccaggtcaaaggcggtgagcacgctggcgcggtcgtcgacgcgggtgtggcgctgcaccatcacgtcgaggcgggcggccagttcctcgaaggcgaagggcttgaccagatagtcgtcggcgcccgagcgcaggcccttgaccctgtcctcgaccgtgttgcgggcgctgagcaccagcgccggcgtgtggatgccggacgcccgcagcgtgcccagaatggccagcccctcgacgcccggcagcatgcggtcgacgatcagggcgtcatagtcctcggtggtggcgagaaacaggccctggcggccgtcgtccgccacgtcgacccggtgccccagttcgcgcaggccctttttcagatagtcggcgacacccgcgtcgtcctcgatcaccagtatgcgcatggcggttccatccccggagtgcggccgccggcaccggacgcccgcccatgggggcacgggcatcaccggccggccgttgcagcatatacgcagcgcaccggcgaacggaccgccgccctgtgacggatacggcgcatgacggttgtgggcgggccgtgtatctggtagagatttatcactttaaaacaaataccttaatgggtttctacggactgttttccgggccgttttacggactgttttccagcctgttcgcgggggccgttttccgacggactttcgggaacaggccggaatgacagacccggcatgaaggggcgtttcgaccatttggaaaatcggggactgaatcgatggacacttcgttaacgcgccgcactctcattcttggtggcaccgccgcagggggcgccgcgctggcacccgcgacggcggcatggaccgaggcacaggacgcccggtcgcccgccgtggcaccggccggcccggccatgacaccggacgaggccctggccctgctgaaaaagggcaatgaggattttctcgccgatgtggaaccggtggcggaaaccggccatgaacggcgcatggcgctggcgcacgggcagacgcccttttgcgcctatgtcacctgttcggacagccgggtgccgccggaactgctgttcagccggggcctgggggaattgttcatcatccgcaacgccggcaacacgctggacctgctggcgctgggctcggtcgaatacgcggtcgcggttttgcaggtgccgctggtggtggtcatgggtcatgaaagctgcggcgcggtggacggcgccatgcaggtggtggccaaaaacgcccgcttccccggtgccatcggcaagatgatcgaaccgatcatcccggcggtgctggcatcgcgcggccaacagggcgatccgctggaaaacgcggtcaagcagaatgtccggcgtgtgacgcgtatgctgcgcgaggattccgaccccatcatgctcactccgcaaagggacggccggctgaaagtggtcggcgcctattatgagcttgacagcgggcgcgtcgatttcttcgatacggtctgagacagacgccaggatatcgacggacaagaggtttgagtatggacggacagccggcgcgcgcccgcgccgcacggtgggctgcggcccgccgctgccgcgcggggatcatcggatttatcagcggacggagccgccatgcgggttcacgggggggcacgacaggccgtccggggccgcgtgttgcaacgctgaccatttcggctttggccaccccggctttacgcgtcgccgctctgcgcatcggggcggctttgcgcgtcggggcggtcgggcttgccgccctggtcctgtcggcctttctgccggcggggacggcgcgggcggatgtggaggcggaggcacaggcgtggctggccaccttcgtcaacgggccggtgtcggacaacagccgcctgctggtctggttcgacgggcatgcgcgtttcgacgacgatatcggcgggctgggcaccaccatcctgcgcccggcgctgggctggaaggtcaatgacggcctgtcgctgtgggcggggtatgcccgcgtcaccgggcacaaagacggccgggacagcaaggaggaccggatctggcagcaggcgacctaccgcatcggcagcgtgttcggcggcacgctgtcgggccggtcgcggctggaacagcggtttctcaacaccggcgacgacaccggctggcgcttccggcagtttttccgcttcatgcggcccatcggcgagacgccctattccggcgtgctgatcaacgagaccttcatccatctgaacgacgccgatttcggcccgcgcgccggcttcgaccagacgcggaccttcataggcggcgc

SEQ ID NO: 419 - DNA, 23180 bp, synthetic construct
  source 1..23180: mol_type = other DNA
  misc_feature 1..23180: note = Synthetic
atcccagatcatcctgacgaaaaagttctcatgcgcgctcgggctgaaccagatctgaccttcgaccgaaatgtccgccgcaagcgttttgcttggttcgtcgacccagccgcggttgccggtgaccgtcacctcgatattcaggcagccgaaggaaggtgaacaggccccctgctgaggacagatgatcgaataggcgcgcccttgatccgtatagccgatccgggagatatccggcgcgaacatctgatagcagcgggacgtctcgtcgcctggaatcgtctgccagctgaactggggccagatggcggcctgctgacgggtaagcttgtcgatgttgtccatgttgcaaagcatgggcaaggaggagaggtcgggatcgggataggaaaaggccgggttggattccatgaatccgccgatccatccgggtgggattttatatttctttgctttggccatcggaaaacaccccctgtgatccgccatcccattagtggaacagcggccgcttaatgctgctttaccttgtacacccgaaacaaatgttttacaatttttgattgtttatttttagacatgttgcaatttttgaaagcaacgaagcgatgaaactcttccaatgatccagtgagtcgtccgagctttttcctttcacccataccttcggagagcctctgccatgaccacatccgccaagctcccactcgccgcgacctgcctctctgcagtcgccctctcagcctgcgttcaggttgcggctgccgatcagaaatgtaccggcgacggctgggcgacgaagtcggacgcggccttcgccgccgactgcgccgacaccgccttcaacggcagcctggaggaacgccagatgctggcctggatgttcttcacccgggtcaatcagctgatcgccgaccccacgaagggcggcatgtcgaacacgggaaaggtgccggtctggatggcctggcccaccgaccccgacaccttcgatacggccaggcccttcgacttcaaggacacgccgcgtgacgatatgagtcctactgccgagaagaaggacctggaggcaggtggcgtcgccaccgccgatcccgacggcgccaacgaggaggtcacccgcaacagaatcagctacgactacctgatcgagagcggcctgacgaccaagctcgacatcgctgcgttctttgagaagaacgactatgtggacatgcccgtgggttcggtcgaactgaaagcctcctggctgcaggtaaccgaaggcagcccggcgcccgacggcgccctgaccttcaatttcgacagcggcgaatactggtggcgcggcctgcacatcatggcgaagatgcagtccctatcggaccccagcgacgtcttctacagcgaggacccaagctggttctggaccaccttcgagttcacgaacaacccaggtgtggctcatgtgcgcgatcagctgatcacccagcgcgcacctctgtccgaaaaggaaatctccgccatcctcgaaaccggcggcctggctggtttcgggttggaagcctacgcgcccaacggcacccagatccgcttcacggcggcgggaaccggcgagacgccggtgatcctgggccacacggatatggaggatttcgccggcagtcccaacaccgcgcagccacgttactggacccgcttcgaggccagctgccacagctgccacgccacagcgtcctacaacccggagatcgaggccttcttccccttctccgtccccaccggggctctgcacccgggctacaacaaggccgacagcagcggcgcggtgcgctacctgggccagggctacaagcccctggacttcatgtggccgattgcgtttcaggcgcggtgatctgggtcgacgtggatgtgttgcctctgccaatgaacgcacaaaaagagacctaaccgcgactatacgaattccagcgcctgctggttatagagcgcgcgcaaaagcccgggatgatcgagcagcgcgggcgtgtcgtttctggtaacagcctcttctttcatcaggcttaagatgacggccagggcatcctcatcgatgtcaaaagtcttgcggttaaagccgaggctgtagcggccccggggcgacgggatgagcgcgaatttcacataggcgggcttgatcagaccggtcccggcctgcagggcgtctgtgaaggcgctctggctgagagcatcgtcgcgttcgctatcctcttcgatgtcttcattgcttgagccggtgaaaaaggcggccagccactcggaaaacgcgggcgcgctcagcggctcggcgaggtgattgcgcagcacctcaaccgcattgatggagagggtgaagcccgcgctctctgcgctcaagcccgcgccgacgtagcggtgatcgcatgcttcctgttcggcgaggtactgaccgtaggcgccgtaaagttcggagagtttcgggccgaggaaaccgacggaaaaggtcaaggcatcgtccagcgtggagccttcatgggcgaaatgcggggggatgtacaggacgtcgcccgaagtcacctcgacgcaatcgccgtcgatgggatctttcaggattttgagctcgaggccgtcaatatagacctcatccatgacggcttcgcggccgacggtccagcgccgcgtaccctgaccctggacaagaaagacgtgatagctgtcgacgtgaccgccgatggtgccgcccctggtggagaaactgaccatgacgtcgtccatcagccagcggggcgcaaaatcgaacgcgcgcaacaaggcggcggtgtccgggtgaaactgctcgacgttctggaccagcaggctccagggcggctttccggcggtgttgaaatcctcttcgccgaagggaccgaattggcagctccagtcttcccgcgagaccatgcgcgcccgcacggtctcttccatggacagccccgcaagttcatccggcgtgatcagccgccccattacggcttgatcgatggcgtcccgcacaagaaacggccgtttgttccagtagtgcgcatagaactccgcaaccggcggcagggcgtcgagagtgacaagcgtggcaggagaagaggacatcacaggttccgatgttgagaagcttgcgcccgttatgacatgcgcgtgtccagcacccaagttcagtgccatttctgataggagtttctgccacaggcaatcgcatattcggcgcctgatgtggagggttgggagtggaatcgggtctgaattgctgcgtggatgttgttgcggcgagcacgcataaaacatgccgtggtcccgactgtatgcaaatcaagacctaccctctggccattcagtaggcgcctgaagactccgggtttcggtcggataagctggcatcaaatcagcccgatttatccttctcgacgttacaactgaaaaccaaatagactcgaaatttccatcataaggtgtgttgtgttagacttcggatccgatcaattcattttgcggaggataaaatgaaatcaaaagacagcaaaccagagctgcgaaatgacaaaaaaaacatcacgtcagtaagtgttagcgatgaggtcaaagcgtcttcacattgtgggaaggaagttacagcatcctcacagtgtcgagcagaagtagaaggctctgctcaatgtggtatagaagtaacggcatcgaacagctgcaaggaggaagttaaggcttcatctcaatgcggaaaaaaacgatagggtcgtcaaacaacgcaaagtgatttctgttctggtttcgatcatcgtgaagccattggtgtcgaatcaaattgaaagcgatccgctcccatgcagagaacagaactacactcagaggtaaccagcaaagctccgcctccagatcaattgtccttcatgggttttttccggagaaccatgggcacagaaaatgatgtcagagaattcataagtgcgattgagcaaaccggattaattgatgagatccgacctgctatctggatgccagacgaaccacagatctcggcgttcatatgccgatcgtctctatgcaccgacgcacttggcttcggagtttctctctctgaagatcacgcgaagctaactgcactagccgagtgcctcgaacgaatggcgttgttggcgcctcttcctacgaagcgccgaatgtatgatgcgcatcgcaatgacatcgatctattcgatttgtttcatcagcgtgacaaacagctcgcacatttctgttcctggtggcctgtgacacgctgtcgaacaggccaacgacatcaaattccagcacagtttttgttacttggacacatgcaagaaacacggttgcttcatatcagaaattcttcaggtactgcatttggcaaaaaaggaacagggcacgcactgcgaactgcgaaacttgaactggtcgaacggtactttgtcgaagcgaccttctacgaagctgacgattggcggccaattaaagatttccccgagagcttaaataaattgatccagaattttcaggattgcggccttaaacctcacatctttgacattccatcaaatcttgatgtttctgtgatcatggtgcttttagttgatcaacaaaaccgatgtgtggccttgactgctggctctgcggctagcttcgacctttacccagcaattgagaaagcattgatcgagagcgcacagagtcgttcttctcggcgagcttggctatcatcatacgatgaacgagccccgaacagcattcagctcgataccacgctagcgcgcgcgaagtattgggcagatagcaagtctcctggtctattaaggctggatgagaaaattggaaagccggttgcttatcaagacgctgtacagaacacccggttatctagttcggagaaagagaagctacttgacgataggctcgatttttttgtcgcggatattactcctccagcactcgcaaaatacggattcgaggttctccgcgtttacgaaaaaagcttggtgttgaaccctaacttgcggcgcgcagaagagacattaccgtcgcctttcgtctaacgaaattaggcgggttcacatactacgcgatatactacttccagacacacaacttcgaagcagatcaccggccaaaccacgggtgaccctccaatgcttgcactctggcgcttttccggcctcggggagctcggcgaccacttcaccagccgcgcgcagcaggatcgcgcggtgcgattgctgacggacatgctgacgaacttcaatggggattgggtgggcgcccgagttggcgagaaacaaatggcgactgtagaattttcacggcagtttcaggacgctttgggtcaggggcgtcacattcaggcatgaagaggtaaatgcaggatcggactcacacctggctttgcgactggggtctgatccaaatctgtgcgtgacagaactcaggctgcctaagctcggctccggatcgcggattttttgtcacgctgcgtccgtctgaagaaaccggccctcagcgaccaggaaggcccggccaccgacgaggaccggaccgccgggacgggcctggcgaacagtcatctcgctcgggcgcccggtgaagcgcccctggctcagcgtcaggggtgaagctgcggcgccgtggcgccacatcatcgcagccgccggaccggcagcgctgccggtggcgatgtcctcgatccggccgtggttgtcccagctccggccctccggcagctccggatcgagcaggtaaaggaactttgcccccagcttggcgaggcgggcttcgaaatccccggcacaaatgcgcgcggtggcgagccctttggccgtcaccggcagaaccgcatagggcaggcccgtcgaggcgaccaccgccggcaggccatcgtacctgtgatcaggcttcaagcccagacctgcgagaagcctcgcgacggccatctccggcagcggcgcgcccagcaccgcctccccctgatccatctccgcgaacagccccctgccttcggaacgggtcgagatcccgacctcccggcctgccagagaaatcttccagcggctctgtgccgttgcacccgcgagatggtgaagaacggcggcggcgcccaacatggggtgtccggcgaaggcgagctcctcctcttccgtgaagatgcgcgcggcgggattgggcgtacccgcgccggtcagaaagatcgcctcgaactgccgcaattcccgggtcagcgccagcatggcgccagcgtccagcccctccgcctccggaaagaccgcgacaccgtttcccgagagcggggcatccccgaaaacatcaacctgtaaccagcgccgcacgcctgcctccggagcggcggtgcccggcgcgcctgggaaccgccgggcaccgccaacaccagaggcagtgaggacagcggaggtaagatcattccgcgccatcaccacttctccgcaaagggtctgatgaccagatcgaaagcccaggccgaacggtcctgatgggccagatggaagacttcctccgcgatcgcttcgggcttggtaaagaagtccgcgcgcggatgcggccaatccggcggcgggatcagccagggcgggcgctccgcctccggcccgagccaggtgacgtcgatcgcggcatcgatggtcacgtagccaacgtgcacgcccttgggcccaagatcccgcgccatggcctcgcagagcacgcgctgggccgctttactgggggcgaaaagcgcatagttcggcaccccccggtgcgacgccgtgttgcccgtggccaggattgcgcccttgcccgcttcaatcatcgccggcgccagagcgcgggccagccagagcagcgccgtcgtattgacccggaagttgcgctccagcgccgaggggtctccggtcaggaacggctcgaagctgtgggccaccgcattgtgcagcaggacctgcgcggcgcccatctcccgcccgatccgccccagagtccgctccagggcatcgagatcggcaagatcgcaaacgtaagccttcgtgccctcgacctcttcctccagcgccgcgagccgatcggcattgcgcgcgatcatggcgacgcggtaaccgccgccggcaaaacgccgcaccagggccgagccggtcgtatcgccgaccccggtgatgacggcaaggggcgacgccacgatcaggccgcccgtttcggcccccagggggcaccgtacttgggatcctcacggccggcccgcaaaacctcgtggatctcctcgttcacctcgtaggtccgcacccattcctcgtccccctcctgcatcagcagggccgaatggggcgatctcgcgttgcggcggtaacggaccagggccatgcggcaggcctgaccgccgaagccggtggcatagccgctgccgtcttcccgggcgaagcggacgcggtagagcttccagaactgtccgtcatgctcatagatctcgaagctcagttcgtgggtgtcgtactgccacatccattttccgctctcgtggatcctggtccagtcggtcagccggctgccgtcctcgaacaaggcgccttcgaggcgccatcccaatgtatcggtcatcttctctctcctttgcttattgctgtcgggcggaatgctcttcaggccgtgccgcggtcctcgaggatccgggtcagttcgccgttgtcgatgtcgtagacatagccgtggacattgacgtgccgaggggtcccaggcgcgttgcggatcagccgggcgtcatgctcgaccgaggcgacgtagtcagagatgcacaggctctcgcgcggataggtctcggaaatatcgacgccctgttcctcctgccaggccttgacgatgccttcggcggtgtaggaggtcgcgccgcaatgggtgtgatgcaccaccgcgatgttctcgaccccgagcagatgctgggcgacggtgatggaacgaagcgcgtcgagagcccggccgccggccaccacgacgttcagcacgctcgtcgtcgtaccgataatctcgcccccggcatccgtcaccgcctcgccgggccagacatcgcccagatcccgtgccaccgcgtccgggataccgctggcgcgcgggtcgaagcagtagatgatcacggtgcgcagcggcatcaattcggcgaattcagcccgcaccagcgtctcgtcgtatcccggctgcagggaaaaggcttttgcgttcaggtcatcatgggtctgtgccatgctatcctccaggggttcgagtgggtcagcccgcgcgcttcagcgcggtttcgatcaggggcgcatagccgtcggtcgcgatcaccttgccgatctggcggaagtaaggctccccggcctcgatcccgagcgcgtcgaccagccggttgacgtagttgaaaagggccacgacgttgaccgcgtcctcgaccgcctgctcggaccagcccaccgccatcagggcgttgacgtcttcctgtccgatctcgtccgggcgctccgtgaggcggtccgcgaaacgcagcagcgcccgcagtcccgaggacaggccctcgccgtcccccgccgccagcgcatcgagcgcgtccatcgtttcggcatcgacacccatggccaccagcgtccagtgatgcgcaccgacgcagaagccgcagccgttgcgccgcgagacatgggccgcgatcatctcgcgctcggccttgccaagctgcgagggccgcgtcatcacgccctcgatgaactgcagcagcggcgcgtagagccccgggtcgcgcaggaagacgtcggcgacgccaggcaggtttttcgtgtaactcaggtgtcccacttgctgtctcctcggtttttcatatcggccagccataacgatcgatatgatattagtgaaaattttttagccgacggccttcagcgctgttttgatgtagcgtccgatctgcgcgtcatcctgtccggcgcgcaccagcaggccgatgccgtagacggtcgcagccagaaactgcgccgcctcttccgcctccttccgggctgccttcttgcccgcctttgcatccttcacttcgcgcagcagcagcttctgaaaggcgtctgtaagcagatcgagatgggccttcaccttcgccgccgcttcgggatcctgcggcgcgagttcgctcgccgtgttgcacatcagacaacccacccgcccgtccggcgtctccatcagttcaagcacccgcgccagcgcttcggcgatcacctcccgggccgggccgggcgcttccagcgcctgcaggacctccgccgtgacggtcttgcggtaatggtccagggcggcgaggaagagcccgtgcttactgccgaaaacgccgtaaaggccgtaaggcccgacgccggtgcagtcggaaagatcccggatggagctgtcgttataacccttgctgcgaaacagccgcatggccgccgccaccgcctcctccggctcaaattctctcgcccgcgccatcccgactccatttcataacgttcgatatgaaatatacgaacgacgcgcgcgatgtcaatcccggaggatggggtgcgggtgagttttgaatcagcctgaatgcaaaacgctttaagtgctgcgggactctctgtgcagcaagtcgccggcgcctctcaatgccgaccgatcgcgctacgagcggtacttccatgcacgtgatgcccgcctcgcggtatagacaaatcagccagcgcaaactgccggcttctccgcagcattgtgcatggagttgctcaagctcggcggcgccaccaaaaaaggcgggccggagcccgcctgttattttgtgcgatccattcgcgaaaagcgaaggcttgttcacgaccagaccgtgattttctgaatgctacagaagaatgaaaatactatttacacttaaagtcaaccaatacattcagtttgttctactcttgcttgcgcatcaccaaaactctcctcataattgagtaaaaggcgatacaaaacctctaggggaggtaaaatgacctacacgctcggtctcgatctcggcacgaattctatcggatggtgcgtacttgacctcaattccgccggtcagcccgagggcatccgcgatatcggtgtcaggctcttttccgatggtcgaaatccaaaggataagacgtccctggccgtcgcccggcggaccgcacgctcggcaagacgccggcgcgaccgctatctgcgccgcaggacgaagctgttgcgcttactcaaggaacacggcctcctgccacactccggttcggcattggatgcggttttcgacccgaagcaaaacgatccttatgaaatccgctcccgcggcctgaagagcaaactctcactccacgagttgggccgcgccatctttcacctgaaccagcgccggggtttcaagtcgaacagaaagaccgacggtggcggcgacgaggaaagcggtaaaatcagaagcggtgtagagaagctgcgccaggccatgaccgaagccggtgcggagtccctcggggcctatctccagcagcttcacgcaaagggcggcagcgtccggacccgcctgacgcctcagccagccgatccgggcaagaaaccgcagagcggatatgacttctaccccgaacgcgccatgatcgaggaagaattcgatctgctctggacgcggcaaagtcggcaccacgcgacggttttgaccgatcgtgcccgcgacgagacccgagacgtgctcttttttcagcgccgcctgaaaccgaaagagcccggcaagtgccgcttcaaccctgaagaaccaaggttggcgcgggcgcatcccctcgcccagcgcatccggattttccaggaagtcaataatctgcgcatcgttgcacccgatcaaagcgaacgcgaattgacgcaagacgagagagacagctgcgctctggcactcctgagcacgccgaaacggaccttcggtcaactccggcgtcttctgaagctgccccccgacagccgctttaatctcgagagcgagatccgcaaggatctgaaaggcgacgagaccgccgccgttcttgcccacaaaaaatgcttcggggccaactggcgaagcttcgactcggaacagcaggagagcatagtcgaacgcctgctcgaggaggaggatgaagagacgctgatcgcatggctgattgccgaacagaacctgaccgaagaaaccgcgcgctttaccgtccgcagaaacttgcccgacggacacgcgggcctgggcatcaccgcgacccgcgggatcctggcgcaactggaagcctccgtcgccgttttcgccgaggcgacagcggcggctggctatcatcactcggacttcagcaccggtgagatcttcgactccctgccctactacggccgcgttctcgaaaaccacgtcgccttcggcagcggcaacccggaagaccgggaagaggaaagactgggcaagctcgccaacccgacggtccacatcggcctgaaccagatccggcgcgtggtcaacgccctgatcgcccggcacggtcatcccgggaaaatcgtaatcgaggtcgcgcgtgagctgaagctcaacgcaaagcaaaaagagcggataagtaagacaatcggcgagaacacccggcgcgccgagcggcatcgcgaggagttgcaaagcctcgggttacccgatagcggcgccaaccgcctgcgcctgcgtctttgggaagagctgaatcccgaaaatcccttcgaacggcgctgcgtatacagcggcgaacaaatcagcctcgagcgactcttcacggcggcggtcgacatcgaccacatcctgcccttctcacaaaccctcgataactccgccgccaacaagatcgtctgtagcgcagccgccaacaaaatcaagcgcaaccgcccgccccacgacgccttcggcacccgcaccgactggcccgacactctcgcgcgggccagccttctgccaaagaacaagcgttggcgcttcgccgcggacgcaatgcagaagttcgagaccgatcgcaactttctggaccgccaactcgtcgacacgcaatacctctcccgcgtggcgagggaatatctcacggcggtctgcaatccgaatgaggtctgggtcacgcccggccgtttgaccgaaatgctgcggggccgctggggcctcaacgaactcctgcccgatcacaatctggtcgagcaacagaacaagaagaaccggctcgatcaccgccatcatgccatcgacgccgtcgtggtcgccgtcactgaccgcagcctgctaaaccgcatctcgcgtgccgcgggccaggcggaagaccaacagcgcgagcgtctgctcgccgatatgccaacgccctggccaacgttccgcgacgatctgaagcgcgccttggatgacattgtggtctcacaccgcgcggatcacggctcgtcaggtggacatggtcgtgctgccggacgcaacacgaccagcggacgcctgcacaacgacaccgcctacgggctcgccggtgaagcgaacgcccacggtgcctttccggtggtgcaccgcgtgccgcttgaaagtctgaaatcctccaaggacattgagaagatcagggaccccgaactgcgtgagaccctgcacgcggctaccggcggcctcagcggcaaggatttcgccggggcactggcgcgcttcgcccagttcgatgcgaagttcgcgggcatccggcgcgtgcggatactggaaactctcagcgttctgccggtccgtgacaaaagcggccggatctacaaagcctataagggagacgccaacgagcggttcgatgtctggcgtctaccatcgggaaagtgggtcagcgaaatcatcacccgtttttccgccaatcagcccaggcccgagtccgcagatagccgtccgcacccggccgccaaaagaatgctgcgtttgcatcagaacgacttcctggcggtggagatggaaggcgagcgccgactggtccgcgtcgtcaagttctcgaccagtggttccatgcagctcgtcccgcacaacgaaggtggcaaccttaaggcgagagatgcagataagaacgactatttaaagtatattaacacctctgcgtcaggattacagaagttgagagcgcgccaggtgcgtgtcgacgagatcggccgggtcctcgatccgggtccaagatcatgacttcgcaccccggcgcggcatacttccgcatgccgcagacgggcctatggaccgaatcgtcgatatcgagaccgaccgacagcatctcagtgccacacgcggcttcctcagggtcgagcgcgagagagaagaagtcggccgcattcctctagacgatatcgcggcagttatcgtccatgcgcacggcatcacctactccaatagtctcctcgtcgccctggccgagcgcaatgccttgctggtgacctgcggccccaatcaaagcccggtgtcctgcgtttggccgattgagggacaccaccttcagggcgcccggatgcgcgcccagtggaacgcgggcaagcctctgcgcaaacgcctgtggcggcaggttgtggtggcaaagatcgaaatgcaggccgccattctggcagctcatggccaaaaggacggggcccttcgcggcttggccaaaaaagtccggtccggtgacccggaaaacctggaggcccaggccgcgcgccgctactggccgcttctgtttggagagaatttccgccgggaccgtgccgcgggcggtctcaacgggcttctgaactacggctacacggttttgcgcgccgcgaccgcccggagccttttggcgagcgggctacacccgaccatcgggctgcatcattccaaccgcagcaacgcctttgccctggccgacgatttgatggaaccctttcgcccccttgtcgaccatcaggtcatcgggctcagagagagcgggatcgaagacatctgccccgaagccaaagccacgcttgtcgatctcatgacactggacctgccgatgccgcatggcgccagccccctcagcgtctcgctgcaaagactttcgcactccctcgccgccgcctttgaggccgccggtggcgatctcgacctgcctttaacgctgcggcctctcgatctgccggcaccggacagcggcccggccccttaacacaacgcatggcaacgcacctcagcggatatcagcttatgtggattttggttatgttcgacctgccgaccgacagccgggaaagccgaaagaaagccacaaaattccgccagttcctgctcgacgaaggcttcgtcatgagtcagtattccaactacttacgcttttgcaaaggaaaggagcagagtgaagcctacatccggcggatcgagcggaatctccctgagcgcggcaagatcaacatccttatgtttaccgacaaacaatacgaaaacatcatcagtttttccgggaaaacccgcaatcccgccgcaagaaacccgggccagctcgccctattctaacgctacagaaagattttttgtgaataatgaccgcttaaacgtcttttttatcagatatttaagcggtcacctattgtagcattcagataatcacggtccagccgcaaccaatactctgtctatatctacccatacgccattgtagcattcagataatcacggtccagccgcaacggctcgtcacctgcggatcaatctggacctattgtagcattcagataatcacggtccagccgcaacgagccggtggcgctgcatgattatcggtacattgtagcattcagataatcacggtccagccgcaactcaggaggccaagctccgccattttttcttattgtagcattcagataatcacggtccagccgcaactgtaggtctcgaagtgcagccactccacgcattgtagcattcagataatcacggtccagccgcaactaccgcgacggctttaacctggtcaacctgattgtagcattcagataatcacggtccagccgcaacgaaacggctggtttgggacaactggcaaaaattgtagcattcagataatcacggtccagccgcaacttgtcgaggatccatccaatgaagacgagcattgtagcattcagagaatcacggtccagccgcaacccgttcgccagcatggtctgcgcgaccgagattgtagcattcagagaatcacggtccagccgcaacagtggttcatgtgcaatgcagcctctatcgattgtagcattcagagaatcacggtccagccgcaactggagtcgtagcgttcggcggaattggccaattgtagcattcagagaatcacggtccagccgcaactacccgctcaggttcgagtagctgtcaatattgtagcattcagagaatcacggtctagccgcaactgatagtgacggttagacccgcttcacgttattgtagcattcagagaatcacggtctagccgcaacacctgcgcgatgccgacctgtgcgatgccgattgtagcattcagaaaatcacggtccaacgaagatcgaaatgcgaagcaccaaccaagccgatggttgcgttcgtcttcctgcctaacccgccaatgcaaaccgatagtccgccggcagcgccacctcacgcagttccagatcttccgacgcgcccgtcatcccaaaggtcatcccctccggaatgacgaaactacccccccgcgctcaggtcctgcgccccctgcccttcggccttcagggtcaccgtcccctccagcacgaagtaaaacacgaactccgccccgtgcttcaccgccggaatccgtgtcgtcccctgccgtagccgccaaacccgaacactcgccagcccctctgtcgccgccgcgatcccgatgtcccggaactcgataccctccaaacgtcccgcctgccagtccgccttctccgcctgatgccgcgcaaagcgctggccgttaaaaacccgctccggattcactgcaccattcggcaagggcatgtcatggtcgatgcaggtcatgtgttcggcggggcagccgatttcgatgacctcgaagccgggggagcattccaggacccggtagcggatctccggcggctggaggacgcagtcgcccgctttcatggcgaactgagggccctgatcctcgtagagcaggtgcacccagcctttacggcagtagatcatctgaaagcgggccttgtggaagtgcaccatgtcgggcaccaggccgccgtcgtggattaccatgtgggacgcgatgaaacggccgccctggcggttcggggtcaggtcgcggtagcacattgcttgtttcgatcaaaagagatcattgatcggcgcctgcgcattccaatggcggccgcggcgcggaaacaaagctctgcccgtgaatagtcccgctcactcacgcgggctcccatcgcttacggcaaagcggtgcaacaattctgtatagccctattcgaatttcgaggagtgacggcgccggcaagcggcaatagcctgaaaacaaataatttgagggttcacattatgaaacggttatttgcattaggcttcaccactgtcttcctgttatgcggtgcctcagcaacgcatgcgctgcctctcacccccgacgatgtttccgtcgccgcctgtgacggcagcgctacctgcatcgacgtcaatggaggagcaggcgttattccactcactgccactggcaccgccacggtggatatcgatatccttttcggcccacgcatcgtgttgggcgatcctggttctggccctccgccctttcccggctttccgtccccgccaaatccgtgggaaatcacgctcaccttcgcgacgacgagcggcaatgcggatataacttggccacaggaggatggcgacctgatgttcacgggcctcgatggcggcgcctccgacatttctgtattcgcggacaacatcttcgatcgacctctgctgcttgacgccggcatactgacctggcgctttgacgtcagtcaggaacaggcgggattgttccccggcctcggctttctcgacatccacttcaacaacgttcagtttgacctggacgacaatgcgacactcaccttacagcaggtcagaattgatccgtcagtgccggatatcgtcgacgttcctgacatcgttgccgtgcccgaaccagccacgctggcgctcttcggtttcggtctcgcgggcctcggcatcgcgcgccggcgtagatcggcctgacgccaactcacatagtgcttagcacaggccttgggcgcttaacacaggccttgggcgcttagcacaggccttgggcgcttagcacaggccctggcacccctgctacgcttcggtctccttggcgggttccgccagcaccgcgtcgacatccttcgcggagggcggcagccagccctggtccgtgcgcgtggcgaaggcgcgaccttttccgaagatctgcgcatcgcgctcggtcatgagcatgcgtgacttctccatataggccgggttctcgtgactgggaatttccgtggatggggtcatgtcccatttgcgtggatgcggtcaggtctcgatttgtgcgttaaggaagttgccgggacgcgcttgaaaaaaagcccggcctcacgccttcaactccaccccataatccgccggcaacgccacctcgagcagttccaaaccctccgacgcgcccaccatcccaaagaccatccccgccggaatgacaaagctatctcccgcgctcagatcctgcgtcccctgcccttgtgcgttcagcgaaaccgatccttccagcacgaagtaaaacacgaactccgccgcgtgcttcaccgccgagatctgcgtcgcacccggcttcagcctccagacctgcgcgctcgccaggccgttggtcgccgccgcgatgccgatgtcgcggaactcgataccctccaaacgtcccgcctgccactccgccttctccgcctgatgccgcacaaacttctgcccgttaaaaacccgatccgggtcgacccggccattgggcagcggcatgtcatggtcgatgcaggtcatgtgctcggcggggcagccgatttcgatgacctcgaagccgggcgagcactccaggacccggtggcggatctccggcggctgcaggacgcagtcgcccgccttcatggtgaactgagggccctggtcctcgtagagcaggtgcacccagcctttatagcagtagatcatctgaaagcgggccttgtggaagtgcaccatgtcgggcaccaggccgccgtcggggatcgcgatgtgcgacgcgataaaacgcccgccctggcggttcgggatcaggtcgcggtagcgcatgcccgcccggccgatgccccaggcctccgggccgcccattttagtgacgacgaaggactgatcgatcggcggcaggttcagcggcggatcggcctgcaacagttcgatgcgggtgccgttgggcgcggtcagttcggttttgccgccggtgagcgcccctgggtcggcgcagcgcagggcaagaacgccggggttcctccctgcccccttctccagccggatacgcaggccgtggccggagatcaccgccgtcgcgggcgcatcggcggggaagatccggtccaggcgaaaccccagttgctcggtgaagaacgtcaggctctccggcaggctctcgcagggcaggacgacttcggcggtctcgattgccggtttatcctgcgggtgctcgatttggcgggcttcgcttttactcatactcgactgcgtctcgttttagggggcgggttccatgccggcatagctgctctattgcggcgggttggtggcccggcagagggcttcggcgcgggacttgaagagggtggcctgggattcgttgaccacaccgtcgctgatcatctggtcgatcccctcataccgctcgtcgatgcaggcctgataggccgtgtcctgcggcgaagcagcctcctcggcgaccggcaggaaatcggcccggttgatgtagagcgccagggcaaggctggccgccgccacgcccagcgcaagcaggcgcgccgccggacggtcgagaaaggaaccgctgctggaagtcgtcataaaacacccggtcgaaggaaaatgagagaaagccgcgccgccaggacgggcgcagggcgaagccactttgaagcctactttatgataacctgatgcgagaactcgcggccgttcgagatggtgatctgctcaaagccgagcatcttcgccagatcgaaaaaggtgaaccagtcctgtacgccgaactccttgaaaatcggcaggacccgcgccgaggcggtcaggttggcgaagatcgcgcgagcccggaacagggtatcaatccgctcgtcctgcagcgccacgatgatcagcttttccgcctgttcccccttggcgaaaatcgccgcttcgggcggataggggctcttcagcttctcgttggtgatcccggtgacaaacccgatccgctgggaccggccgaccccggcgagcttctgcgcccgggcttcgtagatctctacctccatgggctccggatagtagtagcccgcgtgccggtcgtccgctcgcaggccgttcccgcccgccactgccgaaaacaccagcattactgcgcccagcgccaataccctcaattccgccgccggaaaaacccgcgtcatcacacaccttcgcaacatgtcggcccccgttcccatttattgttcttgcgttaaagtgcattcacatccgatctttgacaagcgcgctcacgcgacggcggctttcccgggttccggagtcttctccgtgagatcagaagagccgatgcccggagcgcacaaaatataacgatccggaaccggcagcgtcttgatgcgggttctcatccggagcgcaacagactctcttgcgggacatcgcgtcgagaaacatggggtagtatgaccgatccacgcctcgccttcgtggccaacggcaccgatgaagccaatgcggcgcaggaacgcctcgcgcaacgctacagccatgtcagcccggaggaggccgacgtgatcgtcgcgctgggcggtgacggcttcatgctggagaccctgcacgcccacctggaccgcggcgttccgatctacggcatgaaccgcggcaccgtgggcttcctgatgaacgagcacaacgaggacgacctggtcgagcgggtcaccaccgcgcgcacggcgacgcttcacccgctgcgcatgaccgcgacgaccgtggcgggcgagagtttcgacgccctggccatcaacgaggtctctctgctgcgtgaaagccggcaggccgcgaagctcaagatcaagatcgacgatatcgagcgcatggaggagctgatctgcgacggcatcatcgtggcgaccccggcgggcagtaccgcctataatctctcggcccacggtcccatcgtgccgatccgtgcggcgctgctggcgatcacgccgatcagcgctttccggccccggcgctggcggggtgccctgctgcccaacaccaccaagatttcctttgaagtgatcgagcccctgaagcgcccggtcagcgcaaccgccgattacaccgagatccgcgatgtaaaggaggtctcggtctacgaggatccgagcgtcgaactggacctcctgttcgatccggaacacagcctggaagagcggatcgtgaaggaacagttcatcgtgtagatcagatcaaggttagatggactcgctaacagcggtcacccgaccttatgagtccggtctaacgataaggtttagaacgtgatccggtctaacgacggacgagcggcccgcggcaatcagcgttgcgatcggaccgacctctcccaggtccggattggccggatcggggttgaccaggccggggtcggccaggtcagggttggccaaattcgcgttcgccaaattcgggttagccaaattcaggccggccagacgagatgagccagacgagatgggccaaacgagataggccaaacgagacagggcgagatgcaggtctcaaagatataacccggatcaacgacctcacctgaaacaggcgtcagacacttcgccccgccccggggtcgcttcggctatcggggccgataacgcgcgcggatcggcgccttgggggataagtccgggcaggctgtggcatttgtatgtcaaaaagaagtgctgcacaccggaatcggcaggggatatcgatccaggcggcagcacaagaggtggaggttttttcacagaggcagtgaaaaacctgaaccggtccgggtcccaatccgtcggtcagtgtctggcccaattgctctgttaaaaggcgctcaaaggccgcgcaaactggggggagccggtcgacgatcttgacggaatgcatcaagatcaaccgcatcccaacgccaggcgggcaaaccggtcacgcagggaacggctcgtggtttgcccaaacctggataatgtcaggatacaattttctaattcatcctatcgacagggataagacagctgtcctttcgctcactgacgtcgctcaggccctccagaagggcttcgcgacctctccaccgacgtcggcacgcgacagtcccatgtcgcgcaggcggcggtcgctgagcgaggccagatggtggcgttgagtcgcgcgatcctgccaaatgagcagagtattaaagacatagaggacgacacgcggtaggagcaaaaagacgtcagccggggttttcagggacaagccaatgggctgctcgtgggtgtgcagggtgtaatttgtcatctctcttctcctatccttcgtccggcggaaccgatttcgaccggactgtcgttcgtcttgtgttcttagaaagtattgtggattgcggatttcttcaaacgatgttatttgatgcatcggattagatttattgatctgagttcatggttcgtaaacttcctcctctgaacgccctgcgcgccttcgaggccgcggcccggcacctctccttcaccaaggcggcggaggagctcttcgtgacccaggccgcggtcagccatcagatcaaaacgctcgaggcgcatctcggcatccagctcttccggcgcctgaaccggcggcttctgctgaccgaagcgggacaggactatttcccggtgctccgcgacgcgctggacatgatgaaccgcgccacccagcgcctgcgttcccaggacagcagcggcaatctcaaggtcagcgccctgccctcctttgccgcgaaatggctgctgcccaggctgccgcgtttcaccgaaaagaacccgaccatcgatgtcttgatttcagcgaacgaccagatcgtggacttcgatcaggacgatttcgatctggcgatccgctatggctcgggaaattatccgggtctgcgggtcgaccggatgatgggtgaccggatctttccggtctgcagcccccgcctgctggaaggcgataagccactgcaggccccggatgatttgagccggcatgtcctgctgcacgacgacatggcgcgcactgacgcctcggcgaatgactggcagggctggctccgggccgcgggaatcaccacggtcgatccagaccggggcccggcctacagccattccagcatggtgattcaggccgcgattgaaggccacggtatcgccctgggccgcacctccctgattggtgacgatgtggcggccggacggctggtctgtcccttcggaccggtcataccgggacccttcacctactatcttgtcggtccggaagagactgctgatcagccgaagatccaggctttcaaaacctggatccagcaggaagtcgcggccttctcctaccccgaaacgcccctgcactgcggcgaacaactggttccggaggaatgtggccccggataacgcgaattaacccggccgggagataccgggtccgaaaccccagataagcgccagacgcaggtccggtccgcgtgcgtgtatctggcatttttgccgaagctctgacatgcttcgcacccggttcacagcctcacccgaggatcatccatcgtcgatatcgccgccatacccgctgaagtgacagccgccagcatcgcgatgctcgagcgtctggtggccttcgatacgaccagccgcaactccaatctggaactgatccattcggttcgggattatctctccgg

SEQ ID NO: 420 - DNA, 23177 bp, synthetic construct
  misc_feature 1..23177: note = Synthetic
  source 1..23177: mol_type = other DNA
ctctaaagaggggcaccatgtctctggctggccgcgcgctgcagcgcttgcttgaaatcattactatcggcctgctggttgtgctggcgctgctggtggttaccgcggtcaccttccgctatggcctgaattcctcgctgccctggtatgacgaggtggcctcggtcctgctggcctggatcacctactacggcgccgcactggcggccctgcgccgcgggcacctgggtttttccggcctggtgctgagcctgccgctgttgccgcgccaactgcttttcatcttcgccgaactggtcgtctacgccgttttcatcgccatggcctgggccggctgggtggtgctgcaggtgatggccggggagaacctggtatcccttgactggattcctctgcagttcacccagtcggtggtaccgatcggctgcgtcctgttcgtcctggcacagatcctctcgaccccggcggcctgggcccgctgtctcgccgggcgcgataccgaggccgaggagatcgaagccgaaatcgccaaagccgaggagggggcccgtcaatgaccgcgctgctcattttcatcgggcttctgggcctgatcctcatcaacgtgccgatcgccgtggcgatctgcgccgtggccctggtgggcatggtggcgatgagcggcgagctcggcctttacaatgctgcgctcacgcttttcgacggcgcgacctcctttccgctgatcgccataccgctgttcatcctggctggtgctctgatgaacaccggcggtatctcccgccgcctcatcgccttcgtctcggcgctgatcggctttgcccgcggcggcctggccatggtgaacgtcggggtgtcgctgttcttcgccgagatctccggctctgccgtcgccgacgtggcggcgatcggctcggtcctcattccggcgatgaaggaacgccgctacaagccggccttcgcggcggcggtcacatcgtcctcggcctcgctggcgatcatcattccgccgtcgatcccgatgatcctctacggcgccatggcggatacctcgatcgtgcagctcttcgtggccggggtcgttccgggcctgctcggcggctttgccatgctctgcctctgttactggtttgcccggcgctacaatctgccgcgggaagaggctttctccctgccgcgcctcggcaaggcggcgcgcgaagccttctgggccctgctgctgccggtgatcatcctgggcggcatcttcggcggtatcgtgacggcgacggaaggggcgggcctggcggtggtcgccgcgctgctgatcggcggcctcatctaccgcgaactgaaactgaaagaactttacaacgccctcgtcgagggcgtcacccagaccgcggtggtgatgctgctggtcgccacctccgccgtgctggggttgcatctgacggaaatcgaactgccgcagaatctggcccgcgcgattaccgaggcgacgagcaacaagtatgtcgtcctgatcctgctgaacatcctgctgctggtgatgggcatgttcctgcacggcgcggcggcgatcatcctggtcgtgcccatcgtgctgccgctgattcacgccgtcggcatcgatcccgtgcatttcgggatcgtcctgaccctgaacctcgccatcgggcagcagacgccgccggtggccagcgtgctggtgacggcctgctccatcgccaagacggacatctgggagacgaccaagaccaacctgcccttcatcggcgttttgctggtgatggtgttgctggtgacctacgtgccggccgttcccatgaccctcgttgaaatcttttaccgataggacctgacatgaaacccaagatcgccttggtgcagggagacgccacgggtatcggcccggaactgatggccaagctgctggcccggccggaagtgcgcgaagccgccgatatcctggtgctctcggatgtcggggtctttgctgtcggctgtgccgtggccggcgaagacatcgtcttccgccggatcacggcgacggaggaggcggattggaccgaaggcgagatcaatctgctcgatctgccgagtgaggctctgcaggatgtgacgccgggggcggtctcaaccatcgccggacaagcggtgctgaagggtttcgggcttgcgctcgatctttgcaaggcgggcacggcggatggcctctgcttcatgcccttcaacaaagaggcgatgcacctggccggcctgggcgaggaggacgaaacccagtgggcccgcacgcgcatcggtcatcgcggccgggtcagcgagttcaacgtcatcgacgggatgtggaatgcccgggtgacatcgcatgtacctttgaacgaggtctccgggcgcctgtccgaggaggagatcgtcgcctcggtgaagctggccgaccagaccttgaaggcagccggttttgcccgcccgaagatcgccgtggccgcgctcaacccccacgccggcgacggcggcaagatcgggcgcgaggagatcgagatcatcgccccggcggtggagcgggcaagggcgctgcagatttcctgcgacgggccgttcccctccgacacgctctacatcaaagtgcgcgacggcgattacgactgcgcggtcagcatgtatcacgaccaggggcagatcgcgatcaagctgctcggctttcacatgggcgtgtcggtgctgagcggcctgccgtttcccatgaccacaccggcgcatggcaccgcctttgacatcgtcgggcagaacaaggccaacgtcgagccggcgcgccgcgccttcatgatgtgcgccgagatggccgccaaccgccgcgaagacgcggcctgagagtagatgccccgatgaagatcaccaaggtccgcacccgcgtgctgcagtggaacggcaagaccgtgccgccgcaggccaacttctgcaccaatgcctcggacgcgctctacgagcgcggcgatgccatgggctccttccgctttcacgagtggctggtctgcgaaatcgaaaccgatgacggcctggtcggcatcggcaatgccgccctggcgccgcagctggccaagcaggccatcgatctctacctggcgccgctggtgatcggcgaagaccctttcgactacgcctatctctgggagaagatgtaccgccgcaccctggcctggggccgcaagggtgtcggcatgacggcgatttccgccgtcgacatcgcgctctgggacctgatgggcaaggcgaccggcaagccggtgttcaagctgctcggcggacgcaccaaggagcggatcccggtctacgcctccaagctctattccgacaggatcgaggtgatgcaggccgaagctcagagctatgtcgaccagggcttttcgatgatgaagatgcgcttcggctgggggcccaaggacggcccggcaggcatgcgcgaaaacatcaaacgcgtggaggccctgcgcgaggtgatcggctacgactgcgacctcatgctggaatgctacatgggctggagcctggaatacgccaagcgcatgatcccgcgcctcgcgccctacgatccgcgttggctggaggagccggtgatcgccgacgacatgcacggctatgccgagctgaacgccatgggcatcccgatctccggcggcgagcacgagtacacgctgttcggatttcgccagttgctcgacctcggcgcggtcagcgtgatccagtacgacaccaaccgggtcggcggcatcaccgcggcacagaagatcaacgccctggccgaggcctatcaggtgccggtcgttccccacgccgggcagatgcacaactatcacctgaccatggccaacgtgaactgcccgatctcggaatttttcccggtccatgacgtcgagatcggcaacgagctgttctactatgtcttccgcggcgatccggagccggagaacggtttcatcgaccttgccgacgacaaacccggtctgggcctggagatcgccgaggactcgctcggcgactttacggtaatcgaataagggaagcggtcatgcggttggttcagtttatctcccggcagggtcagcgcgcggttgcgattgccgacgacgcgggcgtgcagctgaggctgctcgacggcgtcgggcgagtctacgatctggcgcagaaggcagccgaaagtggcgagggcctggcggcgctggcggaaagtttagccggcgacgcgcgcgaggactacgaggccgtggtggcggagcgccgcctgctgtcgcctgtcgatcatccggacgatgcccactgcctgatcaccggcaccggcctgacccacctcggcagcgccgatgcccgcgattccatgcacaagaaggtcgcggcaggcggcgaggcggcgctctccgattccatgaagatgttcaagtggggcatcgacggcggcaagccgtcaggcggcggcatcggggtgccgccggaatggttcttcaagggcgacggcggcatcgtcgcagcgccggagcaacccttggcaatggtcgacttcgccgaggatggcggcgacgaggtggaactggtcgggctctatctgatcgaccccaaggggcagccgcgccgcctcggcttcgccctgggcaacgagttctccgaccacgtgatcgaacagcagaattatctctatcttgcgcactcgaagctcaggccctgttccttcgggccggaattgctgctcggcgccgcgccggacgacatccggggcacggcccgggtcaggcgcggcggcgaagtgatctgggagaagcccttcggcaccggcgaggccaacatgagccacagcatcgccaacctggaacaccaccacttcaagtacccgcagcaccgccgccccggcgacgtccatgtacattacttcggcgccgcgaccctcagcttcagcgacggcatccgcgcagaggcgggtgacattttcgaaatcgagtcaccgcctttcggccgccccctgcgcaaccccttggctcttacggacagcggttcggctgcggtggtgccgctctaaaggcccatctggcccttcggcagtttcacgtcgaaggcggcgcggacggcggcgtcgatgtcttcgggcacatggcgcgggaagacctctttgaggatgcgttgtttttgctcgatcgcgcgggccagcagctcggggcggccgttggcctcccactccttgggggtggagcggtcgccgagttcgggatagacgtactcgctctgcatcaggcccagggtctggctgtggcccaggtagtgtcccgggccttccaggcagacctggcgcatggtctcgaccgagaccgtgtcctcggtcacctcgatgccgcgcacgcagcgcaggcactggccgatcatgtcgttgtcgatgatcaggctctcgaaacagaaccccaggagagagccgtgcatgccgacggattcatagaccatgttgagcccggcgaggcccgccatgacgtcggtgatgcccttttcgtaacccgactgcgcatcgggcagcttggcatcggccatgccggcggcggaccccccgggcaggtcgtagaactgcgccatctgggcgcaggccgcggtcagcaatccctgttcgccggagcccccgcacatggcgccggtgcgcaggtccgagacgaagggccaggtgccgaagatcgccggatggccgggcgcgatggcattcacgtagaccaggccggccaggcattcggccaccgcctgcgtcaccgccccggcgatggcggcgggcgcggtcgccccggcctgcccggcggagagcagcagcaccggcatgccgccgcggatgcagacctccatcacttcgcaggattcggtggcgaacttcagcggcggcaccacgaagcagttggtattggagacgaagggccgctcgcgccaggcgtcttccccgccggcgaagagatgcagcatctccagggccttttcggcgcgctcgaccgaggtgaaggaggtgccgatgtgtttcgtcgtgccctgtacgcaggcgtagacggtgttcaggtccaggtcggtggggtcgggcaggtcgcgcgccaccattggccgctggaaaaagtggatgttgtccaggccaccggcgatccttgcggcgtcgtagatgtcctgcaacgtcgattcacggtactcgcgtcgttcaacgtcgaccagatgcacggcggcgccggcggtgccgtagtagacccgcttgccgccgggctggatatcctgtttggggtcctgggcgcagagggtgacgctgcggttggccatggccagggtgtcctcgaccagggcggcgggaaagcgcagccgcccgtcgtcgcccaggctggcgccggccagggtcatgacctcgatgccggagggcggggcgtcggccaggccgatttccgccagaatctgcagcgccgccttgtggatgcgctgcatcgcggcgtcgtccagcggtttgaagcggccgccctccatgccgccgcggatcggctggatgtcgtcggccaggggggcggcgcgcagggctatgcgcgcctcgcggccaccggcgcggcggctgcgccgcgggctctggggcgtctcgcctgctgatccggtcatggccgtcacttcctctcgggttggtttcctctgcgcagcggccgttctggcgacggcttgtcccgaaacgcggatctgaaattttaggcagaattttcaccggaacggaaggcttgaacgcgccgaaggttgtcgtttttggacttattgcctgtctgtggcggtggcgcgttccactttgccggggcggcggctcagccgccgtctttctgtggcggcgccggaacagagtcgcaggccaccgcaagaccgccgtcgcaggcctgccggatcaactgattggcccgtgtctggtcccgctcgatgccctcgccgagctggtacttggcgccgagatcgtagcagcccgccgcggagccgccctcgcaggcccgccgatagtagtcgacggcctgctcgagatcctcgtcgacgtcatagccgtggtcgtagcgcgcaccgaggcgatagcaggcctgcatgtcgccggcctcgcagtcctgctgaagctgcgagatagcgtcttcgggcgcgtcctcgggttccgggccaccggcggtggcggcctgcggaccgacaagggcgaagacggcggcggcgaacaggaccttcatgcagatctttgtcatggatttcttccgatcagtcgcgggtttgcggacccatggctgggtcggatgccggcgcgaaagggttcatcagcggcccgggccgccggcagtctactgaaacgcggtttcggtgaaggagcgcagtttgcgcgaatgcagccgctccggcgccatggcgcgcagcttttccatggcccggaggccgatctgcaggtgctggtcgacctggcgcttgtaaaaggccgtcgccatgcccggcagtttcagttcgccgtgcagcggtttgtcggaaacgcagagcagggtgccgtagggcacccggaagcgaaacccgttggcggcgatggtggcgctttccatgtccaaggcgatggcgcgggactgggagaagcgctgcaccggctcgcggtggtcgcgcagttcccagttgcggttgtcgatggtggcgaccgtaccggtgcgcatgatggatttcagttcgtagccttccagcccggtaatctcctcgaccgcttcttccagggcgacctggacctcggccagcggcgggatcggcacccagctcggcaggtcggcatccagcacgtggtcttcgcgtacatagccgtgggccagaacatagtcgcccagcgcctgggtgttgcgcaggcccgcgcagtgacccagcatcagccaggcatggggccgcagcacggcgatgtggtcggtgatggtcttggcgttggaggggccgacgccgatgttcaccatggtgatgccgctgttgttgccggtcttcaggtgataggcgggcatctggggcaggcgctccggcggcgtgccggcatcgggtgcggcggcgccgcgcggcgtgatgacgttgccgggctcgacgaaagccacgtagtcgccgtcgcccctggccatggcctcgcggcccaggctgcagaaggcatcgacgtagaactgatagttggtgaagatgacgaagttctggaagtgcgccggcgccgttgcggtgtagtgcgccaggcggtgcagggagtagtcgacccgcggtgccgtaaagggcgccagcggcatggggctgccgggcgccggttcgaaggtgccgttgacgatggcatcgtcggtgaccgagaggtcgggcacgtcgaagaggtcgcgcaggggatggcccagccggtcgaccagcgcgccttccacatgcatgccgtcgggaaaggcgaagtgcagcgggatcggcgtatgggaaggcccgatggtgaccggcacgccgtggttcttcatcagcaggccgagctgctgcgtcaggtattcgcggaacagatccggccgcgtgatggtggccgcgaaatggcccggtgtcggcagatgaccgtaagagaggcgcgagtcgatatgggcgaagctggaggtggtgatggccgcctgcgggtaaaaggcgcgcagccgcttgcttggcttggccccgcccagcagcgcctcgaactgggtacagaggaagctggtggcctcgtcatagagcatggacagccgctcgaaggcggcttcgggttcggtgaagctctccggggcggcaggcgccggagtctggatgctgtgcaattcggtcatgatggggggagaacctaagccaaggcgcagccggggtccatggagatttccgtctccagccgtgcccgcttcgtttcccccgccggaacctttcacaaacaggctttggcggcttcccccgcgaggcgttccaggtcgcgcagcgcgggccgcaggatggtgtcgtcgctgtccatcatggccgcgcagaggtcgtcgcagtgaaaggcgacgcgcagcttgatcaggagcccgcccatcccggcgggccgcgcccgcgccagggcctcggcgcagcgcagttcgtgggcgcagagcgcttcgtagcgcgcgctgtactgcggttcctcataggcgaaggggccgtcccgcccctcggccagggcgatccagccggtcagggcggtggcggcgcggcggtagtccgcggccagccgcgcgacttcgcggtcgccgccgtccgccagcgtgcgggccggatgtgtggcgggggaaagcgcggtggcgggaagggcggccagcatggtgcggcgcgaaaaggatgtgctaaagctaaaagcagccatgaccggactcctctgaagtcgggttgtggtcaggcgcggggcgggtgttcgcgcaccccctcgtgccgtttggggagcagctaagttgctctatagcggctcgtaaactaccttagcgtttcatgatcggcctatcaatcacaaatttagacctttgtgtccccttaggggaattttttccgctatgagcctcaagacgcgggcccaattgcgcgccgcccgggcactgctcgactggacgcagcaagatctagccgaccgttctggcatctcgtcgcggagcatcaagcgcctggaaaccggtgagggcctgctggccatccgcctggacaccctggaaaaactccaggcggccctggagtccgccggcgtcctcttcatccccgccaacggcggtggccccggcgtccgcacaagggagtagggggcggtgcgccccagggcccgccgcgtcacacagccaaaaatgaaagggcaggccggagcctgcccttcgattttgtgcaatccaatcgccgaagcgaaaggcttgttaacgaccggatcgcgattctctcagtgctacccctgaacgttgacacgcatcgggccagcctgcaacatctgattgaataagaagaaagagtttttcagggaatgcgatagatggattaccgcctgggcctcgatcttggcaccaactctatcggttggtgcgtcgtcgatctggacggcaagggtcgcccggtggatatccgtgattccggggttcggattttctccgacggccgcaatccgaaagataaaacctctctggcagtggcccggcgtatggcccgttccatgcggcgccggcgggaccgttatctgcgccgccagaagaaactgttgagcgcgcttgccgcagcggggctgatgccggacgatccggtggcccgcaaggcgctgaccggtctggacccttacgcgatacgcgccggggccttggacgcggcggttccgttgcatcatctgggccgcgccttgtttcatctgaaccagcgccggggcttcaagtccaaccgccggaccgacggcgccgaggatgacgaacgcggcaagatcaggcagggcgtcaacaagctgcgcgatgccatgacggcgcagggcgcgcgcacgctgggcgaattcctgcaccggctgcaacagggcggcggcagcgtccgggtccgcctcaagcctgaatccaccgacagcggcaagacggtcatggcttacgaactctatcccgaccgggcgatggttctggaggagttcgaggcgctgtgggatgcccaggcgccgcaccatccggccatcctgaccgcgcaggcgcgcgagaaactgcgggacatcattttctttcagcgccggctaaaacccgtacgccccggcaagtgcaccttcaatcccgaggaggagcgcctgccccgggcgcatcccctgttccagcgccgccggattttccaggacgccaataccctggcggtcatcggcctggaccagacgtcgcgcggcctgacccaggacgaacgggacaaggtcgcgctggccctgctgaccaccgcgaagcggaccttcggccagatccgccgtcttttgaaactgccgccggacagccggttcaatctggaatcggaaacccgcaaggacctgaaaggcgacgagacggcggcggcgctcgccaaggacgaccgcttcggttccggctggcgggcgctgcctctcgaaacccaggccgccgtcgtggaacacctgctggaggaggaagaggaggaaccccttcttgcctggttgaccgccgaacagggcctctccgccgaacgggcggaaagcgtggtgcgcgcggccttgccggatggtcacggtgaactcggcctgacggcgacccggaagatcctgaccgaactggagcgcggcgttgtgccctacagcaaggctgcggaactggccggataccaccactccgactttcgcgacggcgtgatccacgatgccctgccttattacgggcgtgtcctggaacgccatgtggccttcggttccagcgatcccggcgacagcgaggaggtccgttgcggaaggatcgccaacccgacggttcatatcgcgctcaatcagctccgccgtctgataaacgctgttatcgcacggcatggccacccggcggaaatcatcgtcgagcttgcccgcgaactgaaactgagcaggcgccagctcgacgaggtcgagaaaggcatcaaggacaacaccgcgcgcgccgagcgccaccgcgaaatcctggccggcctgaacctgcccgaccggggcgaaagccggatgcggctgcgtctttgggaggaactgaatttcgacgatccgcttgaccggcgctgtccttatacgggtgagccgatctcgccgcagcggttgttttccgccgaggtggagatcgaccacatcctgccgttctcccgcaccctggacaattcggcggccaacaagacggtcggcctgcgccgcgccaacagggaaaagcgcaaccgcacgccctttgaggccttcgggcaccagcccggctgggacgagaacctggagcggctcgcggcgctgccgcgcaacaagcgctggcgcttcgggccggacgcgatggagcgtttcgagacgcaggaacgcgacttcctggaccgtcaactgaccgatacccaatacctctcgcggatcgcgcgggaatacatgacggcggtctgcgacccccgcaaggtctgggccacgccgggccgtctgacggaactgctgcggcgcagttggggcctcaacgacctgctgcccgatcacaacatcgtcgagcggcaggaccggaagaaccgcctggatcaccggcaccatgcggtcgatgcggccgtcgtcggggtgaccgaccgcgccctgctgaacgcggtttcgcgcgcggcggcgcgggcggaggaacaggacctgacccgtctggtcgatggcatgccgctgcctttcgaggggttccgcgaccgcctgcgcgcgacgctggagcgcatgacggtgtcgcaccggcccgaccgcggcaccccggcggtgcccggcagcgccaatccgcgcggcagttccgccgggcgcctgcacaacgatacggcctatggcctggccggggcgccggacgcgcggggcgcgcggcttgtcgttcaccgcgtgcccctggacagcctcaaggaccgggcggctgtggaacgggtccgcgatgccggcctgcgccaggccctgctggacgcgaccgagggcttgtccggcaaggacttcgccgccgccctggcggcctttgcggcgcgcgacggcatctacaaggggctgcgccgtgtgcgcgtgctggaacggctgaaggtcattcccgtctgcgacaaggccggccggccctacaaggcctacaagggcgacgccaactatcgcttcgatgtatgggagctgcaggacggacgatggaaaggcgaggccgtttccatgttccaggcgcatcagccggactggcgctcgacagtgaaagacgagtccccgacggcccgcaaggttctacggctgcacaagggcgacctgctggcgacggagacgggcaaggatcgcgtgatccgccgggtggtgaagttttcggccaacggctccatccagttggcggcccacaacgaggcgggaaacctcaaggcccgcgacgtcaagccgccggcggaggactatttcaaatatattaacacttccgcgtcagggttgaagaagttgcgggcgcggcaagtgcgcgtggacgcgaccgggcgcctgttcgaccccggtccgcgcggctgaagccgatgcccgccaagcgcgggtgccatggatcgaattgtcgatattgctactgatggccgtcacctatcggcctatcgcggctttctgaaggtggaggagggtggccgggaagtcggccgcatccccttggacgatatcgcggctgtggtgatccatgcccacggcattacttattccaacagtcttctggtggcattggcggaaaagaactgctgcctcgttgtctgcggccgcaatcacgcacctgtatcggttgcttggcccttgaatgggcaccaccggcagggcgcgcgcatgcgtgcacagtggcttgctggcaaaccgctgcagaaacaactctggcagcgtatcgtagtcgccaaaatcgaaaatcaggcggcgatacttgaagctgttggcggccgttccggtggcgttgccgccttggcggccaaggtccggtccggcgatccagagaacgttgaggcccaggcggcgcgacgatattggcccttgcttctcggggttgatttccggcgtgaccggacgggcggggcgccgaacgcgatgttgaattacggctacacggttatacgggcggttacggcccgtgcggttgttgctgccgggctgcatccgactattggcctgcaccaccgcaatcggggcaatgacatggccctggccgacgatctgatggagcctttccggccttttgtcgatgtctgtgtcaagcgccttgtcgagcagggggcttcgcaggttactcccgaagtaaaacaggccctggtttcactgacggcctttgatgttccgaccaaggacggggtgagcccgcttgcagtctgcatccagcggctcgcgaccgccgttggacaatcctttgaggaaggcaaggcctcgctcgaatttccactgccgcccaagtcgctcgatctcggctctttggtgaccggctggcaggtcaagtgacggcccgaacgcttgatggtggatatttgagtggataccgccttatgtggataatggtcatgttcgatctgccggtcgataccaaggaacggggcaaggctgcggctaaattccgcgagttcctcttggatcaggggttcgagatgagccagttctcgatttatctgcgattttgcagcggcagggagcagttcgaagccttctcgcgccggattgagcggaatctgcctgagttcggcaaggttcacatccttgccttcaccgacaagcagtacgagaatatcgttcgattcaacggaagaacccgggcagccacgcggaaaaaccctggtcagctagcccttttctaagtgtagtggagcatttcggcatgaacgataaccgctcaattcccatgaatttcaagggattgagcggttatctagtgtagcactcagagaatcgcgatccagccgcaacgacgcagcgtcacaccagtctcaatcccgtagtgtagcactcagagaatcgcgatccagccgcaacctgttcgccttgtgccgatgcttcgccaaaagtgtagcactcagagaatcgcgatccagccgcaacggcgctttcatggggccatgaagaacaaggagtgtagcactcagagaatcgcgatccagccgcaactgtatgccctcccgcatagcacccaccagaaagtgtagcactcagagaatcgcgatccagccgcaacttgatacgtcaaggcctttcggattccagaaagtgtagcactcagagaatcgcgatccagccgcaacctgcccgtcgcgtaagtgatgtagccaatcagtgtagcactcagagaatcgcgatccagccgcaacccctttgcggtgcggccggcatcgatatggagtgtagcactcagagaatcgcgatccagccgcaacgggcgaaaacccttcgccaggatcagccggagtgtagcactcagagaatcgcgatccagccgcaactctgacggttcaccgtcgggggtgcgaggcagtgtagcactcagagaatcgcgatccagccgcaacttaccggatggtccagatgcgttgcgagagtgtagcactcagagaatcgcgatccagccgcaacacggaagcgttgcttccgctgacggcgtcaagtgtagcactcagagaatcgcgatccagccgcaacgcaaggcctccaagtgcgcgccggtagcctagtgtagcactcagagaatcgcgatccagccgcaacgaacttgatcgggtccgcagactgcgttgaagtgtagcactcagagaatcgcgatccagccgcaaccagtatacccggcaggttacgggcgatatcagtgtagcactcagagaatcgcgatccagccgcaactcaacttcactgctggctattccacagaagagtgtagcactcagagaatcgcgatccagccgcaacgtgttgctcttatgccagttgaaccgcggcagtgtagcactcagagaatcgcgatccagccgcaacctgcaccgctcgcaccgtcggcgccggccagtgtagcactcagagaatcgcgatccagccgcaaccggtcatcgggtcggtgaagccgaggatcgagtgtagcactcagagaatcgcgatccagccgcaacatggtctcttcgcgggtgttccccggcaaagtgtagcactcagagaatcgcgatccagccgcaaccaaagatgtcttggcgacccttattccggtagtgtagcactcagagaatcgcgatccagccgcaactttgtcatctttggcttccaaacgccagccagtgtagcactcagagaatcgcgatccagccgcaacttgccgggcggccgcctcggcttgcgacaagtgtagcactcagagaatcgcgatccagccgcattgtgcctccatgttgccgcgccgccgccccgcatgccaagctggcgatcatgcccgagctgcctgacatcatggtttacatcgaggcgctggaaagccgggtgctgtatcagcggctggagaaggtgcgtctcgccagtcccttcctgctgcgcaccgccgtgccgccgatcaagtcggcggagggacgcaaggtggtgtcgctcaggcgcctgggcaagcgcatcgtcttcgggctggaaggcgatctctggctggtgctgcacctgatgatcgccgggcgcctgcagtggaagccgccgggcgcggcgttgcagggcaaggtggggcttgccgcctttgacttcgcccacagtgacggatctggcggcagcctgaccctgaccgaggccggctccaagaagcgcgcctccctgcacctgctggaaggcgcggaggccctggcgacgctggaccccggcgggctggaagtgctggaggccgatctggcggccttcaccacggcgctgacggcgcggaaccataccgtcaagcgggcgctgaccgatccgcgcatcttcagcgggatcggcaatgcctattccgacgagatcctgcaccgcgccggcctgtcgccggtggtcatgacatcgaagttgggcgcggcggacatcgaacgcctgcacgcggcggtctgtgcgaccctggatgactggacccggcgcctgcgcgacgaggcgggggcggacttccccaaaaaggtaaccgcctttcgcaaggagatggcggtgcacggacgttacggccagccctgcccggtctgcggcaccaaggtgcagcgcatccgccatgccagcaacgagaccaactactgcccgcgctgccagaccggcggcaagctgctggccgaccgctcgctctcggcgctgctgaaaaaggactggccgcgcagcatcgaggaactggaacagccgcgcggtaagggttaaatcccagtcccggaaaccttggcgtcccgtttccaacgcccgccaactgaaaatgtcttctttgtgaaaccgctgtgggtggtgtgacccagaaaggacgggagaggtgccgggcgggagtatgaacatgttgagcgtcaaccccgggctagctctcgcacgagttcgtctgactccggacgtgacggctgatgtcggaaccgaatggcaacaacctgtcgtgctatcccaacgccatcaagtgggcgcgatacgagaccggcatcgtttgggatcgccgtagcaggcagcaccaccgcaccagcaccgcgccgtgcgagttcaagcagccagtccacacggttcgaacgataggccgcgtagagcgcgtgtccccgctcagcgcaggtcccgtgcagcacatcgcgcatttcgcagtttggcctgtccagcaagtcggtgccggcaagaagttccagcgggacagtcgctcgaacgctgagagggtgatcagccgctacgactacccgataattctcgttgtagagtggatcgatccggtaaagatcggcgctcacctctgcagacatgattgcaatatcgaagcgcccttcccgtaaccctgcgagcagagcctgctgatcgtctatgatcagctcgatatccgcctgcggtaagcgttcgcgatagcgcgaaatgattgctgtaatcttcccctgcccaatcgtctctccaatccctacgctgatcgggacgcgatccaatcgaatatgccggatggcctccgctttcgcttcgcgcgcttcttcgtgcacctttgccagacgtggacgcacaagattgcccagaggcgtcagtcggcaacctgcgcggtcccgaagaaagagtggaccgccaagttcatcttccagctttttgatcgccgtcgtaagcgacggctgtgagacgttcgacgcccgcgccgcgtgagtgaaattgcgatgctcacagacggcgaggaagtatcgaatctggttcatctccattcaaatacctttgctgcgtgaaagtccggacacctgtgatgcggccccgatacatctaatagcatagtctatgtctatcgtaatatagagtttcggaattggtgaagtcttcatttttcaagaaatatgggcctgcgcaatctcgtgcgaaaaggaagaagctatgaaaacttcactctctgtcatcgcggccggtctcgtcactatcgctgctgccggtaccactgccgttgcccccgcccatgcgcaggaaaactgcctgccggtttccggcggcatcaatgtcaccatcgtcgactcagaaccgctgcgcgtgcttggtccggtgacgggcacactctcaggtgccacgcaagcgactgttctgtcccaggagcaacagggcgacgggaccatcaagcttgacgtcacacacgacttcgtaacagacgatcgatcctctctcaccacaaaagacgtcgtcatctggacacctgtgccagggcacgagggcgtgtttcggatgcagacaacctataccgttgtctcggggacgggccgcttcgccgaagcacatggctctttccaaaaccacggtgaggtcgtcgcgggcgagggcctggtcacgctgtcatatggcggcgaaatctgcggcgttaactgacgaggcggtgagggcgggatcgactcgataacgatctcgcccagcctcacttctctcgctcgctatcagatattcaaaagagaacgctcccctgcgaaaaaacgaatgcagccatcggtgcgcgcagaggcgccgtcaaaacgtgaaagagtctaggcttcgccccgggcggcgatctcttcgaccaggctgcggatctgatccggcatgaagggtttctcgatgcagggccggccggtctttttcaggaagcggccggtgcgttcgttcagcaggtcgccggtgatgaagacgaagcggtcgagcaggtggggcttggtttcgctgaccgcgccatagaggcccggtccgtccagatgcggcatgcgcaggtcgcagatgatggcggcatagtcctggccggccaggttggtcagcgccccctggccgctggatgccacatcgacgctgtgacccgccgcttccagaacctcgaccaggaaactggtgatgtcgggttcgtcgtcgaccaccaggatctggcgctcctggctgtggagccgaggcgcggccacctccggctcctctgtctggatcatgccgccggcgggcagcagcacggtaaaggccgcgccgccgctggccgcgttctcaaccgaaatactgccgccgtgggcggtgaccatgccgtggcagaccgaaagcccgacgccggtaccgtggcccaccggtttggtggtgaagaaaggatcgaaaatgcgggagcggatttcctcggggatgccgggaccgctgtcgcgcaccagaatccggatctgccggctggcggccagataggaggtggtgatgacgaggcggtgtggcagcggcgtgttgagcatcgcctgctgcgcgttgatgaagaggttgaccaggatgtggctcaactggtccgagtcgccggcgaccaacggcaggtcgggggccagatcgcaggtgatcgtcacatccgtggtgttcaactgataggtcaccaggtccaggacgtcggcgatcaagtcgttgatctggatcgccgagcgcgccgccggccgctggcgcgccatggacaggaaggtcttcacgatcttggcgcagcggtcggcggcgttgcgcaccttcatggcccgctcggccagggcgctgtcgggggccatgctttccaacagggccgcctggccgatgaccacggagagcggattgttcaactcatgggaaacgccggccagcaggccgcccagggcggtcagcttttcattctgatagattttctcacgctggcgctgcagctcgcgttcggtatgaacccggtcggtgatgttgttgtaggtcgacacgatgcagccgtcgggcaggcgctgctggcgtatttcgatcacccggccgtccgccagggtgcgttggtccacgctgcgggtgacccgcgcgataacggccagccgttgctcgacgaaggcgtcttcgccaccggccgcttccacctcggcacggggatagtgctcgttgcgcagaccctggcgcacgaactcggaaacatgaacgccggggcggccgagttccccgggaatactgaagatgtcgaggaagccctgattgaccagcaggaccctcatgtcgggtgcggtcacggtaacgccctgggcaatgttggcgagaatgcccttcagctgggccgagcgctcggcaagcgcctgctccagccggctttcctggtcgcgcagggcaaactcggcgcgcttgcgctctgtgatgtcgctgcgcacgctgacgaaaccgccggagcgggtgtgctgttccttcaccgtgtcccagcgcccgtcgggccaggcatcctcgctgacgcaggcttcgttgctcagccggtcggcgatgaagtcggcaatgaattgctcccggtcgcgccagacgcgcgggtcggtcacgacgttgttggcgacactggcctccaccagttcctgcatcggtttgccggcgatggcctgctgggtcggcagaaaggggaacagctcgtgaaagcgtcggttggtcagcaccaccttcaggtcggaatcatagagaacgaagctatccgacagattgtcgaccgcttcgcgcagcatcagttccgagcggcgcatctgcacctgttcggtcacgtcgctcaaggaaaccagaaccgccgcctcaccgcgccagaggatgcgcttttccgcggcttcgacccagaagggctcgcccttggcggtcaggcagcgcagcaccctggccgggccggctgcgccctccgccaggatgcgccgctgtcgccgcagggcgcggttgtgcaactcgacgggcaggaagggcagcagtgtcggttccgccagcaggcccgcgctgccgtcaaagccgatccgccgggcacaggcttcgttggcatagagcggtttgaaatcgcggtggacaaggacgccattggggaagccttcgaccaaggccctgaagtcggcctcttctccggtatccggttcttttatgcccagccccttggtacccggtcgaccggggctcgtcttacgacgacgcttcccgggtttttccgaggcggtgtcttgaggcgctgcttgatggatcaccagccaatgttgctgctgccctttccggtcgaacagcgggcggatgtcgatgcgctcgctgttgcagtccgacaggcgcttgcctttcacatccgccttggcccagccgctggccaggacaaaggcctggttggcgcccagcagggtcggctcggccgtatcgtcagcagcggtggcgatggcgacggccccctgaagcgcctccaggatggcgtcaaggttccgcgcaaagcggttgtttgggcgcagagggttggacatcacggcaacttgcttgaaccagtcgatagagtgaccccgcccggacggcgggcgcaagcccggatcctgcgccgtccgcaggccgatttcgcggctgtcttcggctggcatgaccctgctatgggattgtttcaatcgcatgtggcggcggcgggaaattggtttcgattgttcacactgctgacctacgtaaaaaaccggcttcgggttgcggcgtcatgcttaggtgctgaaaagcattgctttttcaagacggtcgaggtgtcgtcggctctttcggcggcgcggtttaggctgtcgcagacttgtaataaatctgtcatagttaaggcatcatgctgttgtagggtctcgcaacccgccagccaaaaacagccgcgaaagcggtgtccacccgcattaggagaggcacctgaaatgcagaaaaacgacgaatttgcttcgaagggagcagccttcgaagcttccgaggacgtccccaccaataccaatctggccaataccttcggcaagatcgcagagcggcgctacggccgccgcgacgtgatgcgcggggccctcgggctggccgcgaccacggcgctgagcggtacgctggggaccctgggtgggatcaagacggcagaagccgccgacggccgctatgtctggaccgaaatcgagcatggtgtcgacgagacccatcatgtcgcgccgggccatacggcggacattctgattcgctggggcgatccgattttcgcggattccccggaattcgatccgatgaagcagaccgccgcggcccaggccaggcagttcggctacaacaacgattttctcggctatgtcggcctgcccttcggctcggacaacccggacaacggcctgctctgcgtgaaccacgaatacaccagtgaggaggtcatgttccccggcatcgggcgccaggacaacaagggcttcccggacatgaccgcagagctggtcgacatcgagatggcggcccacggcggctcggtcatcgaagtgaagcgtgaaggcgaaaagtggtcggtcgtgaaggacagccagtacaaccgccgcatcaccgccaataccacctatatggagctgacaggccctgcggccggccacgatcggctgaagacctcggtcgatcaaaacgggaccacttgtatcggtaccttcaacaactgcgccggcgggatcacgccctggggcacctatctgatggcggaagagaacttccacggctacttcggcggtgccgtcgatggccatccggaagaacgcaactacaagcgttatggcgtgcccggcggctggtacgcctggtcgaaataccacaagcgtttcgacatcaatgccgagccgaatgaggccaaccgcttcggctgggtggtcgaagtggacgccatggacccgacctccacgcccaagaagcgcaccgccatgggccgcttcaagcacgagggcgcagagccgatcgtgaacggcgacggccgggtggtggtctacatgggcgacgaccagcgcttcgactacgtctacaagttcgtctccgagcgccgctacaatccggacgaccgcgcagcgaacatggatatcctcgatgacggcacgcttttcgtcgcgcgcttcaacgaggacggcaagctcgactggttgccgctgatctacggcagcggccc

SEQ ID NO: 421 - DNA, 23126 bp, synthetic construct
  misc_feature 1..23126: note = Synthetic
  source 1..23126: mol_type = other DNA
gcggtgccgacatgccggtggtggtcagcatgctcaacagctattccggctgggccgcggcaggaatcgggtttacacttggcaacaatgcgctgatcgttaccggggcgctggtcggatcctccggcgcaatcctgagctacatcatgtgtaaaggcatgaaccgggcgtttctcagcgtaatcctgggcggttttggcggcgaaagcggccccgccgggaccggcggcagcgaagagcgcccggtcaagcagggcagcgccgaagatgccgccttcattctgaaaaatgccggctccgtcattatcgtgccgggatacggcatggccgtagccaaggcgcagcatgcgctgaaggaaatggctgatattctgaaggaagaaggggttaaggtctcctacgccatccatccggtcgccgggcgcatgccaggacatatgaacgtgctgctggccgaggcggatgtcccttatgacgaagtatttgagctagaagatatcaacagccagttcagtcagaccgacgtggcctttgtcatcggcgccaacgacgtgaccaacccggccgccaagaccgatccgtccagccccattttcggcatgccggtgctggatgtggaaagtgccggaacggtcctgttcgtcaaacgctctctcggctccggttatgcgggcgtggaaaacgagctgtttttccgggacaataccatgatgctttttgccgacgccaaaaaaatggtcgaggatatcgtcaaggccatgtagtcaaggccctgtaaaggcattcaagacttcatacaaaaacatcccttccggttttcgggagggatgttttcgtttgcgaaactgacttgccgcgtgccccgggaaaatatggtgctcataacaacgcgccactcattgctcataacaaaaagggaggccaataacaaaaagggagatgtcaacgcatatcccgatgtccttttataatgtttttaggttatgaggctttctcaggaaaattggactcatgttcgcgacgccaacccgaagcaaaggcaaacatgtgtctgacaacaaaaaaatacaaggttatcgtgaccagcagatcaagcagcatcatggaccagccccaggaaacctccgtattgccgaggcgaaagatcacctgtccccactggatttcaaaaatcgcaaacggcaccgccacagacccgacggacggggccagcagcagcgcacagcccgccccaatgagaatgcggctgaccgtgcgtcggcgaaaaagcaaaacaaccagcgtggcaatgattagcggaacgaagaacaaccacagccctgtgagcgcgccgcttcccagcgccagcagaaagacaaacaggcttacccccatccacaaggccagaagtatcgccagcggggcataggacacccccacatggtagagatgatgccgccactgccccgaaggcacatccgtctccggctctcgtctgattttcgaggcttcttccgtttgcgtcgtcgcctttatggcaccctcccctgatgccccctagaggggaaagataaaattacatgccgaaaaaaattatatctcaagccggcttcccgttccggtcagcgttccgccaccgccgttgcggaggtttcggcttctgttcccgtttcgcgcgccatacgccgggccttttccagtcccggcatggacaattcgcgaaaactgttcttcttttcatcaatggacgcaataatgcgcccgttctgcacctgggtgaccgcccaatccagaagggtcagcgcctcatcaaacaaatccttgttggaagtggcgtcaattgccgctttcagttcctcaagccgcttcacccccgccggcgtcatgtcaatctgatatcgcttcattggcaaaacacctcatatccaatcatcgaacagcactcgtcgtatctcccgtcccaatctgtagcccgccttttgccgtcttgcgttttgtgcgcggggagctcttccaaaaagaattcgcagaatttctttagttacagaatcggatggaccctccgccgacacttcctcaggctctcgcgtcatcccgtccaaaggccggtccgggccttcaaactccctccaccccccaaaagggttgggctgttcctcgtccgcgtcgggcattcctgttttcctttatgccacccacacgcaattgtgacagaagcgcctaacgaacacaatatataagagaacccctaaaaagtcaatattttatgagtataatattagtattatacgattataacatgatttatatatactcaatacatcatgtatactctttagtttctttgagtttttgactttttgacaaaaaaacggatagtagggatctcatcctgatcccgcaccaacaacaggttctgttacggtcatgtcgccgcttgctcccccaaaacgcgcctatggcgttgccctgactttgatgctcggctatgccctcttttatgctctactgtgggtttctgttcggcagttgtcaatggatctgcacccctttgtgctggttttttatcgcaccttgtttgggttgttatttattctcccaagtctctgcaaattggatcttggcaccatccgggccgccccccgccccctctatctgctccgggcggttttaaatattacttcggtttttggcgccttctacgctgtgagtcatatcccgctcgccgacgccgtcgcctacagttacgccgctcccttgtttgcaactcttctcgccgccatattcctgggcgaggccatccgcctgccgcgcctgcttggcgtggcctgcggtttcacaggtgtgctgattctgctgcgtcccggatttcaggacatcaatgccggcatgctggcggcactggcttccgcggccgcctttgccgggacattgattaccatcaagattctcacccgccgggaccatccgggcatcgtgactctttacggatatttgttcgggctgcccatcagttttttcatcgcgctgttttactggcaatggccccgctgggatcagatacctttgctgctgtttatgggattatgttccggtctggcgcatttctgcctagccggcgccttatccaaagccgacatgacggcgttgttgcccgtggatttcacccgactgatctttgcttccctgataggatatttcttattcacagatgcgctggacggtctgacctatctgggcggcctgatcattctgggcagttccgtctatgtggtgtaccgggaaaatcgcaaaaggcatcaggccaatcaaagcaaattgtgattttgacaaaatacgggacaaacagtagggttaaattcccgcgccccgaaaccggccaccagaagccaaaccccggattgtatcccgcatgaccatcatcccgccgcaaaaaaacaatgttccgctcggcaccctatacatgctgatcagctgcctgagtttttccgtcatgggcgggctgatccgttatgtgtccgatgatgtacatccttttttaaccgctttttatcgcactgtgatcgccttgctgatcatgctgccatttttccgcacaaccgggctgagagagggcctgaaaacccgaaaacctggcatccacttgctgcggggactggcttcttcattcaccattatatgcaccttttacgctgtgaccgtgatcccgctcgcagacgtcatgtcctacagctttgcggccccgatttttgccaccataggtgccgtgctggtgcttggggaaaaaatccgcctgccacgtatttttgccattctatttgggttcatcggcatgctggtgctgctgcggccgggccagatggccatcaacagcggcaccgtcgctgcgctgctgtcagccatcaccattgccgttaccaccatttgtgtgcggtttctggcccgcaccgaaaaaccccatgtgatcactgcctatgccctgctttgtgcgctgcctgttacatttgtgtttgccttgccggtctggacctggcctggtcccgggcagctgatggtcctggttctgatcggcggcttggccagtattgcccagatctgcatgagcaaagcctttagcgaagccgaagccagcgcgctgatgccctttgatttctcccgactgattttttcggctctgatcggctatttgttttttgatgaagcaaccgatatctatacttggatcggggcctcccttattgccggcagcgccctgtatgcggcccatcgcgaacgtctgcggaacaaggcttccgccgcccccgacaaggccacagacaagacaaggccacacagcagggaaatcagcggggaagtctgcgagggaatctgcgcccgaaccccgggagaaaggctgtgaacgggatacaggaccaaaccgcacgccataatctgactggcattctttttatgatactggccggtgtcaacatggcggcaggcacaatattcatccgcaagacgggtcaatcccttggcattttcgaagttgtgttcttgcgctctgcggtcattgttctgttggccgtgctgctgtcccgacaattcagccccgcccttctgaaacctgcccggcccgggctgattgccacccgcagtttgctgatgtgtgtgattgtaatggccaatttcaccgccatcatgtatctgccactggtccaggtgaccgccatgcagtttacacgcccgctgtttctggtggtgctggccgccctgtttcttggggaagcagtgcgcttgccccgcacgctggccacgtttgccgggtttttgggtattttgatcatcctcagacccggcagcggaacccacccagccatgatgtttctgctggcggcaaccatcgcctcctccgtcaatgccatcattaccaagaagctgaccaagaccgaccgggtgggcaccatgatgatctatggcaatatggcgctggttatagtgtgcctgccctttgccctgctgaactggattacgccaaccggggaaaatctattatggcttctgggactggccgccacctcaggattcacccaatactgcattatacgggcctaccactacggggaagccacccttgtcgccccgtttgattatctgcgcatcgtatttgtcgccttggttgggtatgtggcgttcggcgaagttccggattcttacacctgggccggcacggcagtgattatcctgtccaccctgtttattgcctggcggcagagccggctttcccgcacccaattgcccccgcgcactcctcctgacccgttgcaataaacggccaaaactatagctcgacaatttcatcatgatgagttatacgggttaccaacgagtaacatatcagctgcaacagtagatcttgaaagagggataacatggatattaaagatatggccgccatcgttaccggggccgcctccgggcttggcgaagccgtcgcccgggatcttgcggcccgcggcgcaaaggtttccgttttcgatctgaaccgggaaggtggcgaacaggtcgccaaagatatcgggggcaagtttttcgaggtggatgtcgcgtcggaagacagcgtcatcgccgccctggatcaggccgccgcagcgcacggcgaggcgcgcatcctggtcaactgtgccggcattgcccctgcccagaaaactgtcggccgggacaatgtcccccatgacctggcgctgtataaaaaagtcattgaagtcaatctgattggcagtttcaacacactgcgcttggctgccgcccgcatggccgggctcaaggccctggaagacggcgaacgcggcgtgattgtcaacaccgcctccattgccgcctttgacggccagatcggccaggtggcctatgcctcatccaaggccgccattgccggtatgaccctgcccattgcccgggacctgtccaagctgggcatccgcatctgcaccatcgcccccggcattttcggcacgcccatgttgctcggcctgccgcaggaagtgcaggattccctcggtgccagcgtgccgttccccagccgtctgggcaaacccgaagaatatgccgctctcgcccggcatattatcgaaaaccgcatgctgaatggggagactattcgccttgacggagccctgcgtatggcgcccaaataagccgcccccctgtgaaattctgtgaaattctgtaaaattctggcccctttttggggccatttttattcgggttattttttattccctcaaataccggctggccgcatggttcatataacgcgccaacttgatgtcattcagggtcagtccgccggcgtcatgtgtggtaagcgtcacgtccactcggttatagacattaaaccattcaggatggtgattcatccgttccgccttgagcgccacatgggccataaaaccgaaggcctgattgaagtcctcaaacttataggtccggctgatcgcttcgcgggccccggcaaggctccagcccggcagttccgccagcgcttccctaatttccgcatccgtcagtttcattccgtcgtctccttcaacaattcatccacaaaggccgggacaacccgtgtcgccggaccataatatccttcatcaaacagctctccctgatccacctcccgctccgttccctgcccttgggacggctccagattcagttccaccgtgcgggccccgcccgcctttgcccgggccgcaaaccccgcagccggatacaccgtccccgaggtaccaatggataaaaacaggtcgcattccctgagcaaagcctcaatttccgtcatataaaatggcacctccccgaaccagacaatatggggacgcaatgttccgctggtgtcgcaggccgggcacggcgttgtcactgtcaactcccgggaccagtttttcaccacgccacaaactgtacagcgaattttgcatagttcgccatgcatatgatacagggtgcggctgcctgcccgttcatgcaggtcatccacattctgggtaatcaggaacacgtccccgggaaactctcgttcgaggcgcaccagcgcctcatgggcggcattgggactcacctccctcagtccggcccggcgcagattatagaattcatgcacccgcgccgggttgcgcgcaaaagcctccggcgtcgccagttccatcaggtcgtatttttcccacagcccccccttgtcgcgaaaggtatgcaggccggattccgcagaaatgcccgatccggtcaggattacgatgcgcctaacgttccattttctatttttcggcacttttgtatgtgtcctcaatatatccgtcatcccggcgtgacttcccttttctggaaccagatcaaaaaacagtgttgtatcttgagctttgcccaccaatctctatataactatgggccagttagggccatctttgaaggatatttttaccgatgctgaaagtcctatttgtatgtatgggcaatatctgtcgttcccccactgccgagggtgtgtttcgcaaacatgtcaatgaggcgggcatccaagacggacttttgcatcacctgtacatcgattcggcgggcaccagcggatatcatgtgggcgaacgccccgacccgcgcgccacgaagattgccctgcactacggggtggacctgcgcgacttgcgcgcgcgccaggtctcgatgcaggattttgcggattttgactatcttctggccatggaccgggaaaacctcaaacacctcaaacgcatgagccacagccgctatcacgacaagctccacctgttcatgagttttgctgaagactgccccggcattaccgaagtcccggacccctattttggcggcccggaaggtttcgagcgggttttcgacatcgtggaccgcggggcacgtggcctgttaaatcacctccgccgcacccatgggttgtaaccccgcagaggtccgcttttttcagaacatcactctttcgccaccggcgcaccgctttctcttgaaattcatacggcttatgccaatatatgatcacgacaaagtatggaactcacaaccaaacaactgatttgggccaaacaactgattaaactgactagggatagactcaatggtagactataacactcgctattctccaaccaccggggcgcgtaccgcggccgaagttgacgagggtttgcgcagctatatgctgactgtgtacaattatatggcttcggcgctggtgctgaccgggcttgccgcctatgtaaccgcccacgtcccggccttgttcaacctgatgtatgccacgggtcccgccggcgagatcggctatagcctgccgggtctgattattgtctttgcgccgctggcgctggtgttttttctgagcttccgcatcaatcatctgcaggcttccaccgcgcaggcgatcttctgggtctatgccggacttctgggcatgtccctgtcgtcggtgctgctgatgtatacaggcgccagtatcgcccgcacctttttcgtgactgccgccgccttcggcgcactcagcctgttcggctacaccacgaaaaagaatctcagcgggatgggctctttcctgattatggggctgtttgggctgatcatcgcctcaatcgtgaatatcttcatgcagtcttccgctatggaatttgtgatttccgtggccggggtgctgattttcgcgggactgaccgcttatgacacccagaaaatcaaactgatgtatctggaagatgatcatgaggaaacggcaaagaaaaaggccatcatgggcgctctggcgctctatctcgacttcatcaacatgttcctgttcctgttgcgtttcctcggcaatcgggaataacatcgtcgcggactgggggaaaatttccagccagttctgagaccatttcagatcatttcaggcggcctcccacgcaggggggccgtttttttatggagaaaccaaagctcccttccccctgagatacttggatattataaggcggagatagggcgggatataggaaacgcagagcgggaaaggcctccggcgcataaatttattccctccggtaaatttaccgttgcactcgggaatatttttaagtagtctccgcccatcctgtccgaacgggacccaacagcggccccggataacgacgaagcacccgtagctcagctggatagagcgctgccctccgaaggcagaggccagaggttcgaatcctctcgggtgcgccaatctccccgtaaatttgatctggctggtatgtcattctgatataaaaggccataaaaaaggcaggccggagcccgccttttaatcttgtgctgtctttctgttacaaacagaagcttgttaacatccagacctcaatttctgaaatactattaagtgagagaactgtaaccaactcgccaatatattgtcaaggcagaaacgccatatgtcgggtttggctctgtggccccgacccaattcgcagacttcagaaattgaggcccggctgcaactaaacaacacagacaccttcaaaatgtcaacattgtttgtgttagaagagtactgcgtaaaaaatttttagtcaaggctgtgttgtttaagaaggtaattttatggacactcatattatagcatgatatgtttggcgtataatatatatggggagatatatatggggagtgcttttttgcctctcctaatgaaggcgatatgacatgaaagccttttcttttcatctatctgttgagcttgacatccatacaattggatcgggaggtgagaaatttcagaaaactgtccccctgacccaacgccggcctcgccaaggcgccaatgacaactgctccaatgccccctcaaacatattcgcccagatccagctcctttttacaagtccggcttggtggtggcttcttgaacatttcgccattctttttttactcttgcagccataagctgaaattatgtactctttgtatataaatttggcacatcgataataatttgggggatatgacaatgacatataaaccaacgcgcctgggattggacatcggcaccacctctatcggttggtgtctttatgaactgaatgagaataacagacccgtcggcattctccgggcgggggtgcggatcttttccgacggccgccgacccaacaagggcaaagcctccctggccgtggaccgccgcctcgcccggtcagcccgacgccgccgggaccgatatctgcgccgccgccagaaagtcatgcgggccctgaccgaagccgggctgtttcccccggactggcgtagccgccgcgacctagaacagctcgacccttacgccttgcgcgcccgggggctggacgaagagcttcatccccatcatctgggccgggcgctgtttcatctcaaccagcggcgcggctttcaaagcaatcgcaaaacagacagcaaggacagtgacagcggcctcatcaatcagggcgtaaaaagccttaaacaacagcttggtgatccggatgccccctcccccgaggaaaagccgcgcaccctgggcgaatggctctatcagcgccataaaaagcagcaatccgtgcgggtgcgccggaccacgcatgtcatcgacggcaaggaaaaggaactctatgacttttacccgtcccgcgccatgtatgaggccgagttcgacgccttatggcgggcgcagaaaaaatatcatcccgccctgctgacggatgaaaattacgcccgactcaaggacgtgatctttttccagcgctatctaaagcccgtccagcccggccgctgcgtcttcaacagttgggaggaaagagtcgcccgggccatgccgctggcgcaagaattccgaatctatcaggaactgaacaatttgaaatataccgtcggccatgacccgacgcagcatgaactgaccttggagcaacgggatcttttggcttatgcgttgaagacaaaagccaaaatgaccttcacccagatcagaaaagcgttgaagctgacgccggactgtgaatttaatctggaacaagacaaccgtaaatacctgaaaggcgatgaaaccgccgagatattgcgtaaaaaagaccgttttggcgacaagtgggccgccctcccctttgatcgccaaagcgagattgtcgacaagctgctgacggaacagaatgaagccgtcatgatcgactggctggttcgggactgcggccttgacgcggaacaggcggaaaagacaagccgggcattcctgccggacggtcacgccagcctcggccccaccgccatgcgggatattgtcgaggtgatgaaaaaacaagtcattacctatgcccaagccgcccgttccttgggatatgaccattcttcctttgacgcccatgaaatcaaacctgaactggagtattacggcaaactgatggaacgccacgttgggttcggcagcggcaacccggatgatccggatgaggtccggtatggccgagtgcccaatccgaccgtccatatcggcctgaatcagttgcgccatctggtcaacaaaatttgcaagaaatacggcccaccccggcaaattattgtggaactggcgcgggaattaaaactcaataaaaaacagaaagataaaattaataaagaacagaagttcaaccgggagcgcaatgaacgatatgaagacctgttgtcaaaggagggcttccccaacaccggcgaaaaccgcctgcgcttgaaactatgggaagaactgaaccggaacgacccttttaaccgctgctgcacctacagcggtaaaaggatcaacataaaaaatctgttctcggatcaggtggaaattgaacatatcctgcccttctcccgcaccctggataacagcatcgcgaataaaactctgtccttcagagacgccaaccggaacaagggcaatcaaagtccccatgaggcctttgggcatcgcccggactggccggacattctggagcgggcagccgccctgccccataacaaacgctggcgcttcgggcctgatgccatggagcggtttgagaatgaagagcgcgattttctggatcgggccttgaccgatacacaatacctgtcccgcctgacccgggaatatctaacccatgtctgtgatcaggtctgggtgatcccgggtcgcttgaccgccctgctccgcggcaagtgggggttgaacgatctgctgagcgatcataatttgaaggaccgcaccgatcatcgccatcacgccatagacgctgccgtagtcggggtgacggaccgcagcatgctgaacagcatctctcgccaggccggacaggcggaaatagaggatcttgaacgactggtagtggacatgccagttccctggcccacctttcgggatgacctgaaggcggcgcttgaccaagtcatcgtctcccaccgccccgatcacaatgtgaagggggcgctgcataatgatacggcttacggcctggccagcgatcctgatcccaaaggcgtgcgggaagtggtgcatcgggtaccgctaatgtcgcttaagtcgttaggaaaaattgaaaccatccgcgatcgtgtcatccgtgaacaactcctcacccgcctttacgggctttcggacaaggaattttccgcagagctggccaggtattcaaaagacaccggctgtcgcagggtccgggttgtggaaaaacttcgcgtcatacccatcaagaacaaaaacggcattccctataaaggttataagggcgattccaatgcctgttacgacatctatgaattgcccaacggcaaatggaaagctgaggttatttccacttttgacgccaaccagggcaattttatttcccccctgaaacggcagcatcccaccgcccggaaaatcatgcgtctgtttaaaaaagatatggttctgttaaaggagaaaaatggctggaaagtgatgcaggtgattaagttctcaaaaggtgccctgatcatggccgaacatcacgaaagcaatgtggatcaacggcatcgcaataaagatgacccctttaaaatgacagaaatgggggctgaaacgttgcaaaaatatgggattcgcaaggcctggctcgatgagctagggctggttggatatccgaaagacggcgcgtgacatggtgggacatattgttgaaatcgccgaagacgatcgtcacctgagcgccctgcgcggctttcttcgggtggaatgtcatggtgaagaggtgggccgggtggcgctggatgacatttctgccctgattatcaacgcccatggcctgacctataccaataacctggtcaccgcgctgtccgatcgcaaagccattatggtcatctgtggccccaatcatatgccgaaagcctggctctggccgatggagggacatcatcagcagggtgggcgcgttcgccatcaaatcgaagccggaagaccgttgcaaaagcggttatggcaaaccctggtccgaagcaagattgatcatcaggccaatatcctggacatcatgaaccttaaatcagacggcctcagaaatctcaaaaaatccgtcaggtccggcgacccggacaatatcgaagcccaggccgcccggcggtattttttgcagctcttcggcaaggattttagacgggatcggtccgccgagggcctcaacagcttgttaaattatggctatacagtgctgagagccatggcagcccgggcgataactgccaccgggctgcatccttccataggcctacatcatcacaataaatacaatgcgatggctctggtggatgatttgatggagccgttccggccgcttgtcgatctgcgggttcggcgtttaatgatcaatgatcagatcgttctggataaagataccaaggcctatctcgccaggattggccgccaggacatgacaacagatcttggcgtcagcccgcttgccgtttgtgtcgagcgccttgcctcctctctggcccaatctctggcggacggtaaagaccagttggttctgccgggcgctcccttgccgctggatcaaggggtgaggtgataaaatggagttgagtgggtaccgtatcatgtggatggctgtcatgtttgatctgccggtgatgtccatatctcagcgcaaagccgccagtaaatttcggaactttcttttggatatgggattcgagatgtcccaattttccgtatatttaaggttttgcagcagtaaggaaaaagttgaaacctactgccgcaaaatacagcaaaatctgccggaatatggtaaagtgaatattctgacatttacggataaacagtatgaaaacatcatcagctttacaggcaaaaaacagaatccggcctttaaaaatcccgatcagcttatcctgttttaaaccgaacggcgctgttttcatcaggccaaacagcagaaaacctctgatttctcagaggtttcccaccatcgtatcatagcatttcagaaattgaggtccagctgcaacggcggtataaagcatatcaaggaacttgggatcatagcatttcagaaattgaggtccagctgcaacagggcggcaacctgcttggcaatatgtttgatcatagcatttcagaaattgaggtccagctgcaacttcaggattaaaatatggtttacgtttaatatcatagcatttcagaaattgaggtccagctgcaactcggcttgtgtgtggtcaattacggaacgcatcatagcatttcagaaattgaggtccagctgcaacgaaacctgtatgctcgcaacattgccggcaatcatagcatttcagaaattgaggtccagctgcaacctcagctccgtgatcccgacacggtcaattatcatagcatttcagaaattgaggtccagctgcaacacataggcttgactcaccataggccgaagtatcatagcatttcagaaattgaggtccagctgcaactctgggcagcggttctggcatgggggctatatcatagcatttcagaaattgaggtccagctgcaaccataaaatccttcttaatgtagatctggatatcatagcatttcagaaattgaggtccagctgcaacgcgctatcataataattcatcttatcctccatcatagcatttcagaaattgaggtccagctgcaacggaacgtgaccgcacctgatcccaacagacatcatagcatttcagaaattgaggtccagctgcaacggtggcggttgctgagactgttcataaaatatcatagcatttcagaaattgaggtccagctgcaacgcaagcctcaaaccataaggcttgtggttgatcatagcatttcagaaattgaggtccagctgcaacacggtggtgaatgtttctgtggttgcgccgatcatagcatttcagaaattgaggtccagctgcaaccagataaacatgtgtgtgagccccaccccatcatagcatttcagaaattgaggtccagctgcaacctatggtacagtgagacacattcgaacccatcatagcatttcagaaattgaggtccagctgcaacagggcctccgcccaaactgttttccttgcgatcatagcatttcagaaattgaggtccagctgcaacgagcattccttgttaatgctggcttatctgatcatagcatttcagaaattgaggtccagctgcaacccgcatgttctggtgatcctgacaccctggatcatagcatttcagaaattgaggtccagctgcaacagaaccgctgccggcctcggtgtgggaaatatcatagcatttcagaaattgaggtccagctgcaacagcatgaagacacttttgaaatacatacacatcatagcatttcagaaattgaggtccagctgcaaccactaaacagaacgaaggacaattacgagatcatagcatttcagaaattgaggtccagctgcaacgcagtggttgtacccacaccctgtgcgcggatcatagcatttcagaaattgaggtccagctgcaacgcagtggttgtacccacaccctgtgcgcggatcatagcatttcagaaattgaggtccagctgcaacctacccaggcgatttctgaggcgttatctaatcatagcatttcagaaattgaggtccagctgcaacgcagtggttgtacccacaccctgtgcgcggatcatagcatttcagaaattgaggtccagctgcaactctgggacccgaccccgacttcagcttacgatcatagcatttcagaaattgaggtccagctgcaacgatagactatgaattgaaacaaagtgcgagatcatagcatttcagaaattgaggtccagctgcaactcaaggagttcacgccaaccggcagagtccatcatagcatttcagaaattgaggtccagctgcaacgcaaagacgcagaagcattcccggcctgaaatcatagcatttcagaaattgaggtccagctgcaacagtacaactgcccgttcctgcgggcttcagatcatagcatttcagaaattgaggtccagctgcaacgcatcgccaaggtgacccagtcggcgcgcaatcatagcatttcagaaattgaggtccagctgcaactcaaccatctcattgaagaatttcgaggctatcatagcatttcagaaattgaggtccagctgcaacgtgacgatcaaactcgaccccctggataatatcatagcatttcagaaattgaggtccagctgcaaccatatctccgcaagtccactaatcatcacgatcatagcatttcggaaattgaggtccagctgcaacactggacggcaggcgcccccctccaccataaggatatcgcgatgaaacctcatgtgccgttgtgagctatccggggcggcaaaaacagtaaaagaaagacgacaaaagccaaaaattttcatatatgattttttttctgagtgaaatatgttaacaccagtggaaatgaaacgcggctagagaattccagtgactgacacagcttcaaaaattcctgaaacgacacggccttcagacacctcggcggaaagcttgggcagccgtattcgtaaaaaacgcaaacaagccaaactgaccctgaaaaaactcagccagatgtccgacatccccgtctctaccctctcaaaggtggaaaacggcttgatgtccctgaatattcagaaactgatgaaagtcagccatgcgctggggcttgatgtcatgcagctggtcacgccatccgaaccgacgatgcccaaaggcccagttatcacaggccggcgcagcatcacaaaaaccgggcaggcccatgtggtaaaaacccaacagactatctatgaacatcatgcctgggattttctaaatagaaaacttgtccccactgtgataacggttcaggccaatcttaatcccgaattgttgcgccatcagggggaagaatatatctatgtgctggaaggcacgattgaagtactgacggaattttatgagccgacccggctggaagccggagagagcatctatattgattccacaatgggccacaatgtgcgtgcgatcgggggcaaacccgcccggatattgaatgtgatgaccagcatcccctcacaccacccctgatgtggacttaacgcgcattgagacccccttatcactattctctctaatcggctcttttctgccagtgcctaagcggactgatcgccgccatccccatcgccgggggcatgccgcttatgagctgggtcaacaaacgtgcagaccccatcgccatggtccagccgaaaggtccgtgccccgtgtttaaatacagaccgtctatgggtgtttccccgataaaaggcatgccgtcggcactcaccgggcggaacccgcaccacgccccaaccggtcccgcaagcaggtcatgcgcaacggcgggaagaacccccttcagcaaggttttcagattattcaaccggtcctgtctcagccgcggatcaaaccccgcaaattctgccgttccagccacccggagacgatttcccagcggggtaaccgccgcatgcagatcatcgtcaaccaccgggatacgcggcaaaccggctccgacgccccgatccccctcaaaggtcagggagtatcccttgacaggccggacaggcaatccccgccagaatggcttcaggagtcgccctgaccagcttcctgccgctatgacaaccgcctctgccgtaaaggacacgttttctgtgatcacctccctgacccgcccctcttcaacgtgaattttccgaaccgtctccccgcaaagaatcttaccgtcccgcgcctgaatacgagccgccaacaacttggtaaaagcggcagcatcgccggaccagtcctgtggaaaatacagcgccccggcaagctgttttccaataggcaccaacgccggttctttctggagcgtttcttcttttgaaagcaggcaggtaacgacgccaaggtccgccacccggttcattttttcaacccccttccgcagggcaatcggatcccggtatattttcaggacgccgcctttgttatcgtcaaattccagtctttctttggcgcaaacctccctcataacctccatgctgacgagggacagctccgtattcgttcgcaacgctttgtggaaccgcgcctctgccgaataatacaaaaagcgcgtgccccaaacagccagcgaaggcaaagccccgacacgcaccagcatcggcgccgccggttgtccgagataccgcagcaaatcacgccatacccccggggcgttccacgggtcagacatactgggggtcagaaggcccccattggcaaagcttgtggcccgaccaacatcttccccggcttcaaggagcagaacttgatgcccggctttttgcagctcatacgctgatgaaacccctataactcccccgccaataataataatcttcatcaagatgcccctgttttacctttcgccagcagatccagtataaattttcgatgttttttctctaactaaaataattatcatatttgaaaattatttgaaacatgctacggttccaggaacgatagcaaaacacacccgctaaactgcttcaaggcgcaaaaaacgagtcttttgccaaacgagtcttttgccagtagtgcccgggctagaaaaacagagttgtaagggagatattgttccatgcgttgtttcattgctttttttgcgcatgaatcaaacagcttttcgcccatcccgacggatttaagcagttttgaggaaatcggactttacaaaccagccatgggtgaccctgcggatcatcttccgctgctcaaaggagccatagatttttatagggaagcgcagaaacgcggtcataccgccattgttggcacctgcgccctggcgcaaccaagtgctccgtgccgccggaaagactatgaatatttgcgggataccattctttctgagctaaaggcggcagcccccgttgatatggttttcctcatgatgcatggggcaatgatggcgcaggggtatgacgattgcgagggggatatgctggcccgcgtacgtcagattctgggtcccgatatacccgttggcgtgcttcttgacctccacggcaacatcaccgaagccatgatcaggaacgccacagcactcatcccctgcaaggaatatccgcatacggattttgccgacagggccaaagaactctatgacctcatcgaacaggcggcaaaaggcagcatttcaccagtgatcagttttttccgcatccctgccctgggtttgtttcataccacccactcccccatgcgggaatttgtcgataccatgatggcccaggagcaggaagaaggcatcctgtctgtcagccttgcccacggcttcccctgggcggacttcaaggacacgggggcttgcatgatggttataacagacaaccagaaagacaaaggggacaagatcgccgaaaaactggggcgggaattttttgctcttaaggagcaggctgttcctcatactctgacaccacaagaactcattcccgctctgaaaaacgtcaaagacggtacggttgttattgccgacatggcagacaatcccgggggcggggcaggttctgattccacctttatcctggatgcgttgatcaggggtggtattaaaaatgcactgatcggttttttatgggatccggtggggctcaatattgcttttgccgccggcaaaggggcaacccttcccatgcgcataggcggcaaaatcggccctttttcggggccgcccctggaccttgaggtcaccgtcaaggaactccgctcacaggccggtcagccccatatttctgatggcacctggtgcaaccttggccggaccgcaattctcgaaacacatggaatcgaaatcgtattgaatgaaatacgtcaacagcctttccgaccggaagccttcattgctgccggggcggacccctggtccaagcgcgtggttgtagtgaaatcctccttccatttttatgcggggtttgccgacaaggcggcagaagttctgtttgtggattcccctggcacacttaacggggatgcgacaacgcgaccttacaaacacattactcggcccatctggcctcttgacccagtagaactttagagcagtcccatgatatggaatttttttacaaaagagtctgtcatgaccgccttggtgctggttctgatgctcgcaggtctcagaattttaacagaaggccccccaccaaagcctgcatcccttccggcaggccatttttctgccgatcgggcttacgacctcttgggagaactgttggagggcatcggcgcacatccggcgggcagcgcccctaataaactgcttcgcgaacgcttggtgaaaaaactttctgctctaggcctcagccctgaactacagcaggactttcactgcgcccccctggcccccgggtgttcatatcttgaaaatgtcatcgccatcttgccgggatcaaaccccagtagaaaagccctgatggcaacagctcattatgacagcgccccggccgcgggcggcgccgccgatgacggggcgggtatcgccgctcttcttgaaattatcaccaacctcaaggcatccgaccctttggaaaatgacgttatttttcttttttccgatgcggaagaaagtggccttagaggcgccatggcgtttaataaaaaacatcccctcatggaccgtgtgggaatgattctaaatatggaagctcgtggcgtcagtggccccagcctcatgtttgaaaccggcccccgaaattaccggcaagtccagggatttgccaacagcacgccacgccctgtgagcaccagcttgcttgtggaaatctataagcgcatgccaaatggcacagatctgatggcctatgccgaacgcggcttgccggccctgaacttcgctttttcccgcggggtctccctctatcactccccccatgatacaatcgaaaatctcagcaaatccagcctccagcatcacggcgacaatatgcttgcagccatccgccatttcggcaatacggatctggagtctctgcacagcgatagcgatgccacttacattgattttttcggctattttctgatcatgtggcccgcgcatctcagcatctggatcgcaggcgccgcccttgcaggtctgatatttgtcgccattcgacagaaacccgcccccatcaaaatcctctggccctgctcgcggtaatcctgattagcgccgcaacagtagccacgggctggattctttcctttccccttggaaactggggcgacagtcacccgcttgaccacccttacccctggcccgagcgaattgccctgatcgccacgggacttttcttgcccgcccttgtcctgcggctgcttgcgcgcaagctggacgaaaaggccctgtttcaggttgtctggggaatatacgccattgcggctgttttatgcagcctgaccctcagcggcgcgtcctatattttcatcatccccctgcttggcgcggtattggctgctgtggttctctccttccgccaaccgcaatcctctttaaaggtaaaggtggcgtgctacgtaggaagcgcccttgcggcctatatggctttttaccatttcatgttgctggatgttgtagtcaattttcatatgagccacctcaaagtgatcccgctcctgcttttgtctctagccgccttaccccttatgttgacctggcggcaggccggctcagaccacggcctgctggttggaaccgggcttgttgccgccctggccaccctggctgcaagcatgatgcctgcctacacaccggaacggccgcgcagcaccaatattatctaccgcgcggatgtaagcagtggcacatatcaatggcagcttttcacctatggtccggacgatcgacactatttacagaaagcagatttcccggacgagaaatttccctatcatgattttggatataaaccgcgcacaggatacttaaaaccggctcccgaccttaaacttgaagcgcctggttttaccctaatctctgatacaaccgaaggaaagatccgtataataaccgcaacactgcactatggtcgcaatgccatgctgtcaggcatcggctttcccccggaaatgaaattacacaccctggaagtttccggccagcgggtcctggaagcgccgaacagcgctgcgccacacgcactctttatgggcagcgatccggaaggacttcccatgcgcctcaccgttgaggcggggacggcagtcgaattccgcatatttgacatgacgcccctttccataacaggagaagcagcaacactgcatgcccttcgccctgcaaataccgccccgatgcattttggagatcattccatcgtcagccgcacaataaaccttggagaataatccgcatgttcagcctgaaagacctttatgatgtaacccccggtacagtatcgcgctccatcagtttcgaaaacccgacaggcgtgcctggaagcggtgccaaagccgccagtccgcttggcccgggccgcaaggggagtccagcaaggcatctggatccgggggaaagcctgattttggcggatatagaaggaccgggcatcatc

SEQ ID NO: 422 - DNA, 15523 bp, synthetic construct
  variation 15139..15256: note = n is a, c, g, or t
  variation 14234..14412: note = n is a, c, g, or t
  variation 1871..2064: note = n is a, c, g, or t
  variation 7996..8142: note = n is a, c, g, or t
  misc_feature 1..15523: note = Synthetic
  source 1..15523: mol_type = other DNA
  variation 6892..7063: note = n is a, c, g, or t
  variation 8353..8409: note = n is a, c, g, or t
  variation 12843..13004: note = n is a, c, g, or t
tgttcgataccccagaagctaaagaatttctaaaaacaggtaaaaatccatatattggtaatgaagaagcaatcaaaaaaggtaaaaaaatctttggtttatattcatgtacacaatgtcatggtccagatgcaaaaggtcaagttggtcctggtttgattggtccaacattccgttaccctaaagatgctacaaacaaaggtatgtttgaaacgatttggaatggtacaaacggcggtatgggcgctaaaggcttaggtttgatggatccatccgacccaacaaatggcttaaaaccagatgaagtactaaaagtcattgcttggattcgtagccacggtggcgttaacggtaacgaataatagatttttgtaaaaatatattaatatcaaaacggtcatgtaaaacatggccgttttttttgtgaaatttttaattaaagagtaaaatagggctagcgctaaattgcttattagcgagcatatttatagtacttttaaacctcggggggcgagtaatgaatgggttaaaactaagtgcaatcttattggtactggtagtaggagtagcaggttgcggcaaaaaagagtcagcaagtacaagcggagatgcagcgccagccgcatctgcaacaaaagcgattgagtttgtagatacacaggaaagtaagccattagtaattaatgcagctttgtttgatacacctgcagcaaaagaatttttagcgactggcaaaaatccctatattggtaatgaggaagcaattgctaagggcaaaaaagtatttcaaatgtactcatgtacgcagtgtcatggtccagaagctaaaggtcaggttggtcctggcttaactggccctacattccgttatcctaaagatgcaacaaataaaggcatgtttgaaactgtgtggcatggtactaatggaggaatgggtgctaagggtgttggcttaatggatcctacagatcctaaaaatggtattacaccagatgaactgctaaaaattatagcgtggattcgcagcatgagtaatggtttaactggcaacgaataatttgttgatagtgttgacgcgcttgctagattaggcaggcgcgtttttttttaaggactggaaattgagcgaagagaatcatttacatcatatcatcatcgtgggtggtggtgcaggaggcctagagttggctactaagcttggcgatagtcttggaaagaaacagaaggcgcttattacgttgattgattgtacacgtacacatgtgtggaagccattgttgcatgaaattgctgcaggcagcatggatccagaccgccatgagcttgaatatatagcacaagcacattggcatcatttccgttttcgtttgggacgcatggatgggttagaccgagcaaaacgggaagtcactatcacgccatacattgatgaagatggcagagaagtgattccaagacgcacttttaaatatgatactttagtcatggcggtaggaagtaccactaatgattttggtattaaaggtgcgcgcgagtactcgattgctttggatacacaggagcaggcgcaaaagtttcaccgttacttgcataatgcactattgcgagcacaaacacaggcagagccattgaagcctgggcaattagaagtggcgattgtaggcgctggtgccactggggttgagctggcagcagagttgcataacacaacacgtgaactagccgcttatggtttagataagatcgaccctgaccgtgatgtgaaaatatcattaatagaagctggtgatcgcatactgcctgcgctaccgcctaagatgtcgctggctgtagatgttgaactcagaaagctacgtgtaaacgtttttacnnnnnnnnnnnnnnnnnnnnnnnnnnnnnnnnnnnnnnnnnnnnnnnnnnnnnnnnnnnnnnnnnnnnnnnnnnnnnnnnnnnnnnnnnnnnnnnnnnnnnnnnnnnnnnnnnnnnnnnnnnnnnnnnnnnnnnnnnnnnnnnnnnnnnnnnnnnnnnnnnnnnnnnnnnnnnnnnnnnnnnnnnnnnnnnnnngaagtgtcagaaaaaggtattacgacacacagtggaaggtttattcctgcggaactagtagtttgggcggccggtattaaagcaccagattttttaaaagatatagacggcttagagaccaataggattaatcagttagtggtaacgcagaaattgcagacaactcgcgatggaaatatattcgcttttggtgattgtgccgcttgcccttggctgggtcatgatggaaatgtgcctccgcgtgcccaagcagcgcaccaacaggcatcactcttaatcaagagcattaaaaatagggtggcgaataaaacggactttccagagtaccattaccacgattatggatcactggtgaatcttgggcgttattctaccgtgggcagtttgatgggtgcgatttctggtggaagtatgtacattcaagggttgtttgcacgccttatgtatcgctcattatataaaatgcatttaatggcgctacatggtgtggtctcagtgctgattcatacattaggcaggttaatcgctagaagaacagagccacatgtgaaattgcactaagcttgaatttattgcttgaatctattgttggtatatttttttgtgatagattctgttaattaatcccatgcttaggatgacaaatacgccaaaagcaataatgattaagttgatagaaactgccgcttttaccatcaataggtaaaatcctagcatgatgagtatgccaatattctcattgaaattttgaacagcaatagagtgaccagcacctattaaatggtgcccttggtgttgtagcagcgcattaagcgggacgacaaaaaagccacctagtgcaccaataaaaaagagcaggattgcggcagccagccagtgactaataaaaatcataccgatgaccaatactcccatcaagattcctgctggtaacactttgacggaatcttcgagtttgatgtattttgatgcaattactgaaccaactgcaataccaagtgccacagtggccaccaattgagttgcctcttcaatattaaagtgtagagaaagtgccgcccatgtgagtactaccaacctcagtgtggcacctgccccccaaaataaggtggtaactgccagtgaaacttgtccaagggggtctttccacaacacaataaatgcatgccaaaagtctttaagtaggtacccaaagcttttgctttcaagtttaagttcgataggaagtttaggaataaaaagattaaagagtgctgcactgagatagagtcctgtaatgacgagcattgccatatgtggatcgctgctagatagtttaccgccaataatggcgcctgctatgatggcagtgacggtagagccttccatccagccatttgcagtgaccagttgattgcttggcaatagttctgtcagtatcccgtattttgctggggaataagccgcagcgcctatacctacaatgccgtatgcgtacaatggtggaaaaccaaaaatcatggctaggcagccgaagactttaatgaggttggagctaaacatgacactgccctttggaaaagcgtctgaaatagagccaacaaagggagcaagtaaaacgtaagaaaaaacaaaaaattgttgcaataatggggtatgccattcaggggcatgcatttcagaaagcaaggcaatcgctgcgaataacaaagcattatctgcaagtgcagataaaaactgtgcgatgagtatcgtataaaagcctggtttcatgatgcgccagacttaatcatcaaaagaataaccgtgactaacacgggttaaattcatcatgatttataacgcttcgccagcaaaatctgccaatcgagagcgttcgcctctgacaagtgtgatatgaccattatgctgccagcctttaaatcgatctactacataggttaagccagagctaccttcggtcaggtaaggtgtgtcaatctgtgcaatattgcctaagcaaaccaccttggtaccaggacccgcccgtgtaatgagtgttttcatttgtttaggcgtcaggttttgtgcttcatcaataatgagaaacttatgtagaaacgtacgaccgcgcataaagttgagagatttaactttaatgcgtgtgcggattaagtcttgggtagccgcacgtccccactcgcctgcatcttcatctgttttgtttaacacatctagattgtcttctaatgcacccatccatggcgccattttctcttcttcagtgcctggtaagaagccaatgtcttcgccaactggaacggtaacgcgcgtcataataatttcagaatagatttttttatccaatgtttgtgtaagtgctgcggcaagtgtgagtaatgttttacccgtacctgcttgaccaagcagcgttacaaaatcaatttctggatccatcaacaaatttagtgcgtagttctgttcccgatttcttgcaatgattccccagacattatgtttagggttggagtgatcttgcactatttctaatacagccgtgttatcttcaatttttctgacgatggcgtgaaatggcttatcaaactcatagtaaacgaactcgttgacgatgaacgtctttactaaaggacccgatattttgtaaaacatgcgtcctgcctcttgccaagactccatcgctttactgtgttgatcccagaaatcctgaggtaattcacgtacccccgtgtagagtaggtcactatcttctagtaccttgtcattaaaatagtcttccgctggtacgcccatggcacgcgctttaatgcggatattgatgtctttactgacaaggatgacttggcgttcaggctgacgatttttgaggtccaatactacgcctataatttgattgtcggctttactgcctgctaagccagggagctctttgatgacctgctgtgtttgtaaaaataaacggcccgtcaaatggcgattacccttgatggcaagtgggcagccttcctctaaattcacgaggtcagtgcccacaatttcttcaagatgtcgactcgcttgtctggcattgcgtgcaacttctgtgagcccttttttattgttgtctagctcttctaacgtcaccatcggaaggtaaatgtcatgctcttcaaatctaaaaagagaggagggatcatgcattaatacattggtatcaagcacaaatagtttagtggtttcaggtgaatttttgaccataataatgcgttatcgttataaagttttaataaatgctaatacttcattagcatgtccatccgcttttacaccgcgccattcgtgtattagcttgccttgctgattaatgatgaaagtactgcgctcaatgcctcttacttgtttgccatacatgtttttcattttaatcacgttgaacagtgtgcaggctaattcttcactgtcggagagcaattcaaaaggaaaactaaatttagctttgaagttttcgtgcgatttaatgctatcgcgtgagataccaacgatgtttgcattgagtgccagaaactctgaataagtatcgcggaactgcacgccctgtgtggtacaccctggattagagtctttaggatagaaataaacgaccagcagttttcctaaatagtcggagagtttgaaagttttgccagaggtcgcaaggagttcaaaatctgttacgggttggtttagcataatcttgttcgtattgatatgtgctcattgttctaaaaaaaaacaataaaggcaagttaattgttaattaaattttttcggtaaaaagacaagcattgtttaatgtgatgacgtgcgtgctggctattgaggtaatgcgattttgatgcatgtgccctgtggcttggaggcagaaaattcaatactcccccccaacacttcacatactttaaacgcaaacggaatgccaagccctgtaccaaaacgcttggtagaggggccgggactcagcgcgtgtgggtctggagtaaatggcatgccaacaccatgatcacggatgataatctccagcatggtgtctactttgtgcatgctcaaataaatgggcgcatccttaggtgaggcctctatcgcattcaaaatgaggttgtaaatcatttgttcaagcaagtgttcatctgtgatgatttcctcttctgcttggacttcgtctaagattaattgaatgtttttttctgatagtttttgtgtcaaaagactaattgcaccttggctcacattgcaaagttttacaggtttaagctgaggcttgattgggtttaggtaagccagtaatgcgccagtccagtgttccagtctatccaccgtgctgataatgccatgtagagattcacgcgtatcattatctagttcaggctggtcagtcacttgagcggtagcgcggatgctggcaagtggattgcgtatattatgcgccagcatgggcacaaggagtcccagcgctgcttgtttttctgtacgtaccaaggcatctctgctggaggaaagttcttccgccattttgttgatttctttggaaagtgtggctaactcttgtgcacctgtttctggtactttgtgttttaaatttccagcactcatttcttccgttgcgcgcatgatggcatgaatcgggttgacaatggattttttcagaaacctacgtgagagcaatagcaaaatgcctgcaagtaatactggaatacttaaaatggcaacagaagtcattttggcttcatgcaagcggcttttgagttcggcttgttttactttaagcaacacttctgcgcgttgagagacgttttcgtattgagaaaaaataccagtttcaatatctttatataannnnnnnnnnnnnnnnnnnnnnnnnnnnnnnnnnnnnnnnnnnnnnnnnnnnnnnnnnnnnnnnnnnnnnnnnnnnnnnnnnnnnnnnnnnnnnnnnnnnnnnnnnnnnnnnnnnnnnnnnnnnnnnnnnnnnnnnnnnnnnnnnnnnnnnnnnnnnnnnnnnnnnnnnnnnatctttatataaagatttttgggtactgctattcggttttgcctgatagcgatagaacagtgaaggtgcttcatttacaaatgtattatagtgctgctcgatttcatgaatcgcttttttttcctcatcaccttgcgcaatctgatgtaagtctgcaaagtgttttagaatactttgcgtgtatgcgttgtactcattcaatgcgtcgcgatcttccagaaaaaatgcatcaaacagctctttcatttgacggtataaatcacctcgtacttgataaatctcttgtactaacagattaatacgttcagattctttagaggctttgtcccaaatgtgaatgccataagcgccactgatgacagctaatagaatgagtgcaataaaggtgagctgatgtgaaagtagcaggtcgcgcagagactttggttggctggtatgcacagtctattcagacactaatttaaagtttaaagtcacagtgattgtatcaatgtggccgcgtaaaatatctggcataaattgtttcagttctgagcgtttaacagcctcaattgctgctttatctaaagattcatttccactggattccgccacagtcacatttgttacgttgccattatgatccagaccaatgtctaagcttacattaccttgaatgccacgctgttgtgctaatttcggataacgttgattgcgtttgagctcattttgtacttggttgcgatatgcatttcttgcagcattgatatcaccttctgaaggccctgtcactttaggaggctcaggcggaggtgggggaggtgccacaaatgctggtttgctttccacttttggtgagacagcaatcacttctggcggcgggggcgcagattccgatgtgggcgtaataggctcaggggcgatgactttctcaggctttacgatcggatccgnnnnnnnnnnnnnnnnnnnnnnnnnnnnnnnnnnnnnnnnnnnnnnnnnnnnnnnnnnnnnnnnnnnnnnnnnnnnnnnnnnnnnnnnnnnnnnnnnnnnnnnnnnnnnnnnnnnnnnnnnnnnnnnnnnnnnnnnnnnnnnnnnnnggttttattttttgtggaacaggttttggcttcacaggctcaggttgagaagtgacaggttttggtaattctggaattacggctggcgcaggctctggctgcttggggtttacaatctcaattttaagctcttgatgtaaagttttaatcggatcaaatttaaagtttggaatgataaacgctaacactagatgtaagagtgctgagcatnnnnnnnnnnnnnnnnnnnnnnnnnnnnnnnnnnnnnnnnnnnnnnnnnnnnnnnnnctttcgtcctgagttgaaaatttaactaaagcttccaatgtaacttttaccgcaaaatgagcgaagcttttgattatactataagaaaaaatttaaacagaacatccgtgttgggtggttgctaccaaccgtaaattcaagattatgtcaaataatcccttcaaacaattgcacactaaccagcgtgtctggctcacagtgaccgacagattcgtctaatacaataaaacagttagcgttactcatgctacttaatacgccagaactttgattgccagtgagcgagactttccattctccttgcgcttcatgcaggatgccacgtagaaattcggtgcgcccgactgtcttctgaatggcgtgcgagcatctgacttttagcaggggtgttggtttgggagtgccgcccattaaagtaataagcgcttcacgcacaaactgataaaacgtgaccatggtagagacaggattgccaggcagcccaaaatagtgggcattgccaattttgccataagccagcgggcgacctggcttcatattaatcttccaaaataagacttgaccatgcttggccaacagagctttcatgtaatcggcctcacctacagaaactccgccactagtgatgaccacatcattttcattggcagcttttaaaagggttgtttctaatagctcaggtatatcagggatagcgcctaaatcatttactactacacctaatctagtcagcatgccaaacaacgtataacgattgctatcgtaaatttgcccctctgccagtggcttgcctacgcttactaactcatcacctgtactaaagaaagcgactttaagtcggcgatagacgagtactttggcaatacctaatgatgcgattaagccaatatcggcagggtgcattaaatgacctttcgctaacacggtctgacctagacttaaatcttcacctgccaagcggatattggctcccagcttaggtatggacgtgatatttaacgcattattttcaacatgggtatgctcttgcatcaccaccgtatctgcacctaacggaatgactgcgcccgtcatgattttgacgcattctccattcattatcttctctgcaaagggtctacctgcataagcggtgccgatgatacgtaacggctgagaggcttcagtatacttaaaagcatagccatccatggctgagttgtgatggttgggtacgttgcagggtgaaacaatgtcgcccgccaacacgcgccccaaactctcgtgcaaagacaaagattcggtttctgcaacagagtctaaaaactgttgaataaacgcgcgcgcttgttgcacagacattgcgttgggatcgtagttgtctatgcaacaaggattaagggcaatttcacttaaagtggttgagttgatcatttggcttgaaaaagctaactaattaatttataaaagatatttatgctaaagttaaagtagaaagcccagcactaggctgggcttggatacaggacactaagatttctcttaggcctttattgtagcaacggctctcaccccagatgaccacaatgaaataataataaggaaaataaatatgcaaagcaagaaaaactttggcaacttaacatttggctttgatattggtatagcttcggttggatgggcggtgttgaatgataagcgcatagtcgatttaggggtacggtgcttcgataaggccgagacagcgaaagaaggtgaatctttaaaccttgggaggcgtacagcgcgtttaatgcgtcgtcgcttacgtcgtcgcgcttggcgactgactaaattagcgcgtttgttaaaacgtgaaggcttaatccatgatgtgaatgtgttaaagcaaccgccagcaaaaggttttgcaacacccaatgtgtggcaattgcgtgtcgatgcgcttaaccgaaagcttacgtcagaagaatgggcgcgggtgatttatcacttgtgtaaacaccgtggttttcattgggtgagcaaagccgaaaagctcaaagatgaagaaggcgcttctgaaactggcaaagtgaaaaaaggcttggcaggcacaactaagcttatgaaagaaaaaggctatcgcacagcggctgaaatggtgttggcggagttccccgacgctcaacgcaataaacaaggcgagtattcaaaagcattagagcgtgaactattggacaaagagtttcaaactctttttgaagcacaacgcaattttggtaatccacatacatcaccagcattagaagagaaattacttaatcgcaaaacgggtttattttgggcgcaaaaaccatcgttgtctggtgaagcattgctcaagatgctaggcaagtgtacttttgaaaaatcagaataccgcgcgcctaaagccagctttaccgcagagcgtcatgtgtggctgacaaggctcaataatttgcgtttggtagtggatggcacaatgcgaccgctctcagaagatgaacgcagattggtgattgatttgccttacaaccaagcgagtgatttgaaatacaagcaactaaaatcagtattgattaaacaggcagggttatccgaatccataagattcacgggcttaagttaccctagcgcaagccagttggaatcaggcaaagctaaagacccagaagacagcattttagtgaaaatgcccgcttttcaagagttgcgtaaaacatttaaagaaggcttagaaaccgaatggcaaggtttagttaatgcggcaatggctggggatgccagcttgttagaccaaattgcttgggtgttgagtatttataaagaagatgacgaagtagagcgcgaattgaataaactcaacttgcctagtaaagacaaaatggtcgatgcgctgttaggggtgcgttttgacaaatttagtaatttatcccttaaggcgctctataagattgtgcctgtgatggaacaaggaaaacgttacgatgaagcgtgtattgaagcgggttatcatcacagcaaattggataaagatgatgaaaaagaaatttacctaccctcactatacgagcactttcgcggcaaagaaacacataatctcaacaaaatgttacttagcgaaagattggatagcaaaatacaagggggtataccacgaaaccctgtcgtacttcgtacgctgaaccaagcacgtaaagtgtgcaatgcactgataaaaaaatacggttcgccttatcaagtgaatattgaaatggcgcgagatttatctaaaccagcagacgagcgtaaaaaaattaaagatttgcaggatgaatttaggataaaaaatgaaaaagaccgtgcagcattcaattcagagtacaacagctcgggcgagttaaagggtcgtgattttgaaaaatggcaactttatcgggagcaaggtggtaagagtatttaccccgctatagatgaaaggcaggggatatgtgcatactcgctaaaacctattgatttgaacaggttgtttgaaaagggttacgtagagatagatcacgctttaccgtactcacgaagttttgacgatagcaaaaataaccgtgttcttgtattagctgatgaaaaccgaaacaaaggcaatcaaactccttatgagtatttagatggtaaaaataacagcgaaagatggcgattatttgtagcttttgtagagcaaaatagttcgtatcgccaagccaaacgtaatcgcttattgaagaaagacttgggtgaaaacgaagctaaagatatgcgagagcgtaatttgcaagatactcggtatatctgcaaattttttaaaaactacattgaacattttttaaagtttaaagatgaaagcgatgttaagcgttgcgttgtggtgagtggtagcttaacttcattgttgcgagctaaatgggggttaccaaatagcaaagaaaaaagagagaaaagtgaccgccatcatgctatggatgctgttgtggttgctgcatgcggtcattatgtggttaaacaactatcaactttcgtcaatcaaaacaattgggcacataggccagaccaaggtggttatgtaaatacggaaacaggtgagtttttgttcaccaaagactttgttaagttggatgatgtatccaagttatttccaacgccgtggaaaaattttcgtgatgatttattaaatcgtcttgagacagatgacttagctttattacgtaataatgcagaaaaactagagatatacaattcggatcaaattcagagtttaaaacctatatttgtatctcgtgccccacaacggcgtaatagtggagcgttgcataaagaaacaatttacggcagtgttcagagtcaggggcagattcaaccacaaagaattaagcgtaaggaagtagctagcctaaaagagactgacttaggtgacatcgttggggcgagtgaacccagaannnnnnnnnnnnnnnnnnnnnnnnnnnnnnnnnnnnnnnnnnnnnnnnnnnnnnnnnnnnnnnnnnnnnnnnnnnnnnnnnnnnnnnnnnnnnnnnnnnnnnnnnnnnnnnnnnnnnnnnnnnnnnnnnnnnnnnnnnnnnnnnnnnnnnnnnnnnnnnnnngaggggttaattaaatcattacgtttatggctaaaagcgcaaagcgaattaaagggattgatggctgagcttggcaaaggaaaagctaaaagagaacctacagaattggaaaaaaacgaaattgatagattaaggcaaccaccaagaaaaccgctcaaaagtgaccctgagaatggcccatttactgggccagaaataaaaaaagtaaaagtgcttgaaacaagtaaatcagcagtttttgtgcgcggaggccttgctgaattgggtggggtaattagtacaagagtttatcgttacaaagatgagttggtgtttcagccaaggtatgaagcttcttatgagaagttatttggagttgcagctataccacctgaggcagttttcactggtatcgaattgtatggaaaggaaattgtaaaaattcagcatccaaatttggcctattgctacaaacttgatcgtaggtattttgagaaggaaactggccaaacgctaattgatgtcataaaagccttcccaaatgatgaatttttgggttattggttatattttgagccttctaataaccgacctgtggtgagcctacacgataatagtgagtttttccttcttgaagcgaacaaaactccagatcaaaaatgttttacgttaattgagttggaaaagaaagatggtaacaaaacaacatacgagtatttggaaaaatcaccgcctttagaaagaaagccatttaaattttctttggagagggaaattaagaggcaaattgggtcagcaaaaacatttgaaaagttgaatgtagatgtgctgggtaatttgtttaacgaaaattagatattgatatggtctggcgtagcgtcgttatctcccaacctgccaagctcaagcgcgagcatttttcgctcgtcattgagcaaagccaatcggcacgggtgccgtttgaagatattgcggtgattgtgctcaataaccgcgagattacgattacgcatccagtgctttccgcttgtgccgagtatggcatcggcctctattccactggcgataaccatcaacccaatggtgtgtttttgccttttctaagccatggccgtgctacgcgtatgatgcgtttgcaacttaagttagataagccacaagctaaacgcgcttgggcagaaattgtgaaaagcaaaatcagtaatcaggccgtttgcttaaaaatggcttttttctccccccccccccccnnnnnnnnnnnnnnnnnnnnnnnnnnnnnnnnnnnnnnnnnnnnnnnnnnnnnnnnnnnnnnnnnnnnnnnnnnnnnnnnnnnnnnnnnnnnnnnnnnnnnnnnnnnnnnnnnnnnnnnnnnnnnnnnnnnnnnnnnnnnnnnnnnnnnnnnnnnnnnnnnnnnnnnnnnnnnnnnnnnaatggctttaccctcaccccagccctctcccaaagggcgagggagtgtcagcgttgcggatgttgaacggttagggtcttatgctagccgtgtgcgctctggcgatgtggagaatatggaggcgcaagccagcagttattattttccgcaactgtttggcaaaggctttcaccgtgcgcaagattgttgggtgaatgccgccctggattatggttatgccattattcgcggagccattaccagaggtttagtcgcacatggttttcagccaaatattggcttgtttcatcgtagcgaacaaaacgcttttaacctagccgatgatttgattgaaccctatcgtgcgctggtggatttgcatgtgtttagccatcttaacccacatgcgcctaaagatgcggaactcaccccaactgacaaagtggctttagtcgcactactcaatgtagatgttcgcatgccacgcggtaacacgagtgtgttgcatagcattgagcaagcagtcgaatccttagtgcgtttgtttgagggagcagacgaaacggtgctagaactacccacgctgattggtttgggtcagcacgagtttgaaatgtagatatttaaatcaacatgagccgcgagacgagacgttatatgcgcatggtggtgttttttgatttgcccgtcgtcaccaaagccgagcgccgcgcatatacggtattccgccgttttttactcaatgacnnnnnnnnnnnnnnnnnnnnnnnnnnnnnnnnnnnnnnnnnnnnnnnnnnnnnnnnnnnnnnnnnnnnnnnnnnnnnnnnnnnnnnnnnnnnnnnnnnnnnnnnnnnnnnnnnnnnnntttactcaatgacggctttgatatgattcaattttctgtctacggacgtatcttaaacggacgcgatgcagaagaaaaacatatgcaacgccttgtcgccaacctcccgcctgatggttctgtccgtgttttaacggtgacagaaaagcaatatgccagcatgaagctgcttgtggggctaccgctttttcaagaaaaagcggtgaaagcgaatcaaatgctgttgttctaatggcaatttaaaaaaacaaaaccgcgctaagtgtt

SEQ ID NO: 423 - DNA, 15107 bp, synthetic construct
  variation 7893..7934: note = n is a, c, g, or t
  variation 12020..12081: note = n is a, c, g, or t
  misc_feature 1..15107: note = Synthetic
  variation 8196..8252: note = n is a, c, g, or t
  source 1..15107: mol_type = other DNA
  variation 9464..9492: note = n is a, c, g, or t
gcatgaaaatgattaatgaggctttggcacggaacaaagataaaattgatcaaattttagctgaatatggcatccctactgtaccggtagttgacggcgataatgttttcaaaaaagactgataaattgttgtttttggatgacaccattttaaaaagctagtagaatcgcgaggttgtttgttagcagaatatcgtgaaaaaattgtgtcaaccaaacaaattttagttcgttaaatgagcatacgttgggcaatgcgcttagcatgaacaaaacgtagctcatttttgttatatagattaggagaaaacatgttaggcaataaagcatttaagtcaactttatttgttggtatgttgacattggctggacttacattagcattccaagcaaaagctgatgttaagtttgttacaacacaggatggctcaccattagaaattaaagcagatttgttcgataccccagaagctaaagaatttctaaaaacaggtaaaaatccatatattggtaatgaagaagcaatcaaaaaaggtaaaaaaatctttggtttatattcatgtacacaatgtcatggtccagatgcaaaaggtcaagttggtcctggtttgattggtccaacattccgttaccctaaagatgctacaaacaaaggtatgtttgaaacgatttggaatggtacaaacggcggtatgggcgctaaaggcttaggtttgatggatccatccgacccaacaaatggcttaaaaccagatgaagtactaaaagtcattgcttggattcgtagccacggtggcgttaacggtaacgaataatagatttttgtaaaaatatattaatatcaaaacggtcatgtaaaacatggccgttttttttgtgaaatttttaattaaagagtaaaatagggctagcgctaaattgcttattagcgagcatatttatagtacttttaaacctcggggggcgagtaatgaatgggttaaaactaagtgcaatcttattggtactggtagtaggagtagcaggttgcggcaaaaaagagtcagcaagtacaagcggagatgcagcgccagccgcatctgcaacaaaagcgattgagtttgtagatacacaggaaagtaagccattagtaattaatgcagctttgtttgatacacctgcagcaaaagaatttttagcgactggcaaaaatccctatattggtaatgaggaagcaattgctaagggcaaaaaagtatttcaaatgtactcatgtacgcagtgtcatggtccagaagctaaaggtcaggttggtcctggcttaactggccctacattccgttatcctaaagatgcaacaaataaaggcatgtttgaaactgtgtggcatggtactaatggaggaatgggtgctaagggtgttggcttaatggatcctacagatcctaaaaatggtattacaccagatgaactgctaaaaattatagcgtggattcgcagcatgagtaatggtttaactggcaacgaataatttgttgatagtgttgacgcgcttgctagattaggcaggcgcgtttttttttaaggactggaaattgagcgaagagaatcatttacatcatatcatcatcgtgggtggtggtgcaggaggcctagagttggctactaagcttggcgatagtcttggaaagaaacagaaggcgcttattacgttgattgattgtacacgtacacatgtgtggaagccattgttgcatgaaattgctgcaggcagcatggatccagaccgccatgagcttgaatatatagcacaagcacattggcatcatttccgttttcgtttgggacgcatggatgggttagaccgagcaaaacgggaagtcactatcacgccatacattgatgaagatggcagagaagtgattccaagacgcacttttaaatatgatactttagtcatggcggtaggaagtaccactaatgattttggtattaaaggtgcgcgcgagtactcgattgctttggatacacaggagcaggcgcaaaagtttcaccgttacttgcataatgcactattgcgagcacaaacacaggcagagccattgaagcctgggcaattagaagtggcgattgtaggcgctggtgccactggggttgagctggcagcagagttgcataacacaacacgtgaactagccgcttatggtttagataagatcgaccctgaccgtgatgtgaaaatatcattaatagaagctggtgatcgcatactgcctgcgctaccgcctaagatgtcgctggctgtagatgttgaactcagaaagctacgtgtaaacgtttttaccggagagcgtgtgactgaagtgtcagaaaaaggtattacgacacacagtggaaggtttattcctgcggaactagtagtttgggcggccggtattaaagcaccagattttttaaaagatatagacggcttagagaccaataggattaatcagttagtggtaacgcagaaattgcagacaactcgcgatggaaatatattcgcttttggtgattgtgccgcttgcccttggctgggtcatgatggaaatgtgcctccgcgtgcccaagcagcgcaccaacaggcatcactcttaatcaagagcattaaaaatagggtggcgaataaaacggactttccagagtaccattaccacgattatggatcactggtgaatcttgggcgttattctaccgtgggcagtttgatgggtgcgatttctggtggaagtatgtacattcaagggttgtttgcacgccttatgtatcgctcattatataaaatgcatttaatggcgctacatggtgtggtctcagtgctgattcatacattaggcaggttaatcgctagaagaacagagccacatgtgaaattgcactaagcttgaatttattgcttgaatctattgttggtatatttttttgtgatagattctgttaattaatcccatgcttaggatgacaaatacgccaaaagcaataatgattaagttgatagaaactgccgcttttaccatcaataggtaaaatcctagcatgatgagtatgccaatattctcattgaaattttgaacagcaatagagtgaccagcacctattaaatggtgcccttggtgttgtagcagcgcattaagcgggacgacaaaaaagccacctagtgcaccaataaaaaagagcaggattgcggcagccagccagtgactaataaaaatcataccgatgaccaatactcccatcaagattcctgctggtaacactttgacggaatcttcgagtttgatgtattttgatgcaattactgaaccaactgcaataccaagtgccacagtggccaccaattgagttgcctcttcaatattaaagtgtagagaaagtgccgcccatgtgagtactaccaacctcagtgtggcacctgccccccaaaataaggtggtaactgccagtgaaacttgtccaagggggtctttccacaacacaataaatgcatgccaaaagtctttaagtaggtacccaaagcttttgctttcaagtttaagttcgataggaagtttaggaataaaaagattaaagagtgctgcactgagatagagtcctgtaatgacgagcattgccatatgtggatcgctgctagatagtttaccgccaataatggcgcctgctatgatggcagtgacggtagagccttccatccagccatttgcagtgaccagttgattgcttggcaatagttctgtcagtatcccgtattttgctggggaataagccgcagcgcctatacctacaatgccgtatgcgtacaatggtggaaaaccaaaaatcatggctaggcagccgaagactttaatgaggttggagctaaacatgacactgccctttggaaaagcgtctgaaatagagccaacaaagggagcaagtaaaacgtaagaaaaaacaaaaaattgttgcaataatggggtatgccattcaggggcatgcatttcagaaagcaaggcaatcgctgcgaataacaaagcattatctgcaagtgcagataaaaactgtgcgatgagtatcgtataaaagcctggtttcatgatgcgccagacttaatcatcaaaagaataaccgtgactaacacgggttaaattcatcatgatttataacgcttcgccagcaaaatctgccaatcgagagcgttcgcctctgacaagtgtgatatgaccattatgctgccagcctttaaatcgatctactacataggttaagccagagctaccttcggtcaggtaaggtgtgtcaatctgtgcaatattgcctaagcaaaccaccttggtaccaggacccgcccgtgtaatgagtgttttcatttgtttaggcgtcaggttttgtgcttcatcaataatgagaaacttatgtagaaacgtacgaccgcgcataaagttgagagatttaactttaatgcgtgtgcggattaagtcttgggtagccgcacgtccccactcgcctgcatcttcatctgttttgtttaacacatctagattgtcttctaatgcacccatccatggcgccattttctcttcttcagtgcctggtaagaagccaatgtcttcgccaactggaacggtaacgcgcgtcataataatttcagaatagatttttttatccaatgtttgtgtaagtgctgcggcaagtgtgagtaatgttttacccgtacctgcttgaccaagcagcgttacaaaatcaatttctggatccatcaacaaatttagtgcgtagttctgttcccgatttcttgcaatgattccccagacattatgtttagggttggagtgatcttgcactatttctaatacagccgtgttatcttcaatttttctgacgatggcgtgaaatggcttatcaaactcatagtaaacgaactcgttgacgatgaacgtctttactaaaggacccgatattttgtaaaacatgcgtcctgcctcttgccaagactccatcgctttactgtgttgatcccagaaatcctgaggtaattcacgtacccccgtgtagagtaggtcactatcttctagtaccttgtcattaaaatagtcttccgctggtacgcccatggcacgcgctttaatgcggatattgatgtctttactgacaaggatgacttggcgttcaggctgacgatttttgaggtccaatactacgcctataatttgattgtcggctttactgcctgctaagccagggagctctttgatgacctgctgtgtttgtaaaaataaacggcccgtcaaatggcgattacccttgatggcaagtgggcagccttcctctaaattcacgaggtcagtgcccacaatttcttcaagatgtcgactcgcttgtctggcattgcgtgcaacttctgtgagcccttttttattgttgtctagctcttctaacgtcaccatcggaaggtaaatgtcatgctcttcaaatctaaaaagagaggagggatcatgcattaatacattggtatcaagcacaaatagtttagtggtttcaggtgaatttttgaccataataatgcgttatcgttataaagttttaataaatgctaatacttcattagcatgtccatccgcttttacaccgcgccattcgtgtattagcttgccttgctgattaatgatgaaagtactgcgctcaatgcctcttacttgtttgccatacatgtttttcattttaatcacgttgaacagtgtgcaggctaattcttcactgtcggagagcaattcaaaaggaaaactaaatttagctttgaagttttcgtgcgatttaatgctatcgcgtgagataccaacgatgtttgcattgagtgccagaaactctgaataagtatcgcggaactgcacgccctgtgtggtacaccctggtgtagagtctttaggatagaaataaacgaccagcagttttcctaaatagtcggagagtttgaaagttttgccagaggtcgcaaggagttcaaaatctgttacgggttggtttagcataatcttgttcgtattgatatgtgctcattgttctaaaaaaaaacaataaaggcaagttaattgttaattaaattttttcggtaaaaagacaagcattgtttaatgtgatgacgtgcgtgctggctattgaggtaatgcgattttgatgcatgtgccctgtggcttggaggcagaaaattcaatactcccccccaacacttcacatactttaaacgcaaacggaatgccaagccctgtaccaaaacgcttggtagaggggccgggactcagcgcgtgtgggtctggagtaaatggcatgccaacaccatgatcacggatgataatctccagcatggtgtctactttgtgcatgctcaaataaatgggcgcatccttaggtgaggcctctatcgcattcaaaatgaggttgtaaatcatttgttcaagcaagtgttcatctgtgatgatttcctcttctgcttggacttcgtctaagattaattgaatgtttttttctgatagtttttgtgtcaaaagactaattgcaccttggctcacattgcaaagttttacaggtttaagctgaggcttgattgggtttaggtaagccagtaatgcgccagtccagtgttccagtctatccaccgtgctgataatgccatgtagagattcacgcgtatcattatctagttcaggctggtcagtcacttgagcggtagcgcggatgctggcaagtggattgcgtatattatgcgccagcatgggcacaaggagtcccagcgctgcttgtttttctgtacgtaccaaggcatctctgctggaggaaagttcttccgccattttgttgatttctttggaaagtgtggctaactcttgtgcacctgtttctggtactttgtgttttaaatttccagcactcatttcttccgttgcgcgcatgatggcatgaatcgggttgacaatggattttttcagaaacctacgtgagagcaatagcaaaatgcctgcaagtaatactggaatacttaaaatggcaacagaagtcattttggcttcatgcaagcggcttttgagttcggcttgttttactttaagcaacacttctgcgcgttgagagacgttttcgtattgagaaaaaataccagtttcaatatctctatataaagatttttgggtactgctattcggttttgcctgatagcgatagaacagtgaaggtgcttcatttacaaatgtattatagtgctgctcgatttcatgaatcgcttttttttcctcatcaccttgcgcaatctgatgtaagtctgcaaagtgttttagaatactttgcgtgtatgcgttgtactcattcaatgcgtcgcgatcttccagaaaaaatgcatcaaacagctctttcatttgacggtataaatcacctcgtacttgataaatctcttgtactaacagattaatacgttcagattctttagaggctttgtcccaaatgtgaatgccataagcgccactgatgacagctaatagaatgagtgcaataaaggtgagctgatgtgaaagtagcaggtcgcgcagagactttggttggctggtatgcacagtctattcagacactaatttaaagtttaaagtcacagtgattgtatcaatgtggccgcgtaaaatatctggcataaattgtttcagttctgagcgtttaacagcctcaattgctgctttatctaaagattcatttccactggattccgccacagtcacatttgttacgttgccattatgatccagaccaatgtctaagcttacattaccttgaatgccacgctgttgtgctaatttcggataacgttgattgcgtttgagctcattttgtacttggttgcgatatgcatttcttgcnnnnnnnnnnnnnnnnnnnnnnnnnnnnnnnnnnnnnnnnnngcatcaccttctgaaggccctgtcactttaggaggctcaggcggaggtgggggaggtgccacaaatgctggtttgctttccacttttggtgagacagcaatcacttctggcggcgggggcgcagattccgatgtgggcgtaataggctcaggggcgatgactttctcaggctttacgatcggatccggttttattttttgtggaacaggttttggcttcacaggctcaggttgagaagtgacaggttttggtaattctggannnnnnnnnnnnnnnnnnnnnnnnnnnnnnnnnnnnnnnnnnnnnnnnnnnnnnnnnatcaattttaagctcttgatgtaaagttttaatcggatcaaatttagagtttggagtgataaacgctaacactagatgtaagagtgctgagcataacaatgccttgagcagccaactttcgtcctgagttgaaaatttaactaaagcttccaatgtaacttttaccgcaaaatgagcgaagcttttgattatactataagaaaaaatttaaacagaacatccgtgttgggtggttgctaccaaccgtaaattcaagattatgtcaaataatcccttcaaacaattgcacactaaccagcgtgtctggctcacagtgaccgacagattcgtctaatacaataaaacagttagcgttactcatgctacttaatacgccagaactttgattgccagtgagcgagactttccattctccttgcgcttcatgcaggatgccacgtagaaattcggtgcgcccgactgtcttctgaatggcgtgcgagcatctgacttttagcaggggtgttggtttgggagtgccgcccattaaagtaataagcgcttcacgcacaaactgataaaacgtgaccatggtagagacaggattgccaggcagcccaaaatagtgggcattgccaattttgccataagccagcgggcgacctggcttcatattaatcttccaaaataagacttgaccatgcttggccaacagagctttcatgtaatcggcctctcctacagaaactccgccactagtgatgaccacatcattttcattggcagcttttaaaagggttgtttctaatagctcaggtatatcagggatagcgcctaaatcatttactactacacctaatcaagtcagcatgccaaacaacgtataacgattgctatcgtaaatttgcccctctgccagtggcttgcctacgcttactaactcatcacctgtactaaagaaagcgactttaagtcggcgatagacgagtactttggcaatacctaatgatgcgattaagccaatatcggcagggtgcattaaatgacctttcgctaacacggtctgacctagacttaaatcttcacctgccaagcggatattggctcccagcttaggtatggacgtgatatttaacgcattattttcaacatgggtatgctcttgcatcaccaccgtatctgcacctaacggaatgactgcgcccgtcatgattttgacgcattctccattcnnnnnnnnnnnnnnnnnnnnnnnnnnnnngcattctccattcattatcttctctgcaaagggtctacctgcataagcggtgccgatgatacgtaacggctgagaggcttcagtatacttaaaagcatagccatccatggctgagttgtgatggttgggtacgttgcagggtgaaacaatgtcgcccgccaacacgcgccccaaactctcgtgcaaagacaaagattcggtttctgcaacagagtctaaaaactgttgaataaacgcgcgcgcttgttgcacagacattgcgttgggatcgtagttgtctatgcaacaaggattaagggcaatttcacttaaagtggttgagttgatcatttggcttgaaaaagctaactaattaatttataaaagatatttatgctaaagttaaagtagaaagcccagcactaggctgggcttggatacaggacactaagatttctcttaggcctttattgtagcaacggctctcaccccagatgaccacaatgaaataataataaggaaaataaatatgcaaagcaagaaaaactttggcaacttaacatttggctttgatattggtatagcttcggttggatgggcggtgttgaatgataagcgcatagtcgatttaggggtacggtgcttcgataaggccgagacagcgaaagaaggtgaatctttaaaccttgggaggcgtacagcgcgtttaatgcgtcgtcgcttacgtcgtcgcgcttggcgactgactaaattagcgcgtttgttaaaacgtgaaggcttaatccatgatgtgaatgtgttaaagcaaccgccagcaaaaggttttgcaacacccaatgtgtggcaattgcgtgtcgatgcgcttaaccgaaagcttacgtcagaagaatgggcgcgggtgatttatcacttgtgtaaacaccgtggttttcattgggtgagcaaagccgaaaagctcaaagatgaagaaggcgcttctgaaactggcaaagtgaaaaaaggcttggcaggcacaactaagcttatgaaagaaaaaggctatcgcacagcggctgaaatggtgttggcggagttccccgacgctcaacgcaataaacaaggcgagtattcaaaagcattagagcgtgaactattggacaaagagtttcaaactctttttgaagcacaacgcaattttggtaatccacatacatcaccagcattagaagagaaattacttaatcgcaaaacgggtttattttgggcgcaaaaaccatcgttgtctggtgaagcattgctcaagatgctaggcaagtgtacttttgaaaaatcagaataccgcgcgcctaaagccagctttaccgcagagcgtcatgtgtggctgacaaggctcaataatttgcgtttggtagtggatggcacaatgcgaccgctctcagaagatgaacgcagattggtgattgatttgccttacaaccaagcgagtgatttgaaatacaagcaactaaaatcagtattgattaaacaggcagggttatccgaatccataagattcacgggcttaagttaccctagcgcaagccagttggaatcaggcaaagctaaagacccagaagacagcattttagtgaaaatgcccgcttttcaagagttgcgtaaaacatttaaagaaggcttagaaaccgaatggcaaggtttagttaatgcggcaatggctggggatgccagcttgttagaccaaattgcttgggtgttgagtatttataaagaagatgacgaagtagagcgcgaattgaataaactcaacttgcctagtaaagacaaaatggtcgatgcgctgttaggggtgcgttttgacaaatttagtaatttatcccttaaggcgctctataagattgtgcctgtgatggaacaaggaaaacgttacgatgaagcgtgtattgaagcgggttatcatcacagcaaattggataaagatgatgaaaaagaaatttacctaccctcactatacgagcactttcgcggcaaagaaacacataatctcaacaaaatgttacttagcgaaagattggatagcaaaatacaagggggtataccacgaaaccctgtcgtacttcgtacgctgaaccaagcacgtaaagtgtgcaatgcactgataaaaaaatacggttcgccttatcaagtgaatattgaaatggcgcgagatttatctaaaccagcagacgagcgtaaaaaaattaaagatttgcaggatgaatttaggataaaaaatgaaaaagaccgtgcagcattcaattcagagtacaacagctcgggcgagttaaagggtcgtgattttgaaaaatggcaactttatcgggagcaaggtggtaagagtatttaccccgctatagatgaaaggcaggggatatgtgcatactcgctaaaacctattgatttgaacaggttgtttgaaaagggttacgtagagatagatcacgctttaccgtactcacgaagttttgacgatagcaaaaataaccgtgttcttgtattagctgatgaaaaccgaaacaaaggcaatcaaactnnnnnnnnnnnnnnnnnnnnnnnnnnnnnnnnnnnnnnnnnnnnnnnnnnnnnnnnnnnnnnacagcgaaagatggcgattatttgtagcttttgtagagcaaaatagttcgtatcgccaagccaaacgtaatcgcttattgaagaaagacttgggtgaaaacgaagctaaagatatgcgagagcgtaatttgcaagatactcggtatatctgcaaattttttaaaaactacattgaacattttttaaagtttaaagatgaaagcgatgttaagcgttgcgttgtggtgagtggtagcttaacttcattgttgcgagctaaatgggggttaccaaatagcaaagaaaaaagagagaaaagtgaccgccatcatgctatggatgctgttgtggttgctgcatgcggtcattatgtggttaaacaactatcaactttcgtcaatcaaaacaattgggcacataggccagaccaaggtggttatgtaaatacggaaacaggtgagtttttgttcaccaaagactttgttaagttggatgatgtatccaagttatttccaacgccgtggaaaaattttcgtgatgatttattaaatcgtcttgagacagatgacttagctttattacgtaataatgcagaaaaactagagatatacaattcggatcaaattcagagtttaaaacctatatttgtatctcgtgccccacaacggcgtaatagtggagcgttgcataaagaaacaatttacggcagtgttcagagtcaggggcagattcaaccacaaagaattaagcgtaaggaagtagctagcctaaaagagactgacttaggtgacatcgttggggcgagtgaacccagaaatgaggggttaattaaatcattacgtttatggctaaaagcgcaaagcgaattaaagggattgatggctgagcttggcaaaggaaaagctaaaagagaacctacagaattggaaaaaaacgaaattgatagattaaggcaaccaccaagaaaaccgctcaaaagtgaccctgagaatggcccatttactgggccagaaataaaaaaagtaaaagtgcttgaaacaagtaaatcagcagtttttgtgcgcggaggccttgctgaattgggtggggtaattagtacaagagtttatcgttacaaagatgagttggtgtttcagccaaggtatgaagcttcttatgagaagttatttggagttgcagctataccacctgaggcagttttcactggtatcgaattgtatggaaaggaaattgtaaaaattcagcatccaaatttggcctattgctacaaacttgatcgtaggtattttgagaaggaaactggccaaacgctaattgatgtcataaaagccttcccaaatgatgaatttttgggttattggttatattttgagccttctaataaccgacctgtggtgagcctacacgataatagtgagtttttccttcttgaagcgaacaaaactccagatcaaaaatgttttacgttaattgagttggaaaagaaagatggtaacaaaacaacatacgagtatttggaaaaatcaccgcctttagaaagaaagccatttaaattttctttggagagggaaattaagaggcaaattgggtcagcaaaaacatttgaaaagttgaatgtagatgtgctgggtaatttgtttaacgaaaattagatattgatatggtctggcgtagcgtcgttatctcccaacctgccaagctcaagcgcgagcatttttcgctcgtcattgagcaaagccaatcggcacgggtgccgtttgaagatattgcggtgattgtgctcaataaccgcgagattacgattacgcatccagtgctttccgcttgtgccgagtatggcatcggcctctattccactggcgataaccatcaacccaatggtgtgtttttgccttttctaagccatggccgtgctacgcgtatgatgcgtttgcaacttaagttagataagccacaagctaaacgcgcttgggcagaaattgtgaaaagcaaaatcagtaatcaggccgtttgcttaaaaatggcttttccctcaccccagccctctcccaaagggcgagggagtgtcagcgttgcggatgttgaacggttagggtcttatgctagccgtgtgcgctctggcgatgtggagaatatggaggcgcaagccagcagttattattttccgcaactgtttggcaaaggctttcaccgtgcgcaagattgttgggtgaatgccgccctggattatggttatgccattattcgcggagccattaccagaggtttagtcgcacatggttttcagccaaatattggcttgtttcatcgtagcgaacaaaacgcttttaacctagccgatgatttgattgaaccctatcgtgcgctggtggatttgcatgtgtttagccatcttaacccacatgcgcctaaagatgcggaactcaccccaactgacaaagtggctttagtcgcactacccaatgtagatgttcgcatgccacgcggtaacacgagtgtgttgcatagcattgagcaagcagtcgaatccttagtgcgtttgtttgagggagcagacgaaacggtgctagaactacccacgctgattggtttgggtcagcacgagtttgaaatgtagatatttaaatcaacatgagccgcgagacgagacgttatatgcgcatggtggtgttttttgatttgcccgtcgtcaccaaagccgagcgccgcgcatatacggtattccgccgttttttactcaatgacggctttgatatgattcaattttctgtctacggacgtatcttaaacggacgcgatgcagaagaaaaacatatgcagcgccttgtcgccaacctcccgcctgatggttctgtccgtgttttaacggtgacagaaaagcaatatgccagcatgaagctgcttgtggggctaccgctttttcaagaaaaagcggtgaaagcgaatcaaatgctgttgttctaatggcaatttaaaaaaacaaaaccgcgctaagtgttacctagtgcggtttctttgagagcgtattataagccatctggggtgag

SEQ ID NO: 424 - DNA, 14603 bp, synthetic construct
  source 1..14603: mol_type = other DNA
  misc_feature 1..14603: note = Synthetic
caccagaaaatctgctcccgatgtaatggctgttgtcgggtctgcaattcttttctgatcctgaacatcttgctcaccccaacgaattccaggggttacagtaataaaatcatgaccacaggcatgtttaactgcctttgcctcctgcacactgcaaaccacaccatccaaaccacattctttggataacaaagcgcgagtcactaccagctcttcagccagatcctcaggtaaagcttcgctggtgagcaccgtaactgcaatcaacttcatatccggaaacattgaagcagcatccgctgcccgcttcagcatatccggtcctccggcagcgtggacattaagcatttgaacccctaaaccaccggcgctctgcacagcctgcgcaaccgtattcgggatatcatgaaatttcagatcgagaaaaatcttattttgctcgcttagtttttttatcaaaaccggaccttcagcaacaaacaaacgcagtccaaccttaaaccagcccacatgtgaagagagattttgactgacatccaatgccagttgcgcattttcaacatccaaagctatcataagtcggtttttcatatattttcctgaactgccatttttcttacactgagatattatgaagattctcgaacaaacgacatggtaccccactcatggcattgtgggcattgccagcgcatatccaccacttttacaccacagtggccacaagtatatcgcttcatcgccagacgccatggtttagccgctgactttatagactgatcctcgcttatccctacagcggccaaacgcagtaaggagcggagattttctgtcgaataatttaacacatcatttttcagatgttttgctgcatccgcgccatgtgcaactgcaacatgttcaatcatcgtcaaagccaattcttcatcatgatgattattccagatcccgaccaaaacatcctggcaattaaattgatcgttgatcagtactggcacaaaaaccgcacagaattctccgattctttcagctatttccttgccgaatgtttgaacagtctctttgtcctgatccaacaccgcgattctaagtaaaatatcataggcatgaatacatgtccgattcacattcagagcttctccggccaacttttttgcctgctccaaatcagagctattcagtgcaagctcagccgtttcagcgataagataggatcgatgcaggcattcatcatcactctggattcgttcaattctggagagtaaagcttctgcttccaaccactcatgacttatttcgcgtatacgcaatgccgctttcagtgcaggaatatgagctgaatcaacatcaagaaccttttgataatgctttaatgccctgtctaacagacctccggtttgaaagtccttggccaaagcatattgagcttgaatataaactttttcagaagcatccggacgagccagtatattttgatgaatacgcacggctctgcctatctcgccgttcttacgaaacatttcgcccagcgacatatacacatcaacagcttccgaattaagccgggcgactttcaccatttcctgcaaagctcgatcgggctcttcagagagcaggaaattaataccgcgaagcaacggatacacgcggcgatcttccgaaacatctgactcttcctgcgcccggaactgtagccagtagaataccaccagcaccagcaacaggaatccgatcaggataagtaataaggtattcatatatagggtggcgagagctttataaaagcatcaaacatcatcttgcagggggatatttcgcaggttctcaacttccctcgataatcgatcattttcaacacgcaaataagcaatttcacgtttatgtttacgtctggaaaaactcaaggccattaacccgcctaaaaatccgacaaaaaaggccacgaacataggcatatacaagggtaactcacgactcgaaaaccccagaaaaaacaaccgaacctttgattcattggccagagcaaaggtcaatgaaaaagaggttagcaaaaaaagggcgatgagattaatccaattaatcatcccgggatgactcatacgtaacaaacgcgctttatagctacccgccatggcgcaccagccagatcgtattagcagttaccatccactttttcccgtaattccttacctggtttaaagtgtggtactactttagccggaacctggacagcctcaccagtttttggattacgaccaacgcgagcttcgcgttttttagtggtaaaacttccaaagccacgaagctccacacgttctccttctgacaaagccaggctgatggcatgaaagaattcattaatcacatactctgcctctttcgatgtcatatgcttgtggttagcaaccactttttcaaccagttcagattttgtcatggaacctccttttgcagttggtctgttaaccaaactgccccaccctatttcttcccgaagaatttcttctgtaattcaatagccaatgccgaaggagcctcttcttgcttcagttgcgatgcatactgttttactgcattacgctcttcatcatgttgcaattgtttgaccgacaactccacctgtcgacgttttttgttggcattaatcacttttgcttcaatttcatcgccaaccttaggttcatcctgttctctcggcagctctctttttgccagacgggcttccacaccttcagcaacttcaaccattaatgcaccggactggacagaaaccacctttcctttaacagatgcgcccaaccggaccccttccaggaaaacatcgaacggatcgttttccagttgtttgataccaagagacactcgttgtttggctatatccacaccaagcacaagacattccacttcctgattcttctcaaaatgcttaatagcctcatcgccggactcgctccatgagatattaccgatatgaaccaaaccatccagctcgtccgtcaactgcacaaagaagccgaattcagtcatgttcttgatttcacccttgatttttgaaccaacagggtgctcagaaagccaggactcccatggattgtcgataacgtctttcaagctcagacgaatgcggcgctccccctcggacatctccaatacggtcacgtccaccacatctccttccgtaagcacttctgcgggccgaatatcatgacgagtccaactcatttcagagcgatgaatcaagccctccacgccgggttccaactcaatcacagcaccaaaatcaagaatttttctcactgtacctgtcacgcgcataccagcttcatacgtagctgccacattaccccatgggtcttcctgcaaggctttcatggaaatcgaaaccttgcccttttcttcattcagcttaatcacctgagcatgaacgacctgccccacatgtaacatttcagaaggatgttctatccgtctccaggccacgtcagagacgtgcagcagtgcgtcaacgccacccaaatcaataaatgcgccaaaatcagaaagacgcttaactttacctgtaaccttctggttcacctttgttttctcaaaaaaagcgtggcgcaattcctgcaggttcaccaacaatggcttcttgcgtgataccacaatgttattttgtctgcgattactctccagcacaacaacgtcaaacggctcactagccaataactcataactcacatgcgaagaaacatctgcttcggagcgaggcataaatgcacccaaaccgttcaggtcaactttataaccacctttgacttcgccagttactgtcgcctgaagtatcagctctgacgcctgggcttcttcaatatcctgccaaagctgaaggcgacgaccttcaagaacagacaagcgaatctgaccatcggttgaaaccacaagtgcttcaacttcatcgccgattgaaggtaaatcctgatgagctgtcttgaattccagcgttggaataaggcattcattctttgtacccacatccacaacaacatcctgttcgcctacagcaacaacaacacagcgaacggattcgccttttttcatttgcgattgattggctaaagaagcctcaaacatttccgcaaaattttcttctgcagcagcagcttcattcacatgttccatggtcatagtttcacctgtttagtttatataaagagtattttaaaattatttgaaggcgtaccctattcgggtcacttcatactgccaagcatccatcagcaccaaagtaaaaaaaactgtttttattctgttaagtgggcctgatcaactgccgtcgatgtagaatcgccagcaacctgtccacgacctgatcaacgttaagcacagttgaatccacgaccagagcatcatcagctgccagcaatggcgcgcaacttcgctctgcatcccgcttatcccgctgctccagatcaaactgcacctgcgccatggaatccttatcacgcacatccattttatccttattgctcaactgcgcccaacgccgtcgcgcccgctcccgcactgaagctgtcagaaaaaacttagcctgcgcatccggtaacaccaccgtaccaatatcgcgcccatccatgatagcgccctgacttgcaacattgcgctgaacatcgagtaaagcagagcgaacggcaggcaaacttgccacctgagatgccattgcaccaacttcttcggagcgtaattcgctggtgcaaagctggccttcataatgaataccatcaacacaccactgcatatctgacatcagaccgggcaaagcggctattaccgccggctcatcactcaacagaacatgttccctgcttgcccgccaaccgacaaaacgatacaggagaccagtatccagaacagggagcccgagctcttcacccaggcgtttggcaatcgttcctttgccggagccggatggtccgtcaatagcaattttcagttgagaaattggttgccagtcaagcatcagctttccagccaggccacattcataccaataccttgtgccaattcgacaaaatcaggaaacgaggtggcaatagcggccgcattgcgaatctctatcggctgttcagcacattgcgctgccacagccatcgccatggcaatgcgatgatcaccccgggcatctatcacgcaaccgcccttcagtcttccaccagtaatttttgctccgtcagcagactcttcaatactggcaccagcacttctcaacgcctcagacatcacagcgattcgatcggattccttaacccgcagctcttcagcttcagtcaatacgaaatcaccacatgaaagtgcggcagcagcaaacaacaccggaaactcatcaatcgcatcaggcacatctgccggattcacatgggtaccactgagtgggcgatatgcaatctcgacatccgctacaggctcctgccccacatgcctctggctctgtttttggatgcctgcctgcatctgttccagaatgcggaatcctccatcgcgtcgaacattcatgccgatgttcttcatactaatctttgaccctttcaccaaagaagctgctacagcaaaaaacatcgccgacgacggatcagccgggatatgaaccgtcttctctggtgcagtcagtattccggcaggtttcagatgaatcacaccatccgcatccacttctacttcctgaccgaataacggcatcattcgttcggtatggtcacgggtcggacgtggctcctgtacagttgtctcaccttttgcaaacaatccggccagcaacacacacgatttaatctgagcactggcaacagctgagacatgcgcaattccctgcaaatctccacccttcaccgtcagtggcaggcaatctccctcttgttcgcccgcaatcgttgctcccatgcgaagcatcggatcaaccacacgtttcatcggtcgattcttcagcgattcatcacccgttaaggtactggaaaaggactgaccagccagaatacccagcatcaatcttgcgcatgttccggaattacctgcatcgagcatctgctcaggctgtgttaaaccatacaatcccacgccttcaatctgcaaggccgttttttcggcattcttccacagaacttttgctcccatctgctcaaacatggctaccgttgccagattatcttcaccgggcaaaaaaccttcaatatgggttattccatcggcaagcgaagccagcatcaccgagcgatgcgacatcgatttatcacccggaatcgtcaattcacctgataacggcccttgtgcaggtccggcaatgagtgttccaccaatatccacaatatatccttatttgtaactattcatcttacccgtcttttggctgcatattgctgcatattgctgcatattgctgcatattgctgcatattgctgcatattgctgcatattgctcacatgcaggaaatatactgcacgctttttccttgcctgtgaataaattacgagcaatctgaatagttacccttgttttacatttgactcgatttaacccacgcatctctgcgggttttagcatctgaaaatatcttcagcagagcttctccatcacccgtttcaagggaatgacggatttcctgaagcgccccctggtaagcatccattttattaagaacagcttcccggttattcaatgcaatatcacgccacatttccggcgatgatgatgcaatgcgggtaaaatctcgaaatccaccggcggcaaaatcaaacggatcatatgcccctttctgcttttcggcttcccgactgatagcatagaccaaagcataagccgccacatgcggcaaatggctgacaccggccaaaaatgcatcatgttgactggcatccattttcagcacccggcttcccgccacttgccagatatgctctaccacatccaatgcttgagggtcagtgtgttcttccggtgttaatatacacaagcggttctcaaacaggctttcaaatgatgcatcaaccccggactgctccgtacctgccagcggatgagcaggaacaaagcgttgaaaaccagccaactgttgccgcgccacctgaatagctgattgtttagtgcttcccgcatcaaatacaatctgctcagaaagaaccgttttcatggccgagaatacgccggcatacgctcccatcggcaccgccacacataccagatcggcctctttcacagcctcttcaatgtgctgcgtccaactgtcaaccacacccagttccaaagcacgtttcagattagcttcacctcgaccgacaccaataaccctgccaatagatcccttagcccgtagcactctggccagcgaaccgccaatcagtccgacaccaatcaccgccagcgtcatttcagacagttttttcacgctgcaactgccaccagaaacgcatccagcgtcttgaggaacacttcattttccgaatccagcccgacactgatccgcagcacatccggcatcccatatggagccagtggacgggggatcacgcctctgctctctagccactcggtaagctctttggctgcttcgtgtttcagcaagacaaaattcccgcaactgacaccacccaaaactccccgctgctgcaaagccttttcaagcaccgctcgttgttcattcatcagctgcacgtgctgcatcacccaactttgatcgtccagagccgccaatgcagcctcctgagccagcagattcacattaaatggctcacgaaaacggtttaccagcgatgcaatctccggtgccatcacggcatatcccaaacgcagaccagccaaaccataggccttggagaaagtacgcgaaataatcagtcccggatgctgtaaaacatgcaccgtatctcccagaatatctgaaacaaattcataataagcctcatcgagcagcacaatcacctgacgtggtaactgatcgagaaaggcctgcaatgaagccgtatcatgcatagttccggttggattgttcggattggcgatacacaccagctttgtacactcattcacagccgctgccatagcctgcaaatcgtgtgtcagtccatcagcctcagctaccgccaccggattggctcccgccgcctgagctgccaatgcatagacaataaagccacgctgactgaatacaacatcatcacccgccccggcaaaggtgcgaatgatcaactcaagcacttcatttgagccattacccagcaccagcgtgttttcattcacctgatgaaatgttgccagcgcttttctaagtttactgcaattgccatccggataacggtgagcctgcgtcgcggctttttgcatcgcagccaccgcttttggcggaacgccataaggattttcattcgaagcaagtttaaccgctgtactgatgcctttctcgcgcaacaattgttcaatgggtttacccggaatataggggtgtaaacgggccgattgaacgaccgcctgagcctgccagtcaattttatctgaaagatttgaacaatccgtcacagtgatgcctcgatgaacaatgatttataattttttggatacaggataggaaccgagaattttaactgtcgcaccaaacttctctaattcagacagtgcttcggccacatgactttcatcccgatggccaagaatatcaataaaaaacaagtattcccaaagcttcttcttggaaggacgggactcaatacgggttaatccgatctgacgctcggcaaaagcagcaagcaagcgattcagtgcccccggctcatctttgaccaacagcaccagagctgttttatcctcgccagaagctggcgaatcgtgtttgccaataacataaaagcgtgtcgtattctggtgatggtcttcgatatttcgcagcattaatggaatatcgacatgatctacaatggtgtagggaccaatggcagccgcgtgttgccagtcgagcgtaccgatttgctcatcttttgcctgcttgatcatttcagcggcatgcacggtggaagtagcttccagcaatgtggcgtccggtaaattattttgcagccaattccggcattgccccaagggttgcggatgtgacaccaccaaacgaatatcattcaatgcattggcataactgaataaatgatgctggatcgacaattgcacttccgcacaaatctgaatatcccgatccatctcagccagcaaatccagcgccggtgccacagcaccttcataggcattttcaaccggtaccacggcataagtcgcccgaccggactccacagcatcaaaaacctgttcaaaattcttgcatggcaggtattgcgccgttgcaccgaactggcgagttgccgctgtatgtgaaaatgttccttcagggcccagataagcaatcatcatcggatgttccagagccagacaggcaccgataatctctctgtaaataccatgaatagctgcatcaggaattttagacatatgcgaacgttgcgcttctgctgtattacgcacgagtaatcttcgaatgatttttgcttctctgctcggcacataaaaaggtgaatcgccgttggaaattttacgctcacctactgtcgaggccagcgcagcccggcgatgaatcagagccaatatttcatcatccactgcatcaatagcctcgcgcaaggcatccaggtccatttgaccaaacgggttttccgggtgattcatcatgctggcgagcctatcagcaggcaaagggctaatccatattcagctaacccgaaaagttcaggtgtaaaataacattggaataagtttgagcttaagcaaattgcttggtattgtccttgtcgtagaaagactattgaaatcattaataaaaaagcccggcaggtatgcctgccgggcggatacagagtctttcgactctttattgtagtaacggttctcaccccggatagctacaaagaagcgaaaatatggaggggaagatgatgaccgtcaagcctgaaaacattaacaaagaaaaccccattacatttggccttgatattggcatagcctcggtgggctgggcagtccttggtgaaaacaggatcattgatctgggcgtgcgctgttttgataaggcggaaacagccaaagaaggcgaatctctcaacctctcccgtcgcatggcaagactgatgcgccgccgcttgcgacgaagggcttggcggctgaccaagctggtcaatctactgaagcgtgaaggcttgattgaagatgtgaatgtactcaagcagcaacccttcaaaggatttcagacaccgaatctctggcagctaagggttaacggattggatcgaaagctgggcaatgaagaatgggcacgggttatttatcacctgtgcaaacatcgtggttttcactggatcagcaaggccgaagccaaagcagcagatagtgataaggagggtggcaaggtcaaacagggattggctggcacgaagcggctgatgcaagagaaaagctaccgcactgctgctgagatggtattggctgaatttcctgatgcacagcgtaataagcagggtgaatatagtaaagcgctttcccgtgaactgctttgcgaagagatgaaagagttgttcaagcaacagcgcgcattcggtaatgcccatgcagacgaaaagctggaagcagccattctcggaaatagcgataaaaagagcggtctgttctgggcgcagaagccatcgctctccggtgaagctctactcaaaatgctcggcaaatgcacctttgaaaaaaatgaataccgagcagccaaagccagttttacagtcgagcgccatgtgctgctaacgcgcatcaataacctgcgcattgtcgaggatggaaagattcgcggtctgactgccgatgagcagcgcatcgcgctttggcaaccgtaccaacaagccggagatttcaaatataaacagcttggcagcgccttggttaaagccggataccttgtcaaagacggatataaattcgcaggtctcgcctatcccagtgaagtccagaaagctgaaaaagccaaagaccctgaagatacggtactggtaaaactccctgcatggcagatgctcaagaaaacattgaaagatgccggattggagagtgattggcaggagatggcagaccacgcgctcaatggtaagcctgatcttcttgatcagatcggttgggtgctttctgtgtacaaagaggaggatgaggtcgaacgcgagctgggcaaacttcagctttcaacacaagttgtcgaagcactgcaaaccgttcgattcgataagtttagcaacctttcactcgcagctcttcgcaaaatcatcccccacatggaaaacggcatgcgctacgacgaggcatgtgtggaagcgggctaccaccacagtctgccggatttggaagatgataaagcgaaggaaaaatatctcccctccttctatgccggacgtgataaagaaggtcgcctgatattcaacgaggagatggatattccacggaaccccgtggtgctgcgcgctttgaatcaaacaagaaaggtggtcaatgcgttgatccacaagttcggctcgccgcactctgttcatatcgaaatggctcgggatttatcgaagccgtttgatgagcggagaaagattgagcgtgatcaacttgaatatcgctctcgaaacgaatctgatagagcaacctttgctggtcactttaatatcatgggacgccccaaaggccgagactttgagaagtggcaactctatcgggaacaacaaggcaaatgcgcttattcgctcgatccgattgatctgaatcgcctgcttgagaaaggctatgtcgaagttgaccacgccctcccctactcgcgcagctttgacgatagcaagaacaatcgtgtgctggtgctgacacgcgaaaaccgcaataaaggcaatcaaaccccatatgaatatcttgatggcaagggcaatagtgaccgatggttgcagttcgagagttttgttaaaacaaacaaagcatacaggcaggccaaacaaaatcgcttgttgaaaaaggattttggcgagaaagagacgcgcgatttccgagagcgaaatctgaacgacacccgctatatctgccgcttcttcaagaactatgtggagcaatatctgcaactgcatgaagagagtgatgccaaacggtgtgtggtggtcagtggtcagctcaccacgctgcttcgcgtccgctggggcttgctcaaagtacgaggtgatagtgaccgtcatcatgcgctggatgcagcagtggttgcggcatgtagtcatggcatggttaagcgcatgtcagattatgctcaacgaaaggagcttggacaggttcgtgatcgtatcgaaaaggtcgataccaaaaccggagaaattcttgatcattttccaagcccatggccgcacttccgcgatgagcttttatcaagattgaaccttgatgatccagccgcactgcacgcagcagtggaaagactggaaacctatcctcccgaagcactggaaagtattaaaccgctctttgtctcccgtgctccgcaacggcgtaatagtggggcggcgcataaagagactatctacgcacagcccgaagcactgaaggagaagggaagcgttacacaaaaagtggctgtgaccaatctgaagcctgccgatgtggataagctggttgatcctgaacgcaacgtgaaactttatagctatctgcgcaaatggttggaaggcaaagaagaacgggagaagcaggccaaagccattgaggcaagtgcaggaagaggaaaagagaggcgcgagctaacagcggaagagaagtcagaaattgagaagctacgcgccctgccacgcaagccggataagcaggggaaccccaccggcccgattgttcgcactgtcacaatggtgattggtaagctctccggtattccggtacgtggcggcattgccaagaatgactccatgcttcgcgtggatctgttccgtcataaaaccaacggtaaatttcatctggttcctgtctatgttcatcataccgtttcgaaattactgcctaatcgggcaatagtgcaatcaaaggatgaagaggagtggacagagatggatgataatttcgagtttctctattcgcttcatcccaatgatttggtgcagatcagtcaaaagaagaaagaatcaataatgggatattactcaggctgtgatcgagcaacagggaatttagctgtttggtcacatgatcgtaaccagcaggttggtaaagatggtttaattcgaggcattggaatcaagacagctcagaatgttgagaagtttaatgtcgatgttcttggcaatatttatccggcactgccagagactcggcgtgagctggcgtagcgttgtcatctcgcgccctgcacggttgcagcgcgacaagttttcgctgctgattgagcaggagcaatcggcgcgggttcctttcgaggatattgccatcattgtactcaatcatcgtgagatcaccttgacgcatccggtgctctcagcctgcggcgaatatggcatcagcatgtttgccacaggcgatacacatcatcccaatggggtgtttcccccttatctccagcactcacgggcaacacggatgctgcgcaagcaacttgccgctcccaagcccttgatcaaacagacatgggcagccattattcggcagaagattatcaatcaaggcctttgccttgaactgaccgcatcagcaggcggcgaacaaatggcatcgtttgccctacaggttcgctccggcgattcaaccatgatggagagtcaggcagcggcattccactttgcccggctctttggttgtaaattcggtcgcagtcagttgacctggacaaatgctgcgctgaattacggttatgcaatcttacgtggagccattgcacgagggcttgttgcacacggatttttcccatctattggactttttcattccagcgaacaaaacgcgttcaatctagccgacgacatcattgaaccattccgccccgtaattgatttacacgttgccactcatcgtagcgaagacacagctgacctgctgccaatcgataaggtggaactggtagcattgctcaatgccgatatacagatgccacgtggtaccatgtcggtgctatctgctatcgaacaaagcattgaaagtgtggcaagggttctggatcaaggacatgataaattacttgagttaccaacactcatcggattagatcaacaccagcgcgaatgctagtgccgacattccgcacccttaaaagcatgttttttatttatggaaataggtcgaaataatactattaaaatgatgttaaactactgatatatatgatatatttactgtttctcaggaggtggtaaatggccatggaagtatcaaccggatcaatgatgtcgagcatcgaaagcaaagaattaaatcatctggggcttgttgccgggatgtatgatgaacttgggataggcaagagtatcgatgcccttattccgcaggatatgaaacagcgaaatatctcca

SEQ ID NO: 425 - DNA, 14407 bp, synthetic construct
  variation 10015..10089: note = n is a, c, g, or t
  variation 7820..7894: note = n is a, c, g, or t
  source 1..14407: mol_type = other DNA
  misc_feature 1..14407: note = Synthetic
  variation 12149..12251: note = n is a, c, g, or t
gatcctcaggtaaagcttcgctggtgagcaccgtaactgcaatcaacttcatatccggaaacattgaagcagcatccgctgcccgcttcagcatatccggtcctccggcagcgtggacattaagcatttgaacccctaaaccaccggcgctctgcacagcctgcgcaaccgtattcgggatatcatgaaatttcagatcgagaaaaatcttattttgctcgcttagtttttttatcaaaaccggaccttcagcaacaaacaaacgcagtccaaccttaaaccagcccacatgtgaagagagattttgactgacatccaatgccagttgcgcattttcaacatccaaagctatcataagtcggtttttcatatattttcctgaactgccatttttcttacactgagatattatgaagattctcgaacaaacgacatggtaccccactcatggcattgtgggcattgccagcgcatatccaccacttttacaccacagtggccacaagtatatcgcttcatcgccagacgccatggtttagccgctgactttatagactgatcctcgcttatccctacagcggccaaacgcagtaaggagcggagattttctgtcgaataatttaacacatcatttttcagatgttttgctgcatccgcgccatgtgcaactgcaacatgttcaatcatcgtcaaagccaattcttcatcatgatgattattccagatcccgaccaaaacatcctggcaattaaattgatcgttgatcagtactggcacaaaaaccgcacagaattctccgattctttcagctatttccttgccgaatgtttgaacagtctctttgtcctgatccaacaccgcgattctaagtaaaatatcataggcatgaatacatgtccgattcacattcagagcttctccggccaacttttttgcctgctccaaatcagagctattcagtgcaagctcagccgtttcagcgataagataggatcgatgcaggcattcatcatcactctggattcgttcaattctggagagtaaagcttctgcttccaaccactcatgacttatttcgcgtatacgcaatgccgctttcagtgcaggaatatgagctgaatcaacatcaagaaccttttgataatgctttaatgccctgtctaacagacctccggtttgaaagtccttggccaaagcatattgagcttgaatataaactttttcagaagcatccggacgagccagtatattttgatgaatacgcacggctctgcctatctcgccgttcttacgaaacatttcgcccagcgacatatacacatcaacagcttccgaattaagccgggcgactttcaccatttcctgcaaagctcgatcgggctcttcagagagcaggaaattaataccgcgaagcaacggatacacgcggcgatcttccgaaacatctgactcttcctgcgcccggaactgtagccagtagaataccaccagcaccagcaacaggaatccgatcaggataagtaataaggtattcatatatagggtggcgagagctttataaaagcatcaaacatcatcttgcagggggatatttcgcaggttctcaacttccctcgataatcgatcattttcaacacgcaaataagcaatttcacgtttatgtttacgtctggaaaaactcaaggccattaacccgcctaaaaatccgacaaaaaaggccacgaacataggcatatacaagggtaactcacgactcgaaaaccccagaaaaaacaaccgaacctttgattcattggccagagcaaaggtcaatgaaaaagaggttagcaaaaaaagggcgatgagattaatccaattaatcatcccgggatgactcatacgtaacaaacgcgctttatagctacccgccatggcgcaccagccagatcgtattagcagttaccatccactttttcccgtaattccttacctggtttaaagtgtggtactactttagccggaacctggacagcctcaccagtttttggattacgaccaacgcgagcttcgcgttttttagtggtaaaacttccaaagccacgaagctccacacgttctccttctgacaaagccaggctgatggcatgaaagaattcattaatcacatactctgcctctttcgatgtcatatgcttgtggttagcaaccactttttcaaccagttcagattttgtcatggaacctccttttgcagttggtctgttaaccaaactgccccaccctatttcttcccgaagaatttcttctgtaattcaatagccaatgccgaaggagcctcttcttgcttcagttgcgatgcatactgttttactgcattacgctcttcatcatgttgcaattgtttgaccgacaactccacctgtcgacgttttttgttggcattaatcacttttgcttcaatttcatcgccaaccttaggttcatcctgttctctcggcagctctctttttgccagacgggcttccacaccttcagcaacttcaaccattaatgcaccggactggacagaaaccacctttcctttaacagatgcgcccaaccggaccccttccaggaaaacatcgaacggatcgttttccagttgtttgataccaagagacactcgttgtttggctatatccacaccaagcacaagacattccacttcctgattcttctcaaaatgcttaatagcctcatcgccggactcgctccatgagatattaccgatatgaaccaaaccatccagctcgtccgtcaactgcacaaagaagccgaattcagtcatgttcttgatttcacccttgatttttgaaccaacagggtgctcagaaagccaggactcccatggattgtcgataacgtctttcaagctcagacgaatgcggcgctccccctcggacatctccaatacggtcacgtccaccacatctccttccgtaagcacttctgcgggccgaatatcatgacgagtccaactcatttcagagcgatgaatcaagccctccacgccgggttccaactcaatcacagcaccaaaatcaagaatttttctcactgtacctgtcacgcgcataccagcttcatacgtagctgccacattaccccatgggtcttcctgcaaggctttcatggaaatcgaaaccttgcccttttcttcattcagcttaatcacctgagcatgaacgacctgccccacatgtaacatttcagaaggatgttctatccgtctccaggccacgtcagagacgtgcagcagtgcgtcaacgccacccaaatcaataaatgcgccaaaatcagaaagacgcttaactttacctgtaaccttctggttcacctttgttttctcaaaaaaagcgtggcgcaattcctgcaggttcaccaacaatggcttcttgcgtgataccacaatgttattttgtctgcgattactctccagcacaacaacgtcaaacggctcactagccaataactcataactcacatgcgaagaaacatctgcttcggagcgaggcataaatgcacccaaaccgttcaggtcaactttataaccacctttgacttcgccagttactgtcgcctgaagtatcagctctgacgcctgggcttcttcaatatcctgccaaagctgaaggcgacgaccttcaagaacagacaagcgaatctgaccatcggttgaaaccacaagtgcttcaacttcatcgccgattgaaggtaaatcctgatgagctgtcttgaattccagcgttggaataaggcattcattctttgtacccacatccacaacaacatcctgttcgcctacagcaacaacaacacagcgaacggattcgccttttttcatttgcgattgattggctaaagaagcctcaaacatttccgcaaaattttcttctgcagcagcagcttcattcacatgttccatggtcatagtttcacctgtttagtttatataaagagtattttaaaattatttgaaggcgtaccctattcgggtcacttcatactgccaagcatccatcagcaccaaagtaaaaaaaactgtttttattctgttaagtgggcctgatcaactgccgtcgatgtagaatcgccagcaacctgtccacgacctgatcaacgttaagcacagttgaatccacgaccagagcatcatcagctgccagcaatggcgcgcaacttcgctctgcatcccgcttatcccgctgctccagatcaaactgcacctgcgccatggaatccttatcacgcacatccattttatccttattgctcaactgcgcccaacgccgtcgcgcccgctcccgcactgaagctgtcagaaaaaacttagcctgcgcatccggtaacaccaccgtaccaatatcgcgcccatccatgatagcgccctgacttgcaacattgcgctgaacatcgagtaaagcagagcgaacggcaggcaaacttgccacctgagatgccattgcaccaacttcttcggagcgtaattcgctggtgcaaagctggccttcataatgaataccatcaacacaccactgcatatctgacatcagaccgggcaaagcggctattaccgccggctcatcactcaacagaacatgttccctgcttgcccgccaaccgacaaaacgatacaggagaccagtatccagaacagggagcccgagctcttcacccaggcgtttggcaatcgttcctttgccggagccggatggtccgtcaatagcaattttcagttgagaaattggttgccagtcaagcatcagctttccagccaggccacattcataccaataccttgtgccaattcgacaaaatcaggaaacgaggtggcaatagcggccgcattgcgaatctctatcggctgttcagcacattgcgctgccacagccatcgccatggcaatgcgatgatcaccccgggcatctatcacgcaaccgcccttcagtcttccaccagtaatttttgctccgtcagcagactcttcaatactggcaccagcacttctcaacgcctcagacatcacagcgattcgatcggattccttaacccgcagctcttcagcttcagtcaatacgaaatcaccacatgaaagtgcggcagcagcaaacaacaccggaaactcatcaatcgcatcaggcacatctgccggattcacatgggtaccactgagtgggcgatatgcaatctcgacatccgctacaggctcctgccccacatgcctctggctctgtttttggatgcctgcctgcatctgttccagaatgcggaatcctccatcgcgtcgaacattcatgccgatgttcttcatactaatctttgaccctttcaccaaagaagctgctacagcaaaaaacatcgccgacgacggatcagccgggatatgaaccgtcttctctggtgcagtcagtattccggcaggtttcagatgaatcacaccatccgcatccacttctacttcctgaccgaataacggcatcattcgttcggtatggtcacgggtcggacgtggctcctgtacagttgtctcaccttttgcaaacaatccggccagcaacacacacgatttaatctgagcactggcaacagctgagacatgcgcaattccctgcaaatctccacccttcaccgtcagtggcaggcaatctccctcttgttcgcccgcaatcgttgctcccatgcgaagcatcggatcaaccacacgtttcatcggtcgattcttcagcgattcatcacccgttaaggtactggaaaaggactgaccagccagaatacccagcatcaatcttgcgcatgttccggaattacctgcatcgagcatctgctcaggctgtgttaaaccatacaatcccacgccttcaatctgcaaggccgttttttcggcattcttccacagaacttttgctcccatctgctcaaacatggctaccgttgccagattatcttcaccgggcaaaaaaccttcaatatgggttattccatcggcaagcgaagccagcatcaccgagcgatgcgacatcgatttatcacccggaatcgtcaattcacctgataacggcccttgtgcaggtccggcaatgagtgttccaccaatatccacaatatatccttatttgtaactattcatcttacccgtcttttggctgcatattgctgcatattgctgcatattgctgcatattgctgcatattgctgcatattgctgcatattgctcacatgcaggaaatatactgcacgctttttccttgcctgtgaataaattacgagcaatctgaatagttacccttgttttacatttgactcgatttaacccacgcatctctgcgggttttagcatctgaaaatatcttcagcagagcttctccatcacccgtttcaagggaatgacggatttcctgaagcgccccctggtaagcatccattttattaagaacagcttcccggttattcaatgcaatatcacgccacatttccggcgatgatgatgcaatgcgggtaaaatctcgaaatccaccggcggcaaaatcaaacggatcatatgcccctttctgcttttcggcttcccgactgatagcatagaccaaagcataagccgccacatgcggcaaatggctgacaccggccaaaaatgcatcatgttgactggcatccattttcagcacccggcttcccgccacttgccagatatgctctaccacatccaatgcttgagggtcagtgtgttcttccggtgttaatatacacaagcggttctcaaacaggctttcaaatgatgcatcaaccccggactgctccgtacctgccagcggatgagcaggaacaaagcgttgaaaaccagccaactgttgccgcgccacctgaatagctgattgtttagtgcttcccgcatcaaatacaatctgctcagaaagaaccgttttcatggccgagaatacgccggcatacgctcccatcggcaccgccacacataccagatcggcctctttcacagcctcttcaatgtgctgcgtccaactgtcaaccacacccagttccaaagcacgtttcagattagcttcacctcgaccgacaccaataaccctgccaatagatcccttagcccgtagcactctggccagcgaaccgccaatcagtccgacaccaatcaccgccagcgtcatttcagacagttttttcacgctgcaactgccaccagaaacgcatccagcgtcttgaggaacacttcattttccgaatccagcccgacactgatccgcagcacatccggcatcccatatggagccagtggacgggggatcacgcctctgctctctagccactcggtaagctctttggctgcttcgtgtttcagcaagacaaaattcccgcaactgacaccacccaaaactccccgctgctgcaaagccttttcaagcaccgctcgttgttcattcatcagctgcacgtgctgcatcacccaactttgatcgtccagagccgccaatgcagcctcctgagccagcagattcacattaaatggctcacgaaaacggtttaccagcgatgcaatctccggtgccatcacggcatatcccaaacgcagaccagccaaaccataggccttggagaaagtacgcgaaataatcagtcccggatgctgtaaaacatgcaccgtatctcccagaatatctgaaacaaattcataataagcctcatcgagcagcacaatcacctgacgtggtaactgatcgagaaaggcctgcaatgaagccgtatcatgcatagttccggttggattgttcggattggcgatacacaccnnnnnnnnnnnnnnnnnnnnnnnnnnnnnnnnnnnnnnnnnnnnnnnnnnnnnnnnnnnnnnnnnnnnnnnnnnncggattggcgatacacaccagctttgtacactcattcacagccgctgccatagcctgcaaatcgtgtgtcagtccatcagcctcagctaccgccaccggattggctcccgccgcctgagctgccaatgcatagacaataaagccacgctgactgaatacaacatcatcacccgccccggcaaaggtgcgaatgatcaactcaagcacttcatttgagccattacccagcaccagcgtgttttcattcacctgatgaaatgttgccagcgcttttctaagtttactgcaattgccatccggataacggtgagcctgcgtcgcggctttttgcatcgcagccaccgcttttggcggaacgccataaggattttcattcgaagcaagtttaaccgctgtactgatgcctttctcgcgcaacaattgttcaatgggtttacccggaatataggggtgtaaacgggccgattgaacgaccgcctgagcctgccagtcaattttatctgaaagatttgaacaatccgtcacagtgatgcctcgatgaacaatgatttataattttttggatacaggataggaaccgagaattttaactgtcgcaccaaacttctctaattcagacagtgcttcggccacatgactttcatcccgatggccaagaatatcaataaaaaacaagtattcccaaagcttcttcttggaaggacgggactcaatacgggttaatccgatctgacgctcggcaaaagcagcaagcaagcgattcagtgcccccggctcatctttgaccaacagcaccagagctgttttatcctcgccagaagctggcgaatcgtgtttgccaataacataaaagcgtgtcgtattctggtgatggtcttcgatatttcgcagcattaatggaatatcgacatgatctacaatggtgtagggaccaatggcagccgcgtgttgccagtcgagcgtaccgatttgctcatcttttgcctgcttgatcatttcagcggcatgcacggtggaagtagcttccagcaatgtggcgtccggtaaattattttgcagccaattccggcattgccccaagggttgcggatgtgacaccaccaaacgaatatcattcaatgcattggcataactgaataaatgatgctggatcgacaattgcacttccgcacaaatctgaatatcccgatccatctcagccagcaaatccagcgccggtgccacagcaccttcataggcattttcaaccggtaccacggcataagtcgcccgaccggactccacagcatcaaaaacctgttcaaaattcttgcatggcaggtattgcgccgttgcaccgaactggcgagttgccgctgtatgtgaaaatgttccttcagggcccagataagcaatcatcatcggatgttccagagccagacaggcaccgataatctctctgtaaataccatgaatagctgcatcaggaattttagacatatgcgaacgttgcgcttctgctgtattacgcacgagtaatcttcgaatgatttttgcttctctgctcggcacataaaaaggtgaatcgccgttggaaattttacgctcacctactgtcgaggccagcgcagcccggcgatgaatcagagccaatatttcatcatccactgcatcaatagcctcgcgcaaggcatccaggtccatttgaccaaacgggttttccgggtgattcatcatgctggcgagcctatcagcaggcaaagggctaatccatattcagctaacccgaaaagttcaggtgtaaaataacattggaataagtttgagcttaagcaaattgcttggtattgtccttgtcgtagaaagactattgaaatcattaataaaaaagcccggcaggtatgcctgccgggcggatacagagtctttcgactctttattgtagtaacggttctcaccccggatagctacaaagaagcgaaaatatggaggggaagatgatgaccgtcaagcctgaaaacattaacaaagaaaaccccattacatttggccttgatattggcatagcctcggtgggctgggcagtccttggtgaaaacaggatcattgatctgggcgtgcgctgttttgataaggcggaannnnnnnnnnnnnnnnnnnnnnnnnnnnnnnnnnnnnnnnnnnnnnnnnnnnnnnnnnnnnnnnnnnnnnnnnnntgataaggcggaaacagccaaagaaggcgaatctctcaacctctcccgtcgcatggcaagactgatgcgccgccgcttgcgacgaagggcttggcggctgaccaagctggtcaatctactgaagcgtgaaggcttgattgaagatgtgaatgtactcaagcagcaacccttcaaaggatttcagacaccgaatctctggcagctaagggttaacggattggatcgaaagctgggcaatgaagaatgggcacgggttatttatcacctgtgcaaacatcgtggttttcactggatcagcaaggccgaagccaaagcagcagatagtgataaggagggtggcaaggtcaaacagggattggctggcacgaagcggctgatgcaagagaaaagctaccgcactgctgctgagatggtattggctgaatttcctgatgcacagcgtaataagcagggtgaatatagtaaagcgctttcccgtgaactgctttgcgaagagatgaaagagttgttcaagcaacagcgcgcattcggtaatgcccatgcagacgaaaagctggaagcagccattctcggaaatagcgataaaaagagcggtctgttctgggcgcagaagccatcgctctccggtgaagctctactcaaaatgctcggcaaatgcacctttgaaaaaaatgaataccgagcagccaaagccagttttacagtcgagcgccatgtgctgctaacgcgcatcaataacctgcgcattgtcgaggatggaaagattcgcggtctgactgccgatgagcagcgcatcgcgctttggcaaccgtaccaacaagccggagatttcaaatataaacagcttggcagcgccttggttaaagccggataccttgtcaaagacggatataaattcgcaggtctcgcctatcccagtgaagtccagaaagctgaaaaagccaaagaccctgaagatacggtactggtaaaactccctgcatggcagatgctcaagaaaacattgaaagatgccggattggagagtgattggcaggagatggcagaccacgcgctcaatggtaagcctgatcttcttgatcagatcggttgggtgctttctgtgtacaaagaggaggatgaggtcgaacgcgagctgggcaaacttcagctttcaacacaagttgtcgaagcactgcaaaccgttcgattcgataagtttagcaacctttcactcgcagctcttcgcaaaatcatcccccacatggaaaacggcatgcgctacgacgaggcatgtgtggaagcgggctaccaccacagtctgccggatttggaagatgataaagcgaaggaaaaatatctcccctccttctatgccggacgtgataaagaaggtcgcctgatattcaacgaggagatggatattccacggaaccccgtggtgctgcgcgctttgaatcaaacaagaaaggtggtcaatgcgttgatccacaagttcggctcgccgcactctgttcatatcgaaatggctcgggatttatcgaagccgtttgatgagcggagaaagattgagcgtgatcaacttgaatatcgctctcgaaacgaatctgatagagcaacctttgctggtcactttaatatcatgggacgccccaaaggccgagactttgagaagtggcaactctatcgggaacaacaaggcaaatgcgcttattcgctcgatccgattgatctgaatcgcctgcttgagaaaggctatgtcgaagttgaccacgccctcccctactcgcgcagctttgacgatagcaagaacaatcgtgtgctggtgctgacacgcgaaaaccgcaataaaggcaatcaaaccccatatgaatatcttgatggcaagggcaatagtgaccgatggttgcagttcgagagttttgttaaaacaaacaaagcatacaggcaggccaaacaaaatcgcttgttgaaaaaggattttggcgagaaagagacgcgcgatttccgagagcgaaatctgaacgacacccgctatatctgccgcttcttcaagaactatgtggagcaatatctgcaannnnnnnnnnnnnnnnnnnnnnnnnnnnnnnnnnnnnnnnnnnnnnnnnnnnnnnnnnnnnnnnnnnnnnnnnnnnnnnnnnnnnnnnnnnnnnnnnnnnnnngcatgaagagagtgatgccaaacggtgtgtggtggtcagtggtcagctcaccacgctgcttcgcgtccgctggggcttgctcaaagtacgaggtgatagtgaccgtcatcatgcgctggatgcagcagtggttgcggcatgtagtcatggcatggttaagcgcatgtcagattatgctcaacgaaaggagcttggacaggttcgtgatcgtatcgaaaaggtcgataccaaaaccggagaaattcttgatcattttccaagcccatggccgcacttccgcgatgagcttttatcaagattgaaccttgatgatccagccgcactgcacgcagcagtggaaagactggaaacctatcctcccgaagcactggaaagtattaaaccgctctttgtctcccgtgctccgcaacggcgtaatagtggggcggcgcataaagagactatctacgcacagcccgaagcactgaaggagaagggaagcgttacacaaaaagtggctgtgaccaatctgaagcctgccgatgtggataagctggttgatcctgaacgcaacgtgaaactttatagctatctgcgcaaatggttggaaggcaaagaagaacgggagaagcaggccaaagccattgaggcaagtgcaggaagaggaaaagagaggcgcgagctaacagcggaagagaagtcagaaattgagaagctacgcgccctgccacgcaagccggataagcaggggaaccccaccggcccgattgttcgcactgtcacaatggtgattggtaagctctccggtattccggtacgtggcggcattgccaagaatgactccatgcttcgcgtggatctgttccgtcataaaaccaacggtaaatttcatctggttcctgtctatgttcatcataccgtttcgaaattactgcctaatcgggcaatagtgcaatcaaaggatgaagaggagtggacagagatggatgataatttcgagtttctctattcgcttcatcccaatgatttggtgcagatcagtcaaaagaagaaagaatcaataatgggatattactcaggctgtgatcgagcaacagggaatttagctgtttggtcacatgatcgtaaccagcaggttggtaaagatggtttaattcgaggcattggaatcaagacagctcagaatgttgagaagtttaatgtcgatgttcttggcaatatttatccggcactgccagagactcggcgtgagctggcgtagcgttgtcatctcgcgccctgcacggttgcagcgcgacaagttttcgctgctgattgagcaggagcaatcggcgcgggttcctttcgaggatattgccatcattgtactcaatcatcgtgagatcaccttgacgcatccggtgctctcagcctgcggcgaatatggcatcagcatgtttgccacaggcgatacacatcatcccaatggggtgtttcccccttatctccagcactcacgggcaacacggatgctgcgcaagcaacttgccgctcccaagcccttgatcaaacagacatgggcagccattattcggcagaagattatcaatcaaggcctttgccttgaactgaccgcatcagcaggcggcgaacaaatggcatcgtttgccctacaggttcgctccggcgattcaaccatgatggagagtcaggcagcggcattccactttgcccggctctttggttgtaaattcggtcgcagtcagttgacctggacaaatgctgcgctgaattacggttatgcaatcttacgtggagccattgcacgagggcttgttgcacacggatttttcccatctattggactttttcattccagcgaacaaaacgcgttcaatctagccgacgacatcattgaaccattccgccccgtaattgatttacacgttgccactcatcgtagcgaagacacagctgacctgctgccaatcgataaggtggaactggtagcattgctcaatgccgatatacagatgccacgtggtaccatgtcggtgctatctgctatcgaacaaagcattgaaagtgtggcaagggttctggatcaaggacatgataaattacttgagttaccaacactcatcggattagatcaacaccagcgcgaatgctagtgccgacattccgcacccttaaaa

SEQ ID NO: 426 - DNA, 12258 bp, synthetic construct
  variation 5351..5462: note = n is a, c, g, or t
  variation 5734..5896: note = n is a, c, g, or t
  variation 2131..2228: note = n is a, c, g, or t
  source 1..12258: mol_type = other DNA
  variation 8555..8713: note = n is a, c, g, or t
  variation 238..383: note = n is a, c, g, or t
  misc_feature 1..12258: note = Synthetic
gtggcgctgatcaggctgttgcgcaacttgaggaagttgccggagacgttgtctgggtaatgtttcatggaagcagtcgaactataaagcaaatgggagtgcaattttaccggattggcagtgatttgctgaaaaatcaatcaaatgggtttatattcgagttaaaaatgaaaagcccagcatattgctatgctgggctggatacagaatcttacgattctttattgtagcaacggcnnnnnnnnnnnnnnnnnnnnnnnnnnnnnnnnnnnnnnnnnnnnnnnnnnnnnnnnnnnnnnnnnnnnnnnnnnnnnnnnnnnnnnnnnnnnnnnnnnnnnnnnnnnnnnnnnnnnnnnnnnnnnnnnnnnnnnnnnnnnnnnnnnagcaacggctctcaccccggatgagctacagaacgaataataaggaataagaatatgcaaggcaatcagaatcttggctcattcactatcggattggacattggtattgcttcggtaggttgggcggttctaggggaaacacgcattgttgatcttggtgtacggtgctttgataaggctgaaaccgccgacaggggagagtcactcaatctggcgcgccggtcggcgcggttgctgcgccgacgtttgcgtcgccgggcatggcgattgaccaaacttgcgcgcttgttgaaacgggagggattgattccagatgtgggtgttctgaaacaacccccatcattgggattcaatactcctgatttgtggaaattacgtactgaagcactcgaccgcaagctcgatagtgaagaatgggctcgcgtactgtatcacttggcaaaacatcgtggctttcactggatcagcaaggcagaagaaaagagagccgatgatgacaaagagggcggggcagttaaaaaaggcttggctggcacaaaaaaactcatgcaggagaaaaattaccgcactgctgccgaaatggtcatccatgaatttcctgaggcgtatcgcaacaagcgcggtgattacagcaaggcgctatcacgggtattgctggcggatgaattgacgagactttttgagcagcaacgacagctaggcaacccgcatgccagcgagaaattgcaaaccgctatgctcggcaatggagacagaaaaagtggtttgttctgggcacaaaagccgtcattgtccggtgaagccttgctcaaaatgttgggcaagtgcactttcgagaaaggtgaatatcgcgcaccaaagaccagttttactgccgaacgacatgtctggctgacccgtctcaacaacctgcgtatcgtggtggatggcaagatgcgtccgttaacctctgtagagagaaaggtcgcattacctttgccctatcagcaggcgactgatttcagctacaagcaactgcgaaaggcccttttgaaagccgggctatcggacgaattccgtttcgccggtctggcctatccgagtgaacggcagaaaacagaagaaaaagccaaggatccggaggatgaaaagctgctcaagctgccaggctggcaagcgttacgcaagacgttcaaggatgcagggttggaagccgaatggcagcaaatttcagtcaccgcattggatggcaggccgcagtttctggatgaaattgcccgcgtgctttcggtttacaaggaagacgaggaggtcgagcgtgaattgtccaagctggatttgccgaacaaggacagagtgattgcagaactgctgacgacccgtttcgataaattcagcaatctgtcgctgaaagcgctctacaacattctgccacacatggaggcgggaatgcgttacgacgaggcctgtttgcaggccgggtatcaccatagtcaattgcatgaggtcggcgcgggcgagcataaatatctgccacccttctattctggacgagacaaggatggacgactcaaattcaacgaagaactggacattccacgcaatccggtcgtgctgcgcgcgttgaatcaggcgcgcaaggtagtaaatgcattggtcaaaaaatacggtgcgccacatgaggttcatatcgaaatggcgcgggatttgtcacgtaattttgacgaacgacgagatatcaaaaaggctcaggatgagttccgcgaacnnnnnnnnnnnnnnnnnnnnnnnnnnnnnnnnnnnnnnnnnnnnnnnnnnnnnnnnnnnnnnnnnnnnnnnnnnnnnnnnnnnnnnnnnnnnnnnnnnatgagttccgcgataaaaatgaaatcgtgaaaaagaaatttgaagaattttacaaaaaacctgccaaaggtcgggatttagagaagtttcagctctataacgaacagcaaagtaaatgcgcttattctctgcaaccgctggacatcaatcgcttgtttgagccagggtatgtcgagatcgatcatgcgttaccctattcgcgcagctttgacgacagcaagaacaatcgtgtgttggtgctggcaaccgaaaaccgcaacaagggcaacatgacgccatttgaatatttgggtggtaaagagaatagtgaaaattggcgccaatttgctgcttatgtgaataccaacaaactctaccgtcaggccaaacgtaatcggctgctgaaaaaagactttgacgaaaaagaagcgcaggacttccgtgaccgcaacctcaacgatacccgctatatctgtcgtttcttcaagaactacgttgagcgttacctcaaactgcacgatgaaagcgaggccatgcgttgcatcgttgtcagcggtcaattgacttcatttcttcgtgctcgctgggggctggtcaaagtgcgggcggactccgaccgccatcatgcgttggatgcggctgtggtcgcggcttgcagtcatggtatggtcaaacgcctctctgattactcacgccgtaaggaactggaatacgtgcgcgaaggttttgttgatactgtgaccggtgaaattgccaacaaagccatgttcgacaagctggaacagcactttccttcaccttggctgcattttcgtcaggagcttatggcgcggttaaatcaggatgattcaactgcgctacgagctgagttgcagggtttcagtacttatccgcaagaggcgctggaggtattgcatccgctattcgtttcaagagcacctcaacgacgcaatagcggggcggcgcacaaggagactatctatgcgcaaccggagagcctcaagtctcagggtggcgtaactcaaaaagtgacagtggcagacctcaaacttactgatatagacaagctgatcgacccgcatcggaatgaaaagctctatgcggccttgcgagagtgggtgggcaagcgggaagagcgtgaaaaacgtgcgcgtgacatcgagaagtctgccaaagaagccaagcgcgaactcgctgccgacgaaaaggccgagatcgagcgtctgcgagctttacctcgcaagcctgataaggacggtaaccccaccggcccgattgtccggacggtgactatggtgatcgacaagctctcaggcattccgattcgcggcggggttgcaaaaaacgacaccatgttgcgtgtggacgtgttcaccaaggcgggcaaattccatctggtgccagtgtatgttcatcatcgggtgacgggcttgccgaaccgggcgattgttgcattcaaggatgaagatgaatggacactgattgatgatagctatgacttctgttgttcgttatatccgaatgacttggtgcaaattacgcatagaactggcgaaaggatacaaggctactaccgaggatgccatagtggcaccggcgcaatcaatatttcccttcatgaccgatacgtctatgggagcaagacgactagccttgcttttttcaagaaagacaacaataaagccataccgaatgataagcgtgggttaattgaaggggttggggtgaaaatggctgctaagctcgaaaaatttaatgtcgatgttctaggcaacatttatccagctccaccggagactaggcgtgacttggcgtagcgttgtcatctcgcgtccggccaagctgcggcgcgaacattactcccttgccatcgagcaggagcagacagcttttgttccatttgaggatatcgcggtcatcctgctcaatcatcgtgaaatcacgctcacccatcccgtactctccgcctgcggcgaatatggcatcagcttattcgcaaccggcgatacgcatcaccctaacggggtattcctgccttatcttccgcattcgcgggtgacacgctggctgcgtttgcagcttgatttgccacgacctgttgccaaacagacttgggcgaccattgtgcgacgcaagatcgccaatcaggctgcatgtttacgattggctggaagagaaggagctgacagattggattcttatgtctcacgggtacgctctggcgacagtgacaatatggaaggtcaagctgccgccttttattttccacaattgtttggcaaaggattccggcgatccgaggatggctttatcaatgctgcgttggattacggctatgcagtgttgcgcggcacgattgcacgggggctggtagcgcatggtttgttgcctgccgtgggaatatttcatgctagtgagcagaacgccttcaatcttgcagatgacttgatcgagccatttcgccctgctgtggatttgtgcgtcaaacacatgccaccatcaccggatgacgaactgcaacccaaggacaaggcattgttggtcaatttgcttaatgtcaatgtcgccatgccgcgcggcaagatgtcggtgttgtccgccatcgaacaggccgtggagagcttcgcaagaatatacgatggcggtgaccccggattgttggagttgcccatattgattgggctggagcagcaccgcttagagtattgaatatgagcggggagaacaggcgattcatgagactcatggtattttttgatctccctgttgtcaccaaggcagaacgcagagcttataccgtgtttcgccgatttctcatcaatgatggctacgacatgatccaattttctgtttatggacgcttggtgaacggtaatgatgccttggaaaagcacatgaaacggctggtggacaatttgccgcccgaaggctcgatacgttgcttgagtgtgacggaaaagcaatatgccagtatgaaactgttggttggcttgccgctttttcaggaaaaagcggtgaaatcagatcaaatgctgttgttttaacaccggatttttcaaacaaaacgcccgccagatgattgtctggcgggcgttttgctgaggtctattgtagttcatccggggtgagagagggagctacaannnnnnnnnnnnnnnnnnnnnnnnnnnnnnnnnnnnnnnnnnnnnnnnnnnnnnnnnnnnnnnnnnnnnnnnnnnnnnnnnnnnnnnnnnnnnnnnnnnnnnnnnnnnnnnngtgagagagggagctacaacgcccaagccaacatgcctagatggtagtcaattgtagttcatccggggtgagagagggagctacaaccagacgggcttgagcctgcagctccttcaaattgtagttcatccggggtgagagagggagctacaacaaggcccgttgaataagggtttcaggaaaaattgtagttcatccggggtgagagagggagctacaacatgtttcgcgttttctcaaggttcttcgtgattgtagttcatccggggtgnnnnnnnnnnnnnnnnnnnnnnnnnnnnnnnnnnnnnnnnnnnnnnnnnnnnnnnnnnnnnnnnnnnnnnnnnnnnnnnnnnnnnnnnnnnnnnnnnnnnnnnnnnnnnnnnnnnnnnnnnnnnnnnnnnnnnnnnnnnnnnnnnnnnnnnnnnnnnnnnnnngagagagggagctacaacatgttcgctgctcgtatcattttcacgtaaattgtagttcatccggggtgagagagggagctacaacttgctagagccgccacgactgactggccggattgtagttcatccggggtgagagagggagctacaaccgcagcaggtgggagaaagcgtcacgcacaattgtagttcatccggggtgagagagggagctacaacgaccatgcctctgggcttttttcatcgaggattgtagttcatccggggtgagagagggagctacaacacatggtcctgaatgcgcttgattcgcttcattgtagttcatccggggtgagagagggagctacaaccgagatctcatggtagcgatcgacggtcgcattgtagttcatccggggtgagagagggagctacaacacgatatcatcgacccgtatttcggcatctattgtagttcatccggggtgagagagggagctacaacttgcaatggtcgtaggaatcgtatttgtttattgtagttcatccggggtgagatagagggagctacagcgtcctatatttaatagccatgccaagaattgcgcagcagagtgccgtgcaactcttggctgaatttcttgcggttcaaagatttagcgaacgcccgccgtcgacggcaatcacctgcccagtcatgaacggtgcgtcctgtatcaggaagcggactgccttggctacatcgtcgccttctccaatccgtttcagcagggtctgcgagatgactctttttctatagacctcatcgaattgggggttgtcttccggccacatgaccgggcccggtgcgacggcgttgacgcggacatcgggggccatttcgtgcgccagcgatttggtcagggtgaccagaccggccttggcgacgctgtagacgatgtagcctttcttcgggcgttccacgtgcatatccgtgatgttgatgatgcaacctttggtcttggccagttcggtagcggcggcctgagagaggaatagcggcgctttcaggttggagccgatcaggtcttgccactggtcgtcgccgatgtcgcccagttcggtggcgtaatagctggaggcattgttgatcagtacgtcgaggcgaccgaagtgctggacggtttcctgtaccagtttgggcagtacggcaaggttgaggaggtcaccgtgaatgatggctaccgagttcggccgttgcagattgagttcggcctgcagtgctcgcgcttcggaggcggattgccggtagtggatcatcagtttggcaccgccggcatgcagcatacggcaaatggcggcgcctacgcgtttggctccgccggtgatgaggatgactttgttctcaaggctgttttctgtgctatcgctcacgctgagttccaatgaatgtctttgctattgaaaaatgctgctctcaataaactggctttgctgccaagccattataattcgggtctatgaacaccaacttacctgctcctgacgctgaggccgttgcgcacagcgagatgctggcacaaaaaataagaacggagattgccggaaatcagggctggatcgattttgcccgctacatgcatcttgcattgtatgcgccgggactaggttattacagcggcggggcaaaaaagttcgggcatggcggggattttgtcacggcgccggagatctcgccgttgttcgcacaatgtctggcaaggcaggcatcgcaagtgctggaggctgcacatggcgatattctggagttgggcgcgggtaccggcagtctggcggcagagcttttgctcgaactggaccgaatgcagcagttgccggggcgttatctgatactggaagtcagtgcctatttgcgtgacgtgcagcaacggacgctggcgtcaaggttgtcgccggcgcttttgagcagggttcaatggctggatgctttgcctgagagtttcaggggcatgattctggccaatgaggtgctggacgccttgccggtgcatgtcgtcaagacttcggctggcgggccgttggagttgggtgtcatcgcgggtgagcagggttttgtctggtcggagcgaccactggtcaataatcagttgcagagcatgcttgccggactcgatttgccagcggattatgtgacggaactatgtccggcagcgagcggactggtgagtagtcttgcgcggatattggaaagcggggtcatgttgtttatcgattacggcttcccgcggcgcgagtattatcatccgcagcgcaatcagggcactctgatgtgtcattatcggcattatgcccatgatgacccttttctctatcccggtttgcaggacatcacggcgcatgtcgatttcactgcgatggcgcaagctgctttggccaatggtctggagttgaaaggttattgcgggcaggcccagtttctcatcaactgcggcattacggagctgctgggccgtgtttctccgcacgatattgccagttatgcgccgcaggcggcgcaggcgcagaagctgttgtcgccagccgagatgggcgagttgttcaaggtgatggcgctgggcgggcaatgtgagtgctcgctgctcggctttatgcagggcgaccgctcgcatacgctttaaggaggcgctgattaaatgannnnnnnnnnnnnnnnnnnnnnnnnnnnnnnnnnnnnnnnnnnnnnnnnnnnnnnnnnnnnnnnnnnnnnnnnnnnnnnnnnnnnnnnnnnnnnnnnnnnnnnnnnnnnnnnnnnnnnnnnnnnnnnnnnnnnnnnnnnnnnnnnnnnnnnnnnnnnnnccgcaaagaccgcaagggtcttccccgccaagaatgctgcttaagcagctatgcttggcgtgaaggtcgtgtccgtcaagggcccgctccttcgtcgcgaccttgacgccacagggtgaccgctcatatacgctttagcccgttttctcacgccgtcgatcgccgaagcactcgccgtggaaagccacagcggcacctcgacaaaaccgccctgaacgactcaggtataatcgccgccttattgttgagtaccgatcaccatgtccgaaaaagatgtcaccgagaacgacgatttgaaacaccggccgatacgcagctttgtcttgcgtcaaggccgcctgacgcctgcgcagcagcgcgcgatcgaaaccaatatgccgcgtttcggtgttgtctacaaaccggaattgctggatctggatgccttgttcggccgagccgacagccgcaagattctggagatcggtttcggcatgggcgacagcacggcagccattgcagctgccaatccggatatcgactatctgggaatcgaagtgcacggccccggtgttggcaatctgctcaggctgatcgaagcgtcacagttgaccaacctgcggctgatccaacatgacgcagtcgaagtcctgaacaacatgattgccgacggcgcgctggatggcgtacatattttcttccccgacccttggcacaagaagcgtcataacaagcgtcgattgattcagcaggcgttcatcggcatgttatgcagcaagttgaaagcgggcgcatacattcatgtggcgacggattggcaagaatatgcggaatgggtgctggaggtgttgagtgccgaaccattactggaaaataccgtgaaggattacgcaccgcgaccgaattaccggccgctgaccaagttcgaaaaacgcggcctgaatctaggtcacggtgtctgggacctgatcttcacccgcaaataaccactggccgataattttttcggcttcttccaccccttgttttttcaggctggaaaagagttgtaccgtgcaatttccccaggtttcattcagttcctttttcactgcttgcagggtctggttggcggcgttgcgcgagagtttgtcggatttggtcaggagtacatgtaccggcttgccgctggggcagaaccagtcgagcatttgccggtcaagcggtgtgagcggatggcggcagtccatgaccagcaccaggccgtgtaatgaagtgcggtagctgagataggcggacagcgtcatctgccagtgttcacgcatggcttgcggcaccttggcataaccgtaacccggcaggtcgacaaggaaacggtcgtcgcccagcgtgaaaaagttgatcagttgagtgcgccccggttgtttgctgacataggcaagccggttgtggttggcaagggtgttgagtgcgctggatttgccggcattggagcgtcccgcgaacgcgacctcaattcccgcaggcggcggcagatctcgcaggttgtgcgcggagatgtaaaagctggcattttgaaacaggggcatgagagataaacttataaagcgctgaaagagtggaaaatgctatcacgatatgatgcttttcgataaaatacgcgattattgttgtataaccatttctgtatcaactgttgagtactgaggagtcaggtatgagtttccgtattattgcggcatttgcattgggtttgttcagtgccgtttctgccaatgctgctggtgatgcagccaagggtgccacgatcgccaatcaggtctgtatggcctgtcatggcgctgatggcaacagcatgattccgatgtacccgaaactggctggccagcatcctgaatatattgccaagcagctgaacaatttcaaatccggcgaacgtaacaatgcgatcatggcgggcatggtgacgacgctgtcagctgaagacatggacaatctcggtgctttctacgcatcccaggttgccaagggtggcactgcccagtccaatggcaagggttctgccggtgagaaaatctacaaggcaggcattgccggtatgggtgttcctgcatgcgcttcctgccatggccctgcaggtgccggcgtgccagtgcagtttccgcgtctggctggtcagcatgctgaatacaccatcgcccagttgaagattttccgttccggtgaacgtgccaacgatgcggccaagatgatgcgcatgattgccgccaagatgagtgatgaagagatggctgcagtggctgactatatccagggtctgcgctaagcggtagctgtagtagattcatggttcaagggtggcgtatgccgcccttgactttatccagcgaatgctttttcgggccatggcaaagttcttctgaacttcggcaactcgtggccaggcttgctgtcctaattccgacttttcacactcgactgaaacgataaagccttgaagtctcctcaaaccacttccaaacgcctttatgagctcctgagttccatgcgctttgccgtcagtctgctgacggtattgggtatcgcttccatcataggtaccgtgctcaagcagaatgagccgtacaccaattacatcatccagttcggtcagttctggtttgaaatctttgaagtgcttgggctttatgatgtttatcacagtgtctggtttttgctgatcctgttgtttctggtcatttccaccagcctctgcgtgtatcgcaactcccccaatatgctgcgcgagatgcgcgtctggcgtgaacatgccaccgagaaatccttgcgtgccttcagccatcagcacgaatatcaggcgaacggcacgccagaggaagtcagggcaggcctgacacgttttctgacgacacggggcttccgtttcaagacgctgcagcatgagaacggcgatgagctgattgcggcgaaagccggtacctatcagcgtctgggctatatcttcacgcatactgctattgtcgtcatttgtgtgggcggtctgatcgacggcaatgtgccgttcaaggtgcaggagctgcttgggtacaagacggttgaagtgcgtgacattgcagcttcggaagtaccggccgagagccgtctgtccacggccaacctgtcattccgcggcaacatgaccttgccggaaggtactagtgccgacgttgctttcatgcgcatgagggacggatatctggtgcaggagctgccgttccgcgtagcgctcaaggatttccgcatcgagcactatgctacgggacagcccaagtccttcgagagtgatctggtcatcaccgatccggatctggctgagccgctggaggccaccatcagtgtcaacaagccattgatttacaagggtatcgccatttaccaatccgatttccaggacggcggttccaacctggatttcaatctgtggggattgttcagcaatcaactggcgccgttgtcagtacggggcaccatacatcaggaagtgacgctgggtgagggcgatactgcattgacgatagagttcgacgatttccgcaaattcaatattc

SEQ ID NO: 427 - DNA, 3435 bp, synthetic construct
  variation 663..712: note = n is a, c, g, or t
  variation 1426..1475: note = n is a, c, g, or t
  variation 3144..3312: note = n is a, c, g, or t
  misc_feature 1..3435: note = Synthetic
  source 1..3435: mol_type = other DNA
cgccaccatcgatgtaatcgaacacaatgcgggcaatgcggcggcgcgccagttggcgcaaatcttcaatattgatggcgtgtcggctactggtcatggaacggaaattcctgcatgcttggaacacgcactataacaaatgccacagcgctcgcgatgtccccgcaaacacccgaacttgaccccatcatccgcgcctgccgcaccagcgaactgccgacgctggcagaactggcccggcacatctggcagcagcactaccccgccatcatcagccaggcacaaatcgattacatgctgcagcagcgttatcaccctgccgccctgcaaaccgagctggacacaccgcaacactggctggatggcctttggctgggtgaaaccatgttgggtttcgccaactatttctgcaccggacagccggcggaaatgaagctcgacaagctctatctgcacccgcactggcacggccgcgggctgggatcgctgctgctggaatatgtgactgcccgcgcccgccagcacggttgcgacacacttacgctggcggtcaacaaacataacaccaccgccatcaaggcctatcgccgcaacggctttgaagttgccgagcaggttgttgtcgatatcggcaacggcttcgtaatggacgatttcatcatnnnnnnnnnnnnnnnnnnnnnnnnnnnnnnnnnnnnnnnnnnnnnnnnnnccccggcaagcaggcaaaaaccttctcgttacccgccaaaccgcatccagagcggcctgactaggcatttgcctagtgcatcgtgccacagtcacagatataactattccgacatgaacgccagccagcgtggctgacgccagaaatgagaaacccgccttgcggcgggttggatacagaatcttgcgattctttattgtagcaacggctctcaccccggaaaactacaacgggagcaagcctaacacagggaaaatcatgcaacaagcgcaacaatacgatctcgggctggatatcggcattgcctcggttggctggtgcctgctgggcgatacccgcattatcgacttgggcgtgcgcgctttcgacaaggccgaaacgcccgatggcgaatcgctgaacgccgccaggcgcatggcccgactgttgcgccgtcgcttacgccgccgcgcctggcggctgctgaaactggctcgcctgctcaaacgcgaaggcttgatcaaccgtgccgactttttccagcagcagattccggcccagcaatcgctgtggcagttgcgtgtggcagggctggatcggcgcctgagcaacgaagaatgggcgcgggtgatctaccacatcaacaaacaccgtggtttctggtttgcacgcaaggccgaagccgagcaatccgaaggcggcgcggtaaaaaaggcgctggagcacacccgcagnnnnnnnnnnnnnnnnnnnnnnnnnnnnnnnnnnnnnnnnnnnnnnnnnnggtgctcagcgaatacccggatcatcagcgcaacaaacgtggcgactacagccagtcgctgccacgcgaattgttggccgaagaactggcccagctgtttgcccgccagcgcgagctgggcaatccgtttgccggagagccattgcagcaagccattctggcgccggaaaccggactgttctggcagcagaaacccgccctgtccggcgcagccatgctgaatctgattggcaaatgcaccttcgaaccgctcgagtaccgcgccgccaaacacagttggtcggcagagcgttttgtctggctcacacggctaaacaatctgcgcgtcagtgtcgatggcgaaagcggcccgctttgccccgcagcccgcgaggcggcattgccgctgccctacgaaaaagccaaagtcagttataagcagctcaaaacacatttggtcaaactcggcctgttgcccgaatcagcccgttttgccgggctgaattaccgggacggcggcaaagacccggaagacgccaagctgatcgaactcaaaggctggcacgaactgcgcaagacgctggaaagcgccgggctgagcaccgaatggcatgggctggccacgcaagccgacaaactcgatgccatcaccaccattctcagcgtgtataaaaccgacgccgaaatccgcgagcagcttggccagctgggtttgccgggcgcggtgatggaagcgctgcttggcgtcagcttctccgactttatccgcctgtcgctcaaggcgctggcaggcattctgccgcacatgcaagtcggcaaacgttacgacgaagcctgcctgctggccggctatcatcacagccaactgacagaaaacagcgccagccgctacctgccggcgctggatgacaacgcgcccaacaacccagtggtgaaacgtgcgctgaatcaggcgcgcaaagtggtcaatgccatcatccgcgaatacggcccgccccggctggtgcacattgaaatggcccgcgatctgtcgcggccgctggatgagcggcagaaaatcgaaaaagagcaaaagacctttggcgagcgcaacgagcaatatcgccaagagttcgcagaagaattcggccgccgccccaccggccgcgagttcgagaaatggttgctctaccgcgagcaggacggcaaatgtgcctattcgctgttgccgatcaacctcaatcagttaattgacgacgccacctatagcgaaatcgaccacgccctgccctactcgcgcagctttgacgacacccgcaacaacaaggttctggtgctcacccgcgagaaccgcgacaagggtaaccgcacgccctatgaatatctggatggtgccagtgacagcccgcagtggcgcgcattcgaggcgtttgtacgcagcaatcacaaataccgccaggccaagcgcgaccggctgctgcgcaaacatttcggcaaagatgaggccgcaggcttcaaggaacgcaacctcaccgatacccgctacgcctgccgctatttcaagaattttgttgagcgccacctggcgctgcacccggatagcggcgcccagcgctgcgtggttgtcagcggccagctcaccagctttttgcgctcccgctggggcctggccaaactgcgcgaaggcagcgacccgcaccatgccatcgannnnnnnnnnnnnnnnnnnnnnnnnnnnnnnnnnnnnnnnnnnnnnnnnnnnnnnnnnnnnnnnnnnnnnnnnnnnnnnnnnnnnnnnnnnnnnnnnnnnnnnnnnnnnnnnnnnnnnnnnnnnnnnnnnnnnnnnnnnnnnnnnnnnnnnnnnnnnnnnnnnnnnnnnccgcacagtccgtcgcctgccggggcagatgaacaagaccgagcaggattacgccgacaagctgacgcgcgagaactggcggttcaggttcgaggcgatcaagctgcggctggccgacaacac

SEQ ID NO: 428 - DNA, 15747 bp, synthetic construct
  source 1..15747: mol_type = other DNA
  misc_feature 1..15747: note = Synthetic
aagcaactctcatttccgtgcttccttcttcgggtcatatattggtgaccgctaccagatgcataccctattctctacctatcaccgtaagttagcggagaacggaggtatcaccaacgataattacattacccatcctgagagtttcgatgatcagtatagcgaggaggaaataccgactgttctctccaagaactggaaccgtaataactccatccatttctacctctctcaccgttacaacattggtttctataggaaggtgaaaatgacggaagaggaaatcaaagcacgccagtttgccgctgcttctgcaaaggagaaacaggagcgtgagaacaaagaaaagaataacgaccccaatatcggacgaaaaggtggcaagattgcaggtgagatcccgaccggccgtcctgagaatgcccgtattgccggagaccttcccaaagatggtggcaaaccagtcatcaacgactccacccgtatcaaggtagactctcaggagaagatggacagtctgttggcagcccaagcgcatcaagactctatcgatgccaccatgaaacgggagtatgtgcctgtcaccagtttcattcacacccttgatctcaacagtcatagccgtatctatcaagcatacataagtccttccgactattatatggacacgttctacaaatataataacgaaggggaatatgggaatgactccatctatgaccagtataaatacctctctatcaagaacacctttgccatagcactcctcgaaggtttcaacaaatatgccaaggcagggctgaagggtttcatcagctatgaaaaccgccgtttcaagatgcctgacgtacaggatgacagcgacaaatatttcctgaacacatggacgggacactgtctcagtgtcggaggagaactgtccaagactcagggaaagacccttcattacaatatctctgccgactattgcatgacaggaatggatgcaggctctctgaaactggatgcgctcgctgacctaaactttcctctttttggtgataccgtgcagttggctgcaaaggcatatttctaccgcacaaaagcgagattcttccaggagaactatcactccaagcacctgtggtgggacaaggacctgagtgcggagacaagagcacatatcgaaggacgtttctcctttcccaagacacgtacccaactgcgcattgctgttgacgagatacaaaactacacctatttcggcatcaattacgctatgatagctacggatgatgttgacggacgcgctgacatgacagcaagtatctatcaggaaagcggtaatattaatatactgaccgcacagcttcggcaggacttccgtgtaggtatcctcaactgggagaatgtgataacgtaccagaactccagcaataaggaagtactacccctgcctgccctgaatatcttcacgaacctctacatcaagttcaaaatcgcaaaagtcctgagcgtggagttaggtggtgatgcttatttcttcacgaaatactacgcccccgactatgtaccccagttagggcagttcgctgtccagaagaatgaggacagccgtataaagttaggtggctatccctttgtggatgtctatgccaatttccatctgaagcgtgcccgcttctttgtgatgatgagtcatgtgaataatgcttctggcaacaagatgatgttcttgaccccccactatccaacgaatggcaatgtgcttcgctttggcgtttcctggaatttctataactaacctatcgttcttccaggaatatcctatcaaacactttccgcaaagcagcaggctggactattagcgagcgtaactcattcaggttacgctcgttttctgatccgtgaatccatagacgaatatagccgttgacggagtatttctcattcagatgctgacagaaacgcttccagtgtccctcctgatccatctcgggataattggaaagtccgaactggatggtacggcgaatcacggtttctggcgtgaggtcacggtcagcttctgcgacaatcttcccatagatactccgcggagcatgtgatgccgaggcacgatggtcttctaccgcctccttcatgattttaatctgttctggcgtaaaccaccgtttcagccgtgcatcctgcatcagtatctttccactcgtcagatgatgaatggcccgaggaccgcttaaccccaaatcatgataggcagcaatgacatatgccatattcaagtcagcgccaatctttcttgccagggcaatggaactgcgtataacacgtgtgacatggctcaagttatgtgccttgtcaaactcagcataacggggcagtatctgtgtctccacgaactccaccaaatcaagacttgctgtattatttatcatcagaaagtggtgaaaatttttgcaaatatacgtaatattccttacttttgcaagaagattcaagtaattttacctttttatggacgaaacgaagattaaacagaactctcttcaggcatggatcttggcagcacgccccaagacactgtcgggtgctgctgtccctgtgctgataggactgtcactggcatttacagacgcgaaagaatatggtgatgatgtgttcagctggacggcggcaatactctgcatgctcttcgctctggtcatgcagatagatgccaatttcattaacgacttctttgactttgcccgtggcaatgatgatgcagccacccgccttggtccgttaagggcatgcacacagggctgggtcagcactgacgcgatgaagaaggcaatagcctccaccacctgtgccgcttgtgtcatcggtctacctcttatacattatgattatggtggactggagatgattctcataggagctctctgtgtggtgttctgctttctctataccactcacctgtcctatctgggactgggtgatgtgctggtacttttgtttttcggcatagtacctgtctgcatcacttattatgtacagctgcacaccattaccccagaggtattcatcgcctccgtcgcctgtggcttggtcatcgatgctctcctgatagtcaacaactatcgagaccgtgacaatgaccgccgtgacggtaagatgacactggtggtacgtattggcgaacaagcaacggaatcgctctacttgggaataggaatagcagcctgcttgatgggagtcaccttctggatgaatggccacatacttgccttcatcctaccttttgtctacctgctgctgcatgtctatacatggctgaagatgaaacgcatccaccacggcaaacaactcaacgagtgtctggcggaaacggcacgtaacattcttatctacggacttacagttgcggcggggttgctccttctctgataaagaaccaccacagagcgaccataatggatatcaggataatagtgaagactgacttgaagagacagcctgcgattttcttcactaccacaataccgatgatgaccatcaccagcaatacaatataataggtaatattattctccataactcatcatcatttgaatagctgtcggaaagtaacaggtataggggtctcaaactccatccgctcatgagtaacgggatgttccatacacaagaggaaggcatgcagacagagacggtgtaacgggtcatcgccattaccatatttcacatcaccacagacaggatgtcccatgtcagcggcatgaacacgaatctgattcttacgacccgtctccagtttaaactccaccaaggagtaatctgtcgtgcggtctaatacctggaaatgggtgacggcatactttcctccattgtctaccggtgacgaataggtgacgtaagccttattatctttcagccaattggcgatggtcccctcgttctgctccatctctccgctcagcacagccacataacggcggtcatacacgatctcatgccaataatgctccagtgcctgctcggtgtctatatctttcgcatataccatcagccctgaggtgtcacggtccagacggtgtaccacatgtgccgtgcatttctgatgcgacttcttgaaatagtcgtccagcaccgtcttcacattgagtgacgagtgccctgccgccatagagagtatgccctgctgtttctcaatgacaatgagccagcggtcctcatagacaattttcagccaacggctcttgaactgggtctggttgcgtttcgtcttgctaacggcaactttcataccgggtttcaaaggaaagtcaaactgactcacggtcttcccattcacacggatacccctgccctgcagtgtcaacttaatcttgttacggctctgcttcacgttttccagcaggaactccaataacggctgttccttagcgactacgtaatggtcgtactcaccttgctgattatatggattatatctcatttcgactgcgaaggtacacattttcgagcgaaaagccaaaggaaatttggtattttgcatacttatgactatctttgcatgttattagaaacaataaatgtcaataatgatgaacctgaaatcaacgatcttagcgggattcgcactggctttgtcacatcacacggcacaggcacagttagtcatcaacgagctgatgcagtcgaacattgactgcatcatggacgatatgaatgagtttcctgactcatgggtggaactctataacagcggcaatactgccgtcaacctcagtgactataaattaggaaagaacaacaaagaggctaaggcatggcaactgcccagcaggaccatcggtgccaaacaatatgtcatcatctattgcgataaagaggagaaaaacgatcatacggatttccggctggaaacaggaaagggaggtgaggtgtacctctttaagaacggtgccgtggcagacaaagtcactgacatgaagaaacagccagccccaaacattgcctatggacggcagacggacggcagcgacacatgggggtatatgacagagcctacccctaagaagtccaattgcggcaagacagctacgggtgtcctgggcgagcccgtcttcagtgaaccaggctgtgtcttcaccaaggcaggctctcatacgctcaccctttcacttcctgaggggacacctgcgggtgccgtgatacgatataccaccaacggcactgagccaacggcggcaagtgcgaagtataccaaccccatcaccttcagcaaaaaccgtattatccgtgccaaaatcttctgtgacggatacctgtcgcctcgctccacggctcattcttatatcttcttcacgtcgagggacctgacactgcctgtcgtttccatcattactgacgataaatatttaaacgacaacaaaataggcatttatgtggatgggacttatcagagcggtaagaagaactatgaattcgactggcgccgtcctatcaacttcgagtatttcgagaacggcaatgagaaaagccaactcaaccaactctgcgagacccgtatcatgggaggtgcttcccgtaatagtaagttcaagtctctggctctctatgccaacaagcgctttggtgagaaacgtttcgattatgagttcttccccgaccagcgtcccggcatcactgacttcaagtcgatagcccttcgtaatgcgggtaatgacttcgactatctgtatatgcgcgatgccgtcattcagcgtaacatggcagagcatgtagacctcgactggcagtcatggcgacctgtcatcatctacatcaacggcacttacaaaggtatgctcaatatccgtgaccgttccaatgaggataatatctatacctattataatggtttggaggacatcgacatgttcgagaactggtgggaactgaaagagggagactgggacaactataacgccttccgtactttcttctcggaagagggacataccatggcagaatatgaggaatggatggactgtgtggagtttgccaacctcatgatcatgaacctctatcactgcaaccttgacttccccggtaacaatatcgtgatgtggcgaccaaagacggaaggtgggaaatggcgttggattgccaaagataccgacttcgggatgggactttatggacgtgatgtcaattataacaccatcaaatggatttataaccccaacttcgacaaagacaacaactgggctaatcaagaggagcatacacggctgttccgtcacctgatggctgatgcggactttttcaatatgttcatcgaccggtgtacggtctatatgggcgacttcctcaatgagaagggcatccgtgccgtatgggaccctatgtatgagctggtcaagtatgaatatcccaaccaccgtaaactcatcaaccaatggtggcctaattataatgatgagttaagcaatgcccgcaaatgggtcagcaagcgcacggacatcttccgccagcaccttgccgactattaccatttaggtacaccgaccacccttaccatcaataaggacatgacagacttggggaatatccggtttaccgtcaacgacatcccactgagcgaaggtatcttcgacggcaagttctttggcggtcgcgaggtcagaatagctgccacccccgctgatggtaagcaagtaacaggttgggacatcactgtcgtcagcagtaacggcaccgtcaccaaagagcaaattgaaggagccacccactctttcaccatgcccactggcggcagcgtcatcatcaaagcagttcttggaacgacgggcatccatactgttaaggaccatcctaaaacggacaacacccctgtctataacctctggggacatcaagttgatgctcaccacaaaggaatcctgatccgtaacggtgtcaaggtggtcaataaatagtaaattcatgatttacgtcaacgtttacgtaaatttttgaaagaaaatcgttaaaatctttgcaaagaatggaaattattcgtacctttgcactaacaacttttacgcaagttgaatttttaagggtggaccactgtttccaagcgaggaaacagtggtttttttgatggcaaaaaaaataaatgaatttattttgttttgcgctcgattttccgtaactttggatgaatttgcaggatttctttgtataaaggcgatgcggaggattgagaaatttttgggttacgatttagagaccgttctcaattctatgttctgctatgaattgcttaaaagaacacccgatgatgaacaacccagccgcttttgtagtccattatcatgtgcaaaggtacaacaaaattctgagatagttaaagcattcgcttgtttaaactcttagttcgttcaacatgagagtttcttgtatgcttctaccacctcttgcattgacatgatatacattctgagccgtctgccattgaggggtgtgcgcttaccgttcgtccaactaagttcttggaattcctgacagaacgtgtcgtaatcaatcctgccctgctggtactgtagcagcgcatcggcatagacggagtagtacaggttgcagaaaggcttgaagaagatgaaatgtttttcgtcctcatagaccctcttgcagaacttctccaccacgcttggcacaaagtgctcgtcggcatattcctctacgagccgtttgaactccctgtatgttgcgatagattcatctgtgctttcctccttcgtatgcataaagtccgctggcgacgaatggaagatggtcatctgattcatcattgccgcctgttgctctgcctgctgatacgttgtctgctccttgctcatggctaactgcctgtgaagcatcgccagatgatactttccatacgtcagcgtcagcttggcagccagcgtcacatccaaagcacgacgctggtaacgctctgacaagccctgttgcggtttcatgtggttaagtgttgtatctgagaaatattgcatttttttacaaattttccacacactatcaaagtgtgatttttacatccttgaagcctttaaaataccaccatgtattgaaataacatcgattccattttctcatgcgttcccaagggtgtgtaaggcatcttttatctactttttgcttgcggataccgcagggctcattctggcaatatttcctcaaaggacatttgaatatgccatttgacagaaacacttgatgtacttgcatcattgcataaacattaatcaactctctttttgacacagagacacgattcggtcgtataaattcgtaatcatgtgcgttgtttgtaactattggcgtaccaaaatattctaagagtgacaaaaacactttattagatattatatctccaccggctgcaagattttgaaagacaaagggactatttagttttaactcatagcctctatttacgatggactggaaccatttgttgatattttgccaataccatacttctccgagatattctgaaataacatcttttgcaccttctgcaaatgctttatggctttcttcgtaattgagtacaccaagctgattgaaattcatggttgtcctttttaaatcctcataaataatatcaggagttaatgtatccgcattgaatttgtttttcgctttagcctgtagataatcaacaaaatcgcacccaggattgattctttgcaaagctagtacaaacaaagctatcattgtagatggtttcgatgataagtttggaattatcatgtcggccacgtcctgtgctatataataaggattgtagggagaatgccgcaatcccgtcgggtaaatactatcttgaattaactttgccataccttccaacatttgcaaagtccctaacaggacatttcctttcacgagatttctatttatacattctactaaaattccttctacgggaatctttctgccagaaatattgtctgtcaaattcgtaatatgaatttttgaaaaagaaatagcttttaccacaggttctgtcgtgcccatagttgccgctcttgctttccagttttggtcaacattattacccatactaaaaggattcatgggaacgtgtatgtctttatggggagcatcttttatcatttttgaaatgtagcgaatatattctccctttataaacatgttattcaatccttgaatggtcgtgacatcctgaaggaaatgaatatactcatggacgaatgtacttttttgctgtatactccattggttcatttctttcaatttcccacgtccaattgtatgcaaatggaatatggcaggttcgtaaaaccctaacgttgtgttgtatttttctaaataagacatacgccgataatattagcaatttgaagtgcaaagatagacaaaagaataacaaagcatataattatgtttgatttttacatatttttaaataaaagtattggataattcgtgtagtttctgtatttttgcaaacaaaaacatttgtcatggatattaaagcgcgaatagaagaagttataatacagagaggattaaccaaaagcaaggtcgcagaaaggatgggtaagtacaaccaggcattcaaccaacttattacaaaccccaaatgggaaacggttgagcatgttgccgatgctattggtataactacagaggaactgttgtttgcacctctcgaaaaattgtcaagcggaaacaatccttctgatggagataattctaacctgccaagattgccagaacaattgcgaaccatcggcatgcttgtttgtccaaattgtgggaaaggtttcaagttgggcatcgaaaatgtatgatagaacaaataagcctctcctaagagaggctctaagctcacgagacgcgagttaaagataaacttcggcttcggctttaagccatgccttattgtgaatagtaactcacaaaatggtatcttattgggtgcaaatttacgaaattagattgatataaacaaataaaacaataaaaaatgacgaaaatattggcttttgacccaggaaccaattctttaggaatggtttgtagagacaccatgaacgataacctcatggaacagattacgtctggagtggatattattcgagacaacacagaacgtgacaaacgaggacggcacagctctgctgcttcgcaaagacgctctttccgtaatgccagaaccagatatcgttctgtgaagcgcaggaagcaggccaccctaaaattgctcattaagcacaactgttgtcctttggatatggagtcgttgaataaatggaggttcgacgatgacgaaaaaggctatgacagaacattccctgttcataacgaggagtttatgaagtggataaactttaagttcatcattgatggagaagaagttaagagcgtatatcgtctgagggagattctcgttaccaaacctctcgacttctcaaggcctgagtcatggcttatgttaggtagggctatctacagcatagccgtcagacgaggattcaaaagtagccgtctggctaattcggaaattaacgatgaggaggatgaagaaggagttgatctacagaagtcagaagaagaattgttttctggtcttaaacaatacatgaaggagcacaactgcaaaactgttggcgcagccttcgccaggatggaacgagttgacaaaatccgcatcagggccaacaacgactacaagcctattcgttccaagcttaaagaagaaatagaagagatattcaaagtgcagaaacgcgatactaatagtgaactctataaagggttgatgtcagagaagaagcacgaaggcaccatcttttataagaacccgcttaaatcacagaaaggaaaggtggagtattgcactttagaaccacgtagaagaaggtgtcccaagagtcatcccgctaacgagttcaacacagcctggcaattgctgaacaatatcaagataaaaagaaacggtctatgggaaaatattactcttgatataaggcataagattttcaacgaactgtttgtcagtaacgagaagcatttcgactttgtgaaaatcagagagatgcttcaaaatgagtatcaaattcagctggaatataaagaaagcatcaactatagtgacaacaaaagcatacatgggtgccctataatctattatcttcagaaaatcctaggcccttcatgggagacagaacgtatatctggtaccaacaaacacttgaagcatgcacaaagaagaaagaagctttttaataaagaagataaaagatctatagaagagtatactgagaccgaaggccacttgaccgaatacacatatgaagacatctggcacatctgctatgagtcagatgaaaagcagttcgtcaaagactttgcgaaaaacgttctttgtttgtctccttcaaaagtgattagcatgggagcactatgggaagatatacaagatggctatgccaaactcagtctttgtgcactcaagaagataaatccattcctggccaagggctacaaatattctgaagccgtaatgcttgccaaccttccaactatcatgggcgacactttcttccaacaaaatgagcaagagattattggtttgatggataaagaaagagctgctattttaagcaaaaacaggatttacgacatcacaaacaaactgatttctgactataagtctttaaaattggaaggttttgcttttgccgaacgtgcggaccatgactacattttacaagatgatgacattgaagacgtaaagaaggcatgtgcagagaactttggcaaggaatgggatgcattgaccgataaccagcaatctgccatcataacacacgtaaaagagttgtatcaaaagttcttcttcagtaaagaacgtgattattgcaagcgcatcaaccttgcggatgcagttaaagctgccttggcagagaagtatccattcctcactaaaaagaaattgaagaagctatatcatcactctgataattcctattatcctgcagctcacactaacgaaaacggcattcttcaacttggcaatcctgccagaggtaacttgaagaatcccaccgtattaaaagtgttatacaagataaaagaaaacgtcaacaagttattgataagtggggacatcgacgctgataccatcatagttattgaaaatgcccgtgaagggctaaacgactttaatatgaggtgggccatagaagaatatgggaaaaaacgagaaaaggagaacaaagcaattgaagatgccctaacagacctagccacggagttccagttgaccttaccaaagggatgtgtttccgtagctcgtctcgcactctatcaaaacagggacttcacaccttacaatcccaatgaaccaagacgactctatgataaactttgtgagaactacaaactgtggctaaggcagggatttttcgatttctacacaggacaccctattacattagcccagttgttctctcctgacaatcttgtagaggttgaccatattctgcctgtcagtaaatcattcgatgattccatctcaaacaaagtactaagcagtaccagatacaacaggaccattaaaggtacaaagttaccctgcgaactacccaattacaacattgatactgccgaaggcacgcctatcatccaccgtatccaagatatagaaaggaaggtgaagtatttggagaacaaggtaatctattggaagagtcgttcttccagagctaccaatcctgaatcaaagaactgggccatcaaacaatgtcatctttggcaaatggaatatgacgaatggaaccagctgctgacaaatctcacgacaagagagattacgcccagcttccgccacaatcaattgaatgatacacgaatcatatcaaagtatgcgtaccattatctaaagtctgtgttcggacgagtcgtggtgcaacgaggagagacgaccgcagtattccgcaagatatttggttttcaagaagtttacgagaagaaagaccgcagtcgacatactcatcacgctatcgacgcattgactctctcgatgattccatatggaccaagacgagaaagaatgatggaattgtggtatcagatacaggagtctcataggttcgagaactatgacacagaaagacaactgaaggacaaacttgacagagaagttagtctttgtggtttagggaattactcccctactgaaattgtaaagtacattgagaaaacaaccttggtacgtaacgatgccaccaacaatgcgcttacaaagaatatcaagcgcttccgagtgaggggtaaagttgtaccattgcgtgacaagtatggaaatgtgatatatgagaaaacttctaaaggtatcaaacgtgtaaaagcgaagtacgtctctcagggaaattctattcgtggggctatacacgaccaatcgttctatggcaagatagagaaatggaagaacggcaaaaatcatgaaattgaagaggtatttgtcatccgcaaaaaaattgagtttaagtctggagataaaggcaaagggtttaaatcatgggatgatcttaaggctcaaatggtagataagaaactatttgataagtttgaagagaaagagaaagatttcaaaaaagcatgtgatgagggcatccatatctgcattgctgagaatggcgagcgtagaatggtccgagtcagacgtgtacgatgcattgctaaaaaagcgcaaccgttgaaaaagcacatttttcaaccacgaaaagataataaggaaagattctactatgtatcttcacacggtgaggcttatggcatatttgaatacaagagcgatgaaggcaaaatactatatgaatcagatagcctatttaccttatcaacaaagatgaaaaatggtgaaatgaaagaaataccatgtcctcagcatattatacgtactggaaaaagatttattcacaccagaactatacggaagggagatagcattctgatttaccctgaagaggaaaaacctgaagatcagtataagcttaatactgctatattgtccaatagattatatagggttgatagcatagagttagataaacggattaatttagtcaggcactttcggggaagcatgcctaaaggaaaagcaataaagaaagatgcagactataacaatttaccagaggcaatacgacctacgctgtcggacaaacttcatttcttgctttttggaactgattttgacatccttaatggaaagattgtcccgttgaaaaacgattagaaacaagaaatcccgccttattagcgggatttctgctatcaataaacaactttgtatttgtgaataatcaattatcatattgtttttctgaaacttataataattctgttttttctgataattaaagataccattttgaagcctattcacaacgacggagcatccattcctttcaacaaatggtttttttctgataattaaagataccattttgaagcctattcacaacgttagccttgtcgatagccagcttgtcttcgttttttctgataattaaagataccattttgaagcctattcacaactaaagttctatatccttgttaagagatatggttttttctgataattaaagataccattttgaagcctattcacaacacgaatacatggtgagaatgccactattagttgtttctgataattaaagataccattttgaagtcgatgtcacataaaagtcaaagagcaatccgcatcaatcatgcattaatgttgcaaagatacaacattttatcgaattacaaacgagagcacaacagaatttgttagaaaacgactcaatttataagatttttggcaataatggtcaattcctgctgatttcttttgtaattttgctcataaattactcataatgttctcaaatatggataagtttatcattacaacaacgccgacaatagaaaggcgtcctatcaaggcatatcttggggctattaacgtgaacgtggtcattggtaccaacttctactcggacttcgccgcattgtttactgatgtatttggctgcaattcttgtacggaagatggatgccatgtacagagggtaaagaagttgagaccttagtgagacagatagacattaattaatcattattgtcaatcccaaatagaaattcaaagaacacttacggatttcgcaaaaacatataaccttataacatgatgtggctcaaatgcccttgtacaaagggattgagccatgttacatgttgctcaaacgcgtacccagcgggacattttttgtatatagacatgagatataccaaacaagcaatgacgctggcacagcagttcttgtcggaagccccgacgcatacggtatgaacaagaacctctcaagtgaagaggtgctctttggctggcaagaactggagtaaacgaccatactatatgaaaatacgactggcggaatgaaaaatctgccagtcgtattttttattccgatgctcggaataaaaattatgatactcgtattacttaataagttactcgtattgtttaataagagtatcagaaattcaaagaacacttacgaatttcgcaaaaacatataaccttataacatgatgtgactcaattgcccatgtacaaagggattgagccatgttacatgttgctcaaacatgtaacatacatgtaacatacatataacattttggtgagaagtatgttatatgtatgtt

SEQ ID NO: 429 - DNA, 23198 bp, synthetic construct
  source 1..23198: mol_type = other DNA
  misc_feature 1..23198: note = Synthetic
gatcggatcgatatgaagcatgttaatcagttggtgggcgtcgatgaggcgccatgaatgtggcgaaggtcccccttggtcagcaagtctctcatcagactcgtgcgacccggtccaaccgattggcattcatgtttccgtcatttcactacggcacgggctcccacttcgttgcactattttcaaagccgcgacagacggcgacatacagacgccccctcctatcaaccgcaacgcagcccggacgccacgctgcgacctcagtccggtttgtagccccaactggcagtccttgccacaggacaaccctgtcgaaggtccgattctcgcgaaagtaagttgccgcaaccagctgtaagagctcgcgacgctcagtcgaacagattgcgggcaccgtcccgacgctgttatgtccatcgatccggtcgtctaggccggtcactgaatggccctcctcctcctcccgctccagtaccgggagcaggtcgaggccttcagcatctgggaattcatctcgcacggcgcgaagccactcgagaccacaacggcgagcggcgctctcaacagagccgcattggccggcatatagcggcacgacaagtgctgctgcgcagcgctcgccttcggatagaaccgagaacgcgccaagttcagcgagttcgactgccctccttactccagcacgatcttgctccctgaactgcaccacgagctcgaccaaagattgagcgttgccggcgcaacgatgcaatgctgcgcgaattcgttccgaccttgaaattctgtccatgggggctagaccagtactcaatctgaccccaggcttgccagataccgacggagcgccacggtatcgacaccgtgcaggcggctcacgtgcgcaatcgttcggcaatgagacatgaggctgaacggccaattgcgagttggcgcacgtaccgccgcacagcactcctgcagctccgccgcgtccggataccatctgccgccatggtcgaacctcccgctcgggttgctcctgcgttcagaacgctcaaggaagcacgcggccgcgcgacgcaacgcggcgccagacgagttactgcaggttgcatacgcgagttcgccacgcagatcctcgccagcactcctgatccggcgcacctgcgccgcaaaagccgcgccatgcggatcgttgcgacgctgggtgctgggatccttgacgcgagccagaaacgcgtggatcagctcatggacgaccgtcttgcgcagctctttaggtgcatcggcgagtgcgcttgagatctcgacgccgactcgcggagcgtagctaccaaaatgtcccaccggaagcatcgcgaagcgtatcgtgacgtccttcagggcaccaccaaaatgacgccggtcgatctcatccttgagtgtggcgaggtcgctctcagtgatcggcatagctgcacctaaaggcatgtctgatccttcaggtaccggacaccccgcaacacgccgaccgccctccaccccgatgccaagtacgcaggattgttaggatagtattgccctacgtccaactgacgccgtagtgaatgattcggcgcatgccacgaccagtggtcatctcccgcgagaagccctcgtcagctcctcaaccattcgtcgcccccgggggcacctagtcaagcacccaccatccgttttctgtcttggctaggtggacggaagcgccttccatccattcgcgtttttcgtcagctcgaaagtctcagaatgcgccttgggctggcatccgcaaagtacttcatccggtctcttgaatgtgatgacgcacgaaatgtcgcgcgctcgtccgctgatcacacgggacgatgatcaaacgctatatcaatttagagccagaggcgccgcgggccaagcctcgccagtgcgattttttttcgaacggcacctgcgcctccgctgacgcgatcggcgctctactaaaataaagccgcatgcttggggcactacgcaaccgccgcgcaatattttgataaagcatcgatcagcaccagatcctttcccagatcgcgtgcattcggaccattaacaatcgccgtcgacgcagccctacagctgtcactattgcattcacgatcgcagccgccaggccgaaccatacgaacgttacggccccgccgcctgatcccccatcgccaacatccggcgtcggcgtcggcgcaggcgcggcggtcggcgccggcgcggcaaccacctcaacagcaacagtctgctcgacatcgccaccgtcaccggagcaggccagagtgaactcgctggtaccgacttgcgccatgactaactccacttcgccgcttgggggacggttgccggcccaggcaccagaagagaaacacgagtccgcctgttccgaagtccacgtaaggcgaaccgcgcccccgacctgaatctgagtagggttcaccgccagcgacaacgtcggcgccgggacgggaggcagtgcaacggaatccagcgtgacgatgcccgaatcggccgggtcgagagccgaaacgatcgcacgcgcgccatcgagattgtcgacccacagagaagccagcgcgcgcgaactcacgccgatgccacctgggatgtcttcgttgatgccaccttcgatctggccgacaacgcgcccgtcgccgtcgaagatcggagcaccgcttgagcccggacctacgagtccatcttgggccgagtcctcagcaatcgagatccaaatgaagcaacctgagttcacgtctgtgcagtcgaacctcgggcgcgaggaagcctcgaggtggccgtcggtatcccgaaaccattggcgcggacggttcgacgtgtgatggatggaataggactgcgtaagccgtccagcgcccccggcgccagcgccagtcgccgagcgattccaacccgcaaactgagcgttgaacgagggctggattggctcctgaagaccgtacaggatcgtgtcgcccgccattcccaccacagtcgcctcgatcagttgcgggccaagcgcgaggatgtcgaagtcggggcttccacagtccacctgaccatcaaacgtaaactggcggaactccgttgtctccaactccactcgattgttgtccagcatgtccgggtcatcctcgcagtgggcggcgcccatgatgaggcccttgtaatccaccgctgcgctgttcatcaaagtgccgctgcaaaacaatgtgacgtcccgctttgcgatgcgcacgttgacgaccgatcgagcgctgaggtcaagtgccggagtgcgaatacacgaatagttgatcgaatctactccgggattgggcgacttcggcgacttggagagcgatcggtactccaccgcgccgacggagaatcgagcaatgtcggaataagccttcggcacttgcacagagagcgtggtgccaggacgaagcgccggtagccacacggaactgcgggaggcccacttggctgggagtgctcggtccacaccgacgtgggtcagcaccagcgctgcgccctccggaagggccatgtcaacgagacgcaggccaatcgactccgcggtatcggattcgaaggtctggctgaacaccacgtagtcgccaatcgtgcggcgcgcgaatgcgccctttgggaccgtcatgtcgagcacatgggcttcgtatggcggcagcagcggaaccagcgccttcgaccccaccggcggctcgatgatggttgtgcccgcctgtgctgccccagtgaacagcagccccgcaagggctctcaagatccacgttgtcatagcaccctcccgttctgtatcgattccgacgccgctccctggccacctactgaacccgccgttgctccctctaccagcaaaggcctgtcaaaacttttctggcgactatagtccgtggacccatggtctcgccagcaccacgctgcgggcatggagcaggacgcagaccggatccgccgcgcatttggacttgcactcaagtcgtgccgcaccgcctgcgcaatttcgcaggaggccctggcgctttcggctggtgtcgaccgcaccttcgtatcgctgctcgagcgcgggctgcgccagccgaccctggaaacactcttccggctggccgccgtgctggacacgtcaccggaggccatggtggcgatgacccgccagaacctcacccgctcgccggccaatcgtgcgcggcgacagtcaaatgctctatcaaaatagagccgggttccgggcgcgaccggtggtggcagtccgatgttttaatacagcacgtgcgctgcatcagacgcgatcagtgctttactaaaatactgcggcccggtcggcgcatggcgcggccgctgtgtaatattttgatatcgcctttggcatgcggatctgcggtcctcgtgctgcgtcgcagtaacggacttgcccagtctccggggctgcatcagaaatccccgccgcagatcggaccacacgggtcgaagtcgaaccctgtgtcatccattccgtacggattgcccgcaacgtcaacgccaatcgtcccgtcgaacatcggcaggccactcgcaggattgaagtcccacgtcgtggtcgcggtggcgtggtcctcagaccacggatgaaacgaatcgaactcgtcgtagcgcgcccggctttcgctgtcatccagcgcaagcccggcaccgccgggggcgaatgcgttcgcaaacggatcgaagtcgtcgaccatcgtcggcgcaagggcagccccagcggacacgtacgcgacgctcgcatcctcggggcctgcctcccgccgacgctgccgctgcggcgcgcggtgcctggcgcgccgcgcggcgttcggaacgagcgagatcagcaacccctgcccgatcatcagcgttgtcagacccgcaagcattgcgccgagccggaccacctcgtcgcgcccgacgtcgtaccccacgaacatcatccccgcgagccagtagagccaccacgggattagcgcagcacgcacggcgcgtgggtgtggcgggcgtccggtagcgccatccgcggccgcccgcttcacgcccaggaacaggaaggcggccggcacccacagtgctccgctcccaaggaccaccaacgcgaagcgtccgatcattggatcgccgtcgttgatcgcgatcccgaatgcgtaaacgccggtcgtcatcagaaccaccgacatcaggccccaccactgtcgggcgatgcgaagcggtggcggaaggttgtgacggggaatccggaacacgacccatcccgccagcaacagtgctgccggcgcccaggcgacgatgaacgccaggacctcgaaccggggcatcacgaccgtaccccgaagacaccggcagggtcgccggcctcggccgcagtcggccgatcaatccggagcgccggccggagatcggtcgcgttgcgtgagctgcacgccgcatgcgctgatcgtgcaatggaataataaagcactcgccgcggaagccccgccgccgcgccgaattgcgctgaagcgatcccgccggcccaatttgcatgtttatagtagagcactgaccgaccgcggaatgacggcgacgcaacggtttcgatgctcgtgtacatgatgatgctagagcacaaagcaaaggccgatgctgtaggtcttccgtcggggcgtgcggactgccgcatcatgtagacagcagcgcaaatgtccacgtcccggcgagtccggctgacaggacgtaaattccgagaaattgaagcggcgcgtggcggagccgcaagccgcatgcgctctgcagcgccaccacgatcctcgcagcagacaccgccgcggccgccgcgaacggcgcgggcgtttcgagcttgaggaagatgacaaccgccggtacaccggccagcgcggcccagatgagctcatctacgagcgtgcgcgtatccggccgatgcagcagttgtagtggattccgccactgaacgagccagacaacggtccggaggaatcgggctgccagcgcggatgcccggggaattcttgttggtgcgttcctttccttggcagatgaggctgtgcccttgcgcggtctcgtcaagcgccgagccccatgacaaccagctgaatcaggcccgccaaggccattcccgcgaccatacccgcgccgaagataatgtgactgcctttcatggttcctcccttcgtttttaggggagtaattatctcacaggtacccgttttcataaagattttttccgggtaccatcttttgtcatttatccgtctgattcatctgcgatttggcggcgccaacccattttgtcaccaggttacccacacgctcctcgaggtcgtcctcgtagccgttttcgacaagtgcacggcgaacggactcgagatcctgggcgatcgacgccgccagcatgacggcgattttgacccgcacttttcttggactgagttgcagctgcattgaaatgatttccgtgttgacctgattccaaggtaccggccatcacgcagagagctccgcgacccgggcgacggcgattgttgccgctgcaaacttattgaacgacgggcccgccggatcgtgctcacgccgtcgttgtgcccgctatcgaggggcatattgcaaccactcatcgccgcgtctggcgcaaccggctcggcatcgccgcagaggccagcaccgctacggtttgtgcccagcaaaccatgtcggtgcgccgcggcgatggcgtctgacaatcgcggaaagcggcacacgagccacctgcatcgggcgcacccaacggatggtcttgggcagcgctggaacgggccgcccggccctcttcgattgctcgacgatgtagtagaaaagctggcgaagctggtcgcggttgccgcggaatccgggagtcgttttcaggccgtgcagcagctgctccagctcggcgtccggacgctggacagccgagcggatccgggcacggatggtatccatggcctgggctgtaatccgccacgtccatgtcaccggccggatccgctgcgtccgccttgcctcgcgcgggtcctcgagcggtttgcgatagcgcttctgcaggccgaccggcacgggaagccggaccagttcgtagcgccagatccacggcagatagtccgcatgggcatcgcgccatcgctccagagacgcgagcggatcatccccttcggtcttaagcagccagaactggaatgccgtctcgccgggacgcggaaacaggacaagatcgaaccgtgcaatgcccgatttccgcaagtagtggcggcggtccttgccagcagaaagctcgtatcgctcggcgaagcgctggaccattgcctgcactttttccagcggcacgatgccggtcacgtagaagcgataaccgcggcagatgcagtgctgcagatccagcattgcggccgtcacggacgaaggaacctcggggtcgagcattgcgaagtcactatagggaagggattcatgcgaggaggtcaaaagagcttccgcgtttttcgcgcgcacgctcacaccggacaggtacctgatgggcacgcgaccattccgggacctgccgggacggctcacggcgccgcaatttcagccttgctgcgcggccggtacctgatcaatgcctcggactttcggggcgcggccaccaacccgctttctcgtcgggcaaccacccgacctgcgaacggggcagccacgcccccgttcggtgcaccagcaccgcagcgccaactgcggtagctcgccgtcgcgacgtgcctctaatagggctcgcgtcgtggcaacgggcaccgcggggtgaaattccccgcgatgacccaatcgatggcggcatttttgagcgtgggcgacgcggacacgggcgcatcggcaacgatgccaacccggacgcaggagtagtgggtagccagtcccacccacgggcggccggcaacggtcggacgtgtgcgcggcacgtgggttcgtgcggatggcgaaagggcgcaagcctataagcgatccggcctagcggtttcggcgagggccgaggccggcgacaggaggcacccgcgggcgaaagccggcggggtctgtgatagctgaaacgtgtaacagcgtcctcgagaaggatgcttccgtgagtaacggtgatgccgtcgtccccacttcagttggggcgactgccaatggaagcgacgaaaaggagtaagcagctgcttgggaagctcgggctgccgaaagccgaaaggcggagacccagagggtctacttgagtcgtgatgttgagcggctaaaccgcgaacctgcgttctaacgcgggaaaaaccagtgggtgccgggtggcaccggatccaaccccattggtaagagcggggatcagtaggagcggatgacgtgcgatgcagtcgaaacacgtgtccatccgccggtattcggcgggtacgaaagtccccagcgagcgcagaggtgtggagggtgattcctcaaccgagcgtggcaggaaggcgcggctgagaaggagctggcacacgggtggtgccgtggccggaatcgcaacaggtggtgctgtcgattccctttcggtctgcgacgtacaggccccagtgaaacgggttctatgtccaattgttcaggaggtgtgcaatgcgtaatgcacgggtggctcccttcgcccgcgacccgacgcgctaattcgggaggacgcgaccagtccacatggtcgccggcagtgagcgacggcatatcgcgccgccatttcgtttgatgttcttatccagtccgatcgagcctgtggctcgatcggacctttcttacaccgccgcgcccaatcgagacatcgaattcccccgcatcgggacgcccggtacctcccacgcatcgcccactgcaaacggagattccaatgtccagcaccttcgatccactcgtctggttttttcagcctcgagccatggcgcaccttaaagcagcgctaccccgatatccgttcattgcatacggatctgcccatccctacgagatagaggaactgctgatgaagtttgaaaccctcggcccgctcgccggcccgaagcacgagccccgaggcgcgcgtggactgttgattgcacatgcgcagcacgctcactcgatcgactgggcgctgctgtcgacgaaaccggtcgagggcctgttgttcatggacacccgagacgaactgttcgttgcgccttggggcgataagtacgaactgaggaaggtgctgattgaagtgtcgtccgcagttcgatgcttcccggaccgaccctccgatttcgaaacgccgcaaatgaagctgaacgcggaacttttctgccggagagcatgggcgctaaggccgtccgcgaagaacatcctcaaccgcaacatcgatctcgcagagtcaagcagataccccgaaatcgaagtgcgagtcattgcccatcaaatcgatcgcctgcatgccttcccgctatgtgttcgagacatcgcaatgctgcgcggctgcgttgacgccattctctgtcgggcacccaacggatctccgtacccctggacgagaagcttggagcggtgcgttcggacgggtgtgaagacgactccgctatcgacgctgatcgcgcgctacaggagttcaggaacgctcctgccctcgactggcattcccccgggttgagatcatgcaagccgccacaaagacactcaccgcgggcgaactcgcgaagatggtcctccacagccgtcaccgaccccttacaacccgaagcggaagtcgtcagccgagaaaataccgccgcaaagctgccattggacgtgggggtgggggtcgatcgagcggctttgccgttctgcgcgctcgcccgcacggatctcgtctgccgacataaaaacggggcctcgcggccccgtttctcagtttgtgcatcttgctgcttgttagcggaaagagcgcaattcccaatcggctagcgtgggaatagtatcggcctgaaatgcgcggcacaagcgcacaggtggagggaatccgatgagaaagaaagcggtccgatatcggctggggcttgatctgggttccaattcgctgggctggtgcatcgtgcagatcaacgaggccgacgagcccgtcggcctggttcgcttgggagtgcggctgttccgggatgggcgcaaccccaaggacaaggcctcgctcgccgtcgcccgcagaatggcgcgcgggatgcgtcggcggcgcgaccgctggctcaagcgccagaagcggttcatggcagcgctgatccaacatggattgatgccagcggacgctgatacgcgccgggcactggctgccatcgatccctacgcactgcgcaaacgggggctcagcgaagcactcacgccgcacgaactcggccgtgcgctgttccacctcaaccaacggcgcggcttccgcagcaaccgcaaggtggacaaagccgacgagaaggagagcggcaagatcaagtccgccctcaaggaggttcgtgatcggctggccgcgcagggcgcgcgcacggtcggcgaatggctggcagaccgtcacgcacagcgccagccggtgcgggcgcggctgcgcggccagggcgccaaagccgcctatgagctttacgtcgggcgcgacatgatcgcggacgagttcgatgccctgtggtcggcgcaggtcggtttcaacccttctgcgctcacatcagcggcgagggatgaactgcgcgacatcctcctgcaccagcgcccgttacggcctgtccgacccggccgctgcacgctggaacccgatgacgagcgcgcgccgctcgccctgccctccgcgcaacgctttcgcatcctgcaggagctcaatcacctccgttacgaaaccggcgttggcgaggagcgggcgctgacgctggagcagcgcgatctctttacccgcctgctcgaaggccagaccggccccggcaagcgcgacaaggccgatgcccggggtcagctcagcttcgacaccatgcggcggatgatgggcctgcccgatacagtcaagttcagcatcgagtcggacaagcgcgagggcttgaagggcaatgctacgagcctcgcgatggcgaaggctgatcgcttcggcgtcgcctggcaccaactctcactggcgcagcaggacgcagtggttgaactgctgctggaagaggagcgtgagacggctattgtcgagtggctcatgaagctgcatgggctaaacgaagccgctgccctgagagccgccaacaccgggctggccgacagccacagcaatctgggccgcaaggccttggcgaaggtgttgccgcatctggcggccaacgtcgtcacctacgacaaggccgttctggcggcgggctatgccagccacagccagttgcacacgggcgaatacttcggccacagcgcactgccctactacggtcgcatcctgcaatcggcggtgggtttcggctccggcaatccggaagactccgaggaaaagcagtgcgggcgcatcgccaatcccaccgtgcacatcggcttgaatcagttgcggcggctggtcaatgcggtgatcgagcgctacggcccaccaacccagatcgcactggaagtgacgcgcgaactcaaacagagccgggatcagagggagcgtatccagaaggagcaggctgagaatcagaagcagcgcgatgccgaccgcgaggaactgcaaaggcatggcctacgcgacaccggcgagaacctgttacgcctcaagctatggcgcgaactgaacatccgagacccgctggatcggcgttgcccctacaccggccggcagattgggcgcgagaagctgttcagtgaggaagtcgaggtcgaacacatcctgccgttcgcccgcacgctagacgacagcatcgccaacaagacactggcctaccgagaagccaatcgctacaagaagaacagcacgcccttcgaggccttcggccagtcgctgcatggcttcgactggcaggcgatccaggaccgcgcggcgaacatgcccagcaacaagaagtggcgcttcgcggaccgcgcgatggaacagttcgagacgcgacatggcggtgacttcctcgcacggcacctcaccgacaccgcgtatctgagtcgcacggccaaggcttacctcagctacgtgtgccatccgaacgacgtgtgggtcacgccgggccggctgaccgcgctcctgcgcggcaagtggggcttgaaccagctgctgtccgacagcggcaagaagaaccgcactgaccatcgtcaccacgcgctcgatgccgcgacgatcgccgtgacggatcgcagcctgctgcagaaggtggccacactctcgggccaggagcggctcgaacgagagaaggaccgcatcctcgtgccctacccctgggagggctttcgcgatgcgctagagcaagccttgccgcgcatcgtcgtgagctacaagccggaccacggctatcaggccggtctgcacaacgacaccgcttacggctttgccgagccctatgagcccggcaggccttctcaggtggtgcatcgtgtgcctctgctgtcgctgaccaagcccaccgaccttgacgacattcgcgaccgcgcgctgcgcgagcgcatcaaggctgcggtagctggcaccgagggcaaggagttcgcggccaaactggccgcatttgtcgagcagaccggcatcagccgcgtgcgggttgctgagacgctaaccgtgataccgatggggcgcggcggctctcatcccggccgtggcagcgaagcgcggggcgcgccctataaggcctacaagggcgacggcaactactgcgtggagatttatcgcgacgagaacgggcgctggcgcgatcacatcgtcaccagcttcgaggccgcgcagattgcgcggagagacccggcgcggcttcggcacaagacgctggcgcagaatgggatgtcgttggtgatgaggttgtgtgcagacgacttcgtcgctgtcggttccgaaacgtatcgacgaatctaccgcgttgcccaaatgacggcaggcaagatcatccttgccgaacaccacgaaggcggcgacctgagaaatagggatcgcgacaaggatgactccttcaagtatctggttcgagcggccagcgcgctgaaagatgcagaggcccgccgcgtcttcgtcaccgaactgggctacgtcctagaccccggcttcaagccctgagccaagcctatgctcggccgcattgtcgagatcgcccaggatggccgccgtctctctgtggatcgcggctttctagtgatccgcgatcatgagcaggagcttggtcgcatcccgctggatgacatcgctgccgtcatcggcaacgcacacgggctcggctacaccaagaacgtgctggtagcgctggccgagcgcaaggtgccactggtcgttagcggtgccaaccattctccggtcgcctttctctggccgctggaggggcatcacgagcaagcgggccgcatggactcgcagctcgatgccagcctgccgctcaagaagcgcctctggtcgcagctggtcaaggccaagctgcaacagcaggcggcggtgctagaagcatgcggagaatcacccgcgctgatcaccgcactcatcccgaaggttcggatcggcgaccccgacaacatcgaggcacaggcggcccgccgctactggagccgcgtgatgggcgaaggcttcacccgcaatcaggagggcgacggcatcaatgccctgctcaactacgcctacaccatcctgcgctcagcgacggcgcgcgcggtgctcgcggcgggtctgcatccctcgctcgggctgtttcaccgcagccggcagaacggcatgcgtctggtggatgaccttatggaaccttatcgcccggtgatggactggcgcgtgcgcgagttgcatcgcgcgggcgcgagcactgtcaatcctgaagccaagcgccaactcgcgcacacgctctatctcgacatggacagcgaagccggccggactcccctgatggtctgcgtgcagcggctggcggtctcgctggcccaggttttcgcgggggagcgggacaagctggacttcgcactgccgctgcgtccgctgctcttcactgagagcggcagtagcgccttctgatgctgaccggctaccggctgatgtggatgctggtgatgttcgacctacccgtggtcgaagacaaggagcgcaaggcggcgaccgcattccgcaaggcgctgctcgatcaaggcttcgagatggcgcagttttcggtatatctgcgccattgcaccggccccgagcaggctgacaccttgaccaagcgcgtcgagtcggaactacccgacggcggcaaggtggacatcctctatttcaccgacaaacaatacgaacgcattgccaccttcgtcggcaagaagcgagctagcgcgagaaaaaatccagaccagttcaacttgttctagcccatgcgaactccgctttgttgcgccacatataacagaaaaccctgatacttcatggggttctgttacacgcagcgtaaccgattgggaattgcgctcaggccggaaccgctggggatcgcggatcatcgccggcacgagcgtaaccgattgggaattgcgctcaggccggaaccgtcggcgtgggagcgccactcttacggggagcgtaaccgattgggaattgcgctcaggccggaacctgttctgcatcgtcgagatggcgaggaacagcgtaaccgattgggaattgcgctcaggccggaactgttgggccgtgaacaacaacgtgctggtaagcgtaaccgattgggaattgcgctcaggccggaactcaaatgactcgtgggacatcgggactgctagcgtaaccgattgggaattgcgctcaggccggaacggatcgttcgccgtcgtgcgcgcgcgactgagcgtaaccgattgggaattgcgctcaggccggaacctcgtcaccggcgacgtcatctacccgcacagcgtaaccgattgggaattgcgctcaggccggaactcgccgatccctcatccgagagcccgtggtagcgtaaccgattgggaattgcgctcaggccggaacatgctgtggagcaaggggtcgccgttgtcgagcgtaaccgattgggaattgcgctcaggccggaacacgatgtgggtgacaccgtcgacgacgaggagcgtaaccgattgggaattgcgctcaggccggaacatctcggggatgggcaattgctcgccgtggagcgtaaccgattgggaattgcgctcaggccggaaccaccgcggcatcgaggtcatcaactgctcgagcgtaaccgattgggaattgcgctcaggccggaactgatcggctgatgagcgtggaggcggagagagcgtaaccgattgggaattgcgctcaggccggaacgttgaggacgtgggtgtagatcatggtggtagcgtaaccgattgggaattgcgctcaggccggaactacagatcgctgagcatgtccgcctcgtccagcgtaaccgattgggaattgcgctcaggccggaacaccgctaccgatagtctgcgcgacaccgacagcgtaaccgattgggaattgcgctcaggccggaacgtcagtgcaacactgaccattcccgctctcaccccgatgccgacgcttacggacgctaacgtcctgaccgatgtgttccagctgctcgtgagacctcagctggagagctagcccgcaatcatctccgaggcagaggcgcgcatacaccggatcggtcgaaaagcgcacaggcactgccgaggtggatctgccgcaagcaaccggtgttcactggctggagctggcacgccagcgacgctgagcagcccggaggcgatggtagcgggggacgaatgaaccgaggcagaacatcagcggctacagttggagaagctgaggcttgagatcgagtccctgaagaaaattcagcgacggtctgtgcgacggccttagttgatgggctccctgagatccaatcgactctctcgttactcatcaatgcctagtgccggcagtttggcgatgccacgagcaacttcagacggaagcaggtgtgcgtagtggcgccgagtaatacgactatctgagtggccgagcgccttggcaactagctcgatgtcacgggtcgccaacagtaacagcttgccgtaagttgatctcattgccttgaaggtgaccccttgcagcttgctggtctgagcggcttcgtgcatagggcgtgctgcctctgatttgcgccacgggcgcccatcttctcgccggaacattggttcattctgctctcgcccgacgcttatccgttcgaagaacttcttgccttcgggcgtcaacggctgccacaacaacttccccgtcttgccttgctgaattcgcacgacgccgccttcaacgttgaaatcgccgaccttgagagcacagagatcgccatagcgcgcgcccgtcatcattgcgcccgtgagcagctcacgcagttccggggcagcagatttgagcaaacggctgacctcatccggttcgagcatccgcggcagcggatcctcgtcaattgcaaaaggtttcactcgtgcccagtaatctgggtgagcatcggatagcaagccctctacctgggcccaacgaagcgccgccttgacggtggtcagaacgcggttggctgtcgcctttcgaccacgtagctgctgaggctcacgaggattgaagctcattaccttgccccgcttcgtcggaggagccttcgcgattcccgcatgccaagtctgtagtgtcttggtgtcgattgccgtgaccggcatttggccaatagtggcaccgtaacgatcccagctttgtctggtgagcttggcgttgccttcgctcatgacccggttctgccgcccgccaggaattgtctgccgcgccgagagataggcgtcgataacatcattgagcacgaccccatcgccgtagtgtcgtggagcacttaccgacttgccggccgcgacttcccgaacccgatccacagcttgggtgtaggtaagggtcacctttccatcggcgtcgatgtgatcgtcagcttgcccgacccgctttttgcggtatcggcccgcttcgagcttgcgcgagtaccagacgccattgctgcgcgcgttggctcttcggtatccgataaatagccccgggacaacctgccgccaatgcgggtcgtgtcgctcttgcagtttgagccgcgcctttcgagtttcgatccgcgcgtcgcgaggtgttctggccatatttacttcccacgtccccgcacttggtgtggcaacattatctcttaggtaattttaggtaatagacgaccccgaatcaatgcgataggcaatggacgtatctggacctttccctaggcattgctgtcatccgtggatgtccatgggcgtccattttccgccctttcacggcggtaaccggggttcgaatccccgtggggacgccatctcgcgctttcgcgtggcacgatggcccgcgccacacacgctcccggcgccctcatcccgatctcacgagtacgcagattcccgcggatcgcgtagtcttccgctccgggaacggttgccggcggacggcgaaccgcgtatgtcgggtggtgaagggagcgtcgccagggagacccatgagcaggatgcctgattcggatgccacgcggctctcggcggcggcagtggggccggcctcgtccgaggtgctgaagatgggcacgccggcgatcaatgccctgcggcgttcggtgagcgtcgcgctgacttcggtcttcaagccgttcttcgcgcagcttcccgaagcgctgcgcagacgcgcttcggtcaccgtgctggttgccgaacaacgcaactgcacggcactggcccgcgcggtggcctccgaccccagccgctggctcgatgaggtcctggtacgcgtcgacatcagcctgaccggctccgcagagtcggcgaaactggcgacgagtcgcgccaccgccaacgacgtcatggtgctgacgccgccgcagctgcgtgcggaaacgcagtttgccgcactcatcggcgagttcgacacccagctcgacctgatccggcgctcggtgcgcttcccgattcacgccggcgccctcgcgccggccagcctgtgccgtgcgctccgcgacacggcggtagccctgaactacggcagcgcacatctgcgggtgctgttcgaccagttcgacacgctggttctgccccagttgccctcgctgtacgaaaagctgctgggctcgctgaccgacatcgcctcgcgcgccgcggaagcggaagcgatgctcgcacacgagcaggcgcgctccgaggcgatccggcgtcagccgcctgccgagtcccccgcccccaaaccggcgccccctgcagccggttccgccgccacccgtgaaaccccggcgcccgaggctgtgcctgcgcctgcgcctcctgcagacggttcgcctgccgcgacgcccgcccgccgcaagaccgacaccatcgacgacaagacggcgtcgatgctcgcatccgtccgcgagcgcgtgccggtgagcaacgatacgtacaacgacggctcgctcgccggcgatctgctcgccttgcagggcgacacgccgctgccatccggcaccgaggtgccggtggacaagcgcaaggcgccgctgcagcgcatcgcgctggccggtcagttcctcaacgaggccatcgaagacccgttcgtgcccgaggagctcggcccgcagcacgaatcggtgcgattcccgctggtcaagtcggcgctgaccgatgcgacgctgttcaccgccgtcacccaccccctgcgcagtctggtcaacgagctgatgctcaagtccgcgacctcgcgcatcaccggcacggccgaggcgcgccacatggcggcggtcctgcagcaagtgctcgttcagttcgatctggcgccggacttcgtgcgcgaagcgatgctcaacgccgagccgatcagcgacaagcagatcaactcgttcttctcatcgcagaagcagcacgccgagaaacggcgcgaaaccgtcatcaacgaggccaagcgcctggtcgtgcgcgaactggaattgcgcaccttcggtcgcgccgtcccacagccggtgatccgtttcttcaataccttctggggaccgctgctggtcaaggggctgctgcagtacggagccgatcacgatcactggcgcaacggcctggatctgatggaacgcctgctcgacctgatcgagacgcccccggaagacccgcaggcggcatggcgcgaactgatctcgaagatgtcgacggccctggccggcgccaagctcgacgccacgcgcatcaagagcgccttgagtctgctggaagccgcgcgcaaggcgccaaggccgcgccagacgctctgagactggcgcccgcagcgaaaccggcgggcgcgggggccccgctgatggttacggcgcgtcgtccacggcgtcgcggaaccgctcgcgacgttcgtcctgtcgatcgcggaacgcctgcttcttctcttcgcattcggccggatgtgcagcgcagtactccttcgtgcgctcgatccgatcctgccgctcctgcttgagcgcctcgcactttccggggttctgatcgcagtaggccttgcgcgcatcgcggcgggcgtcacgcgtttcgcaggtctgcggattgcgcgaacagtactcggcacgctgccgcttgagctcttcgcacttctgcggattcttcgcgcaccagcccggtgccggttccgatggcggtgactccgcgaaggctggcatggccaacagaccggcgacgctgaggccgagcacggcgcagccacggaagagatgctggatgatcatggcgggaacctccacaagcgatggtgacccacccttacgctagcacgacgatctttcccgttcatgaacccccgatgcatgccgcccgacaaaaaaggccgggcgactgcccggcctttgggaacacatcgagacgcgcttgagcgcgccgggctcagttgaccctctcgagcaccgtcgccacgccctgccccatgccgatgcacatggtcgcgacgccgaactgcgcgtcctgctcgcccagcacatgcgccagagcgccggtgatgcgcgccccggagcagcccagcggatggcccagtgcgatggcgccgcccttgatgttgacgcggtccatgcgctccagcagcttgaggtccttcatcaccgccagggactgcgccgcgaaggcctcgttgagctcgaagtagtcgatgttgtcgatcgacagccccgcacgctccagcgccttcttcgtcgccggaaccgggccgatgcccatgatcgaaggattgcagcccgcagcggccacggcgcggatgcgggccatcggcttgaggcccaaagcctttgccttgtcttcggccatgaccagcgtgcacgaggcgccgtccgagatcgccgagctgttgccggcggttacgctgcccttgggattgaaggccggcctgagcttgcccaggtcttcgagattcgcctcgggccggacgacttcatcgaaatcgacgaggatcggcgcgccgtcggcatcgtggccggcgatgggcaccatctcgttcttgaagcgtccgtccttccaggccttgtaggccttctggtgcgacgccagtgcgaactcgtcctgcttgtcgcgggacacctggtgcgtctgcgtcagcatctcggcggtcaggcccatcatcgccgccgccttcgcggtcgtcaccgacagccccggatcgccgtcgaatccatgggtcatcggcacgtgccccatgtgctcgacgccgccgcagatgtaggtgtcgccgataccggccttgatcgacgcggccgcgatatgaatcgccgtcatcgacgagccgcagagacgattgacggtctggcccggcacggtgttcggcagccctgccttgagcaaggcgttgcgtgcgatgttgaagccctgctcgagggtctgctgcacgcagccccagatcacgtcctcgacatccttgcccttgacggcggcattgcgcgcgagcacggccctgatcagctcagccgacaggtcctcggcgcgcacgttgcggaatgcaccgcccttggagcgacccatcggggtgcggactgcatcgactatgacaacttcggtcatctcattcactcctgaattcggtggtcgcgcttacttcgggaagtagcgcttgccttcggcggccatcttcttcatcgactcggtgggctcgtagagcttgccgagcgacgcgtagttcgcggccttctcgagcaccgtcttcatgcccagcgtgtcggcgtacttgagcgcgcctccgcggtgcggaggaaagccgatgccgtagatcaggcccatgtccgcctcggtcggcgtctcgacgataccctcgtcgaggcagcgcacggtttcgatgatcatcggaatcatcagacggtcgatgatctcttcgtcaccgaagtccttgctgccgttcggctgcaccgacgcgatgagctcggccgtctgcggatcgaccttcttgaccggcttgcccttcttgtcttcttcgtacttgtagaagccgatgccgttcttctgaccgtaacgcttctgttcgtacatcacgtcgagcgcggacttgaactccttgttcgacatgcgatccgggtagccctccgcaagcacgtcgccgacgtggtgcgaggtatcgatgccgaccacgtcctgcaggtaggcaggccccatcggccagccgaagccttccatgaccttgtcgatcttctggtagtcgccgccgtcgcgcagcagcatcgaccagccgccgaagtacgggaacaggatgcggttgaccagaaagcccgggcagttcttgacgacgatcggcgtcttgcccatcgccgcggcgtaggccgcgaccgtcgcaatcgcttccttcgaggtcttctcgccgtagatgacctcgaccaggggcatgcgatgcaccgggttgaagaagtgcatgccgaggaaattctcgggtttcttcatcgccgtcgacaggtcgtcgatcgagatcgacgaggtgttcgacgcgatgatggtgccgtccttgaccagcccctccacctcggccagcacgctcttcttgatcttcggattctcgaccacggcctcgacgacgatgtcgacgttgccgaaatcgccgtagttcagcgtcggccggatcgtcgaaaggatcgcgccggccttctcgggcgtgagcttcttgcgcgagacctgcttgctcagcagcttgttggcctcgctcatgcccaggtccagcgccttgtcggcgatgtccttcatgatgatcggcgtgcccttgatcgcactctggtaggcgatgccgccacccatgatgccggcgccgaggaccgccgcctgttcgaccttcttgccggccttgatgtagcccttggccttcttcttgaggaactggtcgttgaggaagatgccgacgaggctgtcggcaaccgtcgtcttggcgaccttcgcgaagctctgcccctcgatcttgagggcatcgtcgcgcgacttgcccgcggccttctggatcgacttcaccgcctcgaccggcgccgggtagtgcttgccggcctgaccctgcacgaacggaatcgccgtaccgaagaccatcatcgtctcgatcggatcgagcttgagcggccccttcttctgcgcgcggcgcgcctgccagtcgtacttgcctgcgattgcctgctgcacgagtgcgatcgcggcatcacgaaccttgtccgccgcgacgacggcatcgacggcgtgaaccttgagcgcggcatccgccttgttctggccgccgcccgcgatccattcgatcgcgttgtcggcgcccgtcagtcgcgggaaccgcaccgtgccgccgaaacccggaatgatgccgagcttgacctcggggaaaccaacctgggcggtcgccgccatgacccggtagtcggtcgacagggccatctcgaagccgccgcccagcgcgaatccgttgatcgccgtgcaactcgggaacggcaggtcctcgatcgcgctgaacaccttgttcgcctcgaacgcccaggccgcgatctcttcctccgaacgttcgaagttggcgccgaactcggtgatgtcgg

SEQ ID NO: 430 - DNA, 15419 bp, synthetic construct
  source 1..15419: mol_type = other DNA
  misc_feature 1..15419: note = Synthetic
cgccgccgcctcaggctaggcgttcggggcaggtcggagggactagttcgaacgcctcgccatgaaggcaatgcgctcgaacagatgcacgtcctgctcgttcttcagcagcgcgccgtacaacggcggcagcgtcttcttggcgctggtttcgcgaagcgtggccgggtcgatatcctcggccatcagcagcttcagccagtcgatcagttccgaggtgctcggcttcttcttcagcccgggcagctcgcgcagaccgaagaacacttccatcgcttccttcagcaggttcttcttgatgtccggatggtgcacgtcgacgatcttctgcatcgtctccttgtccggaaagcggatgtagtggaagaagcagcggcgcaggaaggcgtccggcaattccttctcgttgttcgaggtgatgatgatcacgggccggttcttcgccttgaccaactgcttggtctcgtagacgtagaactccatctggtcgagttctcgcaacaggtcattcgggaattcgatgtcggccttgtcgatctcgtcgatcagcagcagcgggcggacttcggactcgaagcattcccacagcttgcccttgacgatgtagttgccgatgtccttgaccttgccgtcgccgagctgggaatcgcgcaggcgcgacaccgcgtcgtactcgtacagaccctgctgggccttggtcgtcgacttcacatgccactcgaagtacggcatcccgagcgcctgcgccacttccatcgccagccgcgtcttgccggtgcccggttcgcccttgaccagcagcggccgctgcagagtgaccgccgcgttgacggcgagggtcaggtcatcggttgcgacatagtcgcgggtgccggcaaaacgcatgagggatctcggtcgaaaaaggcgcttgtcaagtttagccgatgccctcgcgacatcgccgattgcccgcagcggtttgctacgatgccaactgacccgaaccacgccgccctgcgttgcggcaggaagacctgacatgccgaagatgacgtccaagatgaaaacgctgatcctcgcggcgctgctcgttccgttcctgagccttgcgcaggatgcgccaggcgggaatgcgtcgcggatcaagaagaagcaaaagccggcggtcgaaacgccggaacagctgccggaagtcacctacacgccgttcacgccgctgccgcccgaggccgagcccaccgccccgtcttgtgaagcgcccccggtgatcaaggctttcgcgtcgcagatccaagccgatcagttcaacgacgcgtttagcaactatcaggcgtgcatgaaggactacgtgacggtgcacacggcggcggccaatgcgcatgccgctgttgccaacaaggcggtcgccgaagcgaatgcctacatctcggagctcaattcgaggttcgcgaaggaccaggacaaggacaaggacaagaagtagtctgcggcgcctgcggcatgaaaggcggcgacaagggtcgccgcctttgcttcaagggctgtgcgcgtgcagtcaatcgttggcgcgtgcttccagcgccgcgacagccggcaaggtcttgccttcgaggaactcgaggaaggccccgccagcagtcgagatgtagcccacttgctcgccgatgccgaacttggcgatcgccgccacggtgtcgccgccgccggcaatcgacagcgctgccgacttggcaatcgcctccgacagcagcttcgtgccgttggcgaattgatcgaactcgaacacgccgagcgggccgttccagacgatggtgccggcgctgaccatgatgtcggacaactgcttggcggtatccgggccgatgtcgaggatcaggtcgtcggccgccacctcggtcgccttcttgaccgaggcttcagcggttggcgagaacgccttcgcggtcaccacgtcggtcggaatcggcacggacgcgccgcgcgccttgagtttctcgatgatgcgcttcgcttccggcaccagatcggcttccgccagcgacttgccgattggcaggccggcagcgagcaggaaggtattggcaatgccgccgccaacgaccagttggtcgaccttgtcggccagcgcatcgaggatcgtcagcttggtcgacactttcgagccgccgacgatcgcgaccagcggccgcttcggattgccgagcgcggcccccagcgcttccaactccgcggcgaccagcggaccggcacaggcgaccttggccttcagcgccagcgcatgcgtcgttgcctcggcgcggtgcgcggtgccgaacgcgtcgttgacatagacatcgcagagcgccgccatctttgcggcgaggtcttcgctgttcttcttttcgcccttgttgacgcggcagttctcaagcagcacgacctcgcccggggcgacgctgaagccgccatcaacccagttctggaccagcttgaccggctggcccagcagttcgctcatgcgcgcggcgatcggcgccagcgaatcggccggcttgaactcgccctcggtcggacggcccagatgcgaggtcaccatcacggccgcgcctttcgacagcgccagccggatgcccggaatcgacgcccggatgcgcgtgtcctcggtgatgttgccggcgtcgtcctgcggcacgttgaggtcggcgcggatgaacacgcgctggtgattcagatcgaggtcggcgagcttcttgaatttcatggactgctccgtgaggggtgaggcgtgaggcgtgaggcgtgacaacccgccatttgtctggcggagaggtcggaaccgcatggccgttccgcctcacgcctcacccctcacgaacgagcgtcagcgagccaccacgcgcaccatttcgaggcacttgttcgaatagccccactcgttgtcgtaccagctgacgagcttcacgaacgtcgggtcgagcgcgatgctggcttcggcgtcgaacaccgaagtgcaggtctcgccgcggaagtcggtcgccacgaccttgtcttcggtatagccgaggatgcccttcagcgcgccctggctctgcgccttcatttcggcgcagatctcggccatcgtcgccggcgtgttcagttcggcggtcaggtcgacgaccgacacgtcggaggtcggcacgcggaaggccatgccggtcagcttcttgttcagttccggaatgacgacgccaacggccttcgcggcgccggtcgacgacggaatgatgttttcgagaatgccgcggccgccgcgccagtccttgttgctcgggccgtcgacggtcttctgcgtcgcggtggccgcatgcacggtggtcatcaggccgcgcttgatgccccacttgtcatgcatgaccttggccagcggagccaagcaattggtggtgcacgaggcattcgagatcacggcctgaccggcgtaggtctggtggttcacgccgtatacgaacatcggcgtgtcgtccttcgacggggccgacagcacgaccttcttcgcgccggcatcgaggtgcttctgggcggtgaccttgtcgaggaacagaccggtcgattcgatgacgacttcggcgccgacgtcggcccacttcaggttggccggatcgcgctcctgcgtcagacggatcttcttgccattgacgagcagtgcgccgtcctggatggcgatctcgcccttgaaccggccatggacggagtcataggccagcatgtaggcgaggtaatcgggctcgagcagatcgttgatcgcgacgatttcgatgtcgtcgccgaaattctgcacggcggcgcgcagcacgttgcggccaatgcgtccgaaaccgttgatgccaactttgactgccatgttattcctcaagtcgatcaatcgccgtggagaagggtgcgccagcggctcgcgcctccggaatccgttcgggaacgccggggccgcgcattttatcccagacaaaaaaaagcggggctgatccgatcagccccgctttctgctttcaaaagccgtcaatttcggcgatctgcagccgatgagactgcaaggcgccaaatcacatcaaccacccagcgagaagttgatcggcagttcgacgaggaactcggtgaactccggaccgacggaggccggcaccggcgggaacttgccgatgcgacggaacacgtccttggcttcgcgatcgagatcgacataacccgacttctggatgatcgtcacttccagaatttcgccatcacgggcgatgcgaacgcgcagtttcgccacgccctcttcctcgttgcgcaaggacttggcggggtactgaacggtctgctggatgacgttctgcagcgtgttgtagtacgacgacggcacgccggtaccaaccacgcgagccggcggcgcgggtggcgcaggcggagcgggcggcggtgacggtggcaccgtcggcacatccacggaatccggtgcgttcgtcgtcggcgcttcgatcggcggcggcgacggagtcggcgtcggaacgattttcggcggatccttcggcggcggcgtcggaggtggtggcggtggcggaggtggcggtggtggtggcggcggtggcggagccagttcgacgatgaccggagtctttttcggctgcggtgccaggttggcttgcggccgcaccagctggatcaggaacaggatcagcgtgccgtggaagatgatcgagacaacgagcccggtactccaggttcgcttgcctttcttctttggattgctcacgtaggtatagctccagcccgcatcactgctgggcttcggccatcaacgaaaccttgtagaaccccgaggcgccgacgagactgatgaggtcgaccaccttgccgtattcaacgcccttgtcggagcggatatagaccaggttgtctgcctgcttcaccgaaatggcgcgcagagcttcaccgagttgatcgaaaggcacctgctgggtcagcgggccattgttgatgaagtactcgtccgacgtatcgatcgagatgatgagggggtcacgcggcttgcccatctcgtcgagagaggctttcggcagcgtgatcggcaattgcggcagcatcaggggcgccgtgaccatgaagatgatcagcagcaccagcatcacgtcgaccatcggcgtgatgttgatttcggcgaccgtgggcagttcgccctcttcgccgccgccacccgaggccttgacgttaagtcccatgacggatcaaccggccttggagcccggcgcgaaacgcttggccaggcgacccgaatagaggcccaccgccgtgccgagacggcccgagtaacggcccatgtcggtcgacagcttgttgtaggccatgatcgccgggatggcggccgcgaggccgataccggtggcgatgagcgcttcggcgatacccggagccaccgttgccagcgaggtgtcgcgattcgcgccaatgctggtgaaggtgttcatgatgccccacaccgtaccgaacaggccgatgaacggagcggccgaacccacggtcgcgaggaacggcaggcccttgttcaggcgacgaatctcgttcgacagttcgagacgcatggcgtgctcgatgcggtcgcgcacttcgtgcagtgcttcgtgggcatgttcgcccgagccttcacgccattcggcgttgccggcatcaatgaccagcgccagcgggtgcttcttgtcgtcggtgtagttgatcatgtcttcaagcgtgccggtctcgagcttgtcttcgagacgaccgatggccgcgttggccttcgccatgccgacaaacttttcgaccatcacggtccagcaccagatcgaaaagaacaccagaaggatcagcacgcccttgaccaccgggtcggcatgcgacaccagactgacgatcgacagatcagccggattgatgccaccggcggcttcggccgcgaaattgataaggctgactgccacgagtcgtactccgtaaggttgtgtctgatgcgccgctgctggatcgcgctgtcagtgctcgcaagagttgcaccaaccgatcccggcggaccggggaagcgcgaatactagcgagggacgcttgaaatacgcaagcaagcaaaaggcaatctttttcgtgtcattacggtgatttagatagctaaaaaccgctcgtgacgcgcgctttctcgacaacgaccccgattcacaaatctgtcatcaacgcagggtgacgaattcttccgcggctgtcgggtgaatcgccagcgtttcgtcgaagtcacgcttcgtggcgcccatgcgcacggccacggcgaagccctgcaacatttcgtcggcacctgcgccaatcacgtgcaagccgacgattcgctgctcatcgccgacgcagaccagcttcattcgggtctcgcgcttgtgatcgagcacgccgtagtacagccccttgaagcgggtctggtacacggtcacggcatcgccatgacgagcccgtgcctcgacttcggaaattccgaccgaacccattggcggatgactgaagaccacggacggaatgttgtcgtaatcgagcttgcggcccgccttgccaccaaacaggcgatctgccaaccgacgaccggctgcaatcgcaaccggcgtcagcgtgacgtggccgaccacatcgccgacggcatggatgctgggaatgttcgtggtctgccagccgtcgacctgcacatggccggcgtcatccatcgcgacaccgacttctgccaggccgcagtcgcgactgttcggcgagcggccggtggcccacagcaggcagtcgcaacgcacggtggtgccgtccgcaagcgtcagctgccgctcgccttcctgcagcgccacgctggcgagctgtcgaccgcgcagcacggtcacgccgtgatcctgcatctgctgcagcagttcgtcccccagcatcgcatcgaaatgggacagcagacgctgcccgcgcgcgatcagcgtgacctccgcacccagcgcccgcagcacaccggtcaactcgaccgcgatgtagccggagccgacgatgaccacccgcttcggacagtgatcgagcgcaaagaagccatcggagtcgatgccgtgttcggcccccggaatctcgggccagcgcggcctgccgccggtggcgatcaacaagtgtcgcgcgcgcagacggcgaccatcgtgctcgaccgtgtgggcatcgatcacgcggccacgaccgtgaatgacggtgacgcgatccttcgcgaggccctcggcatagacaccgttcaggcgcagcacataggcatcgcgccgctgcttgagccgcgcccagtcatgcgataccgagccgatgtcgaagccatagccgttcgcgtcgtgcaccatttcggcaatctgcgcggcatgccacatcagcttcttcggcacacagccgacgttgacgcaggtgccgccgagacgcccggattcaaccagcgccacgcgcgcgccatgctgtgccgcgcgccgcgccgtggcgatgccgccgctgccgccgcccagcaccagcagatcgaactcgacatccgtcgtcgccaccggtatcgcggcggaggccgaagccggatcgacgctcacatgcgcttccacttgatgttgcagccgacgcttggaatctggttctcgtcgacgggcgcgccggccagcaaggcatcgatcgcgcggcgcatcgccgccccggtcactggcttgccgttgcccgggcgcgaatcgtcaagctgcccgcggtaggcgagcttcagctcgctgtcgaacacgaagaagtctggcgtgcaggcagcgagaaacgccttcgccaccgcctgcgactcgtcgtagagataaggaaacggaaactgctgcgacagcgccagctcgcgcatcttgtccggcgcgtcagccgggtaatgctcgacgtcgttgctgctgatcgcgacaaacgagacgccgcgcgtccggtagtcctgcgccagctggatcaggccgtcgcgcacatgaatgacgtacggacagtggttgcagatgaacatcaccaccgtcgcatgactggatttcaggtcggccagcgaaacctcgcgcccgctgacgacatcaggcagcacgaactggggcgccggcgtgccaagcggcaacatgctggaaggagtctgaaccatcgcaagctccggaaattctgagatgagcattgacccgaaggccattctgtcgaccacaatcgaccgacagtcctgaaccgcagggcattctagccctcgatccgcaacatcccggctgttcgccgctgaaccggccggccggtgcacacccgaaacgtttgacttaagctatcggcttatccgcataaacagatcacccgaggaaaaccgctttgagcaccccatccagcagctacctcttcacctccgaatccgtttccgaaggccacccggacaagctggcggaccagatttctgatgcggtgctcgacgccatcctgacgcaggacaagcgcgcccgcgtcgcctgcgaaaccctcgtcaagaccggtgtcgccatcgtcgccggcgaagtcacgacgtcggcctgggtcgatctcgaagcgctggtgcgcaaggtcatcaacgaggtcggctacaactcgtccgacgtcggcttcgacggctcgacctgcggcgtgctgaacatcatcggcaagcagtcgcccgacatcgcgatgggtgtcgacggcactgaaaagaagcagaaggcaccggaagaaatcggtgcgggcgaccagggcctgatgttcggctacgcctgcgacgaaaccaaggaactgatgccggcgccgatctactactcgcaccgtctggtcgagcagcaggccaagatccgcaaggccaagaaaggtggtctcgcctggctgcgcccggacgccaagtcgcaggtcacgctgcgctacgagaacggcgaagcggtcggtgtcgatgccgtcgtgctgtcgacgcagcactcacccgacatcaagctcaaggacctgcgcgaagcggtcatggagtcgatcatcaagccggtgattccggcgaagtggatcagcaaggccaccaagttccacatcaacccgaccggcaacttcgtcatcggtggcccggtcggcgattgcggcctgactggccgcaagatcatcgtcgacagctacggcggctgggcccgccacggcggcggcgcgttctcgggcaaggatccgtcgaaggtcgaccgctcggccgcgtacgccgcgcgctatgtcgcgaagaacctggtcgccgccggtctggcgtcgaaggttgaagtgcaggtgtcgtacgccatcggcgtggccgagccgacctcgatcttcgtgaccagcttcggtaccggcaaggtcagcgatgcggcactggaaaagctcgtgcgcgcgcatttcgacctgcgcccgggcggcatcatcaagatgctcgacttgatccacccgatgtaccagcagaccgccgcctacggccacttcggccgcaagccgtacgacgtcacgctggccaacggcgaaaccttcaccgcgttctcgtgggaaaagaccgacaaggccgaagcgctgaaggatgcggcgaagaagctgaagtaagccgcgagcgacacgcggagcagtggacgaaagccggcgcgagccggctttcgtcgtttacgggagcgcaactccgaagccaaaaaggttgatcgctgcaccccactgcagcaacagcgccgccacgcagcggtgacatttgcaccgcgaggacgaaacccggggcatcaatcggctgtgagcgcaacctcagccgctctcccgcatctagcggcgatggcgatcagccgaagcgtcaacgcatccttgccgcagcctcggttcatcgtgggattccaacccacaaaaataaaaacggggcctcgcggccccgtctctcagtttgtgtctttcgacttgttagcggaaagaacgcaattcccaatcggctagcaactgcatagtatcggctgtaaaagcacttaacaagcacgcacggaagggaacgcgtccgatgaagatgaaagcgatccgctatcggctggggctcgatcttggcgccaactcgctagggtggtgcatggtgcagctcaacgaaacccacgagcccaccggcttaattcgcttgggcgttcgactgttccgcgatgggcgcaaccccaaagataaagcgtcgctcgctgttgcccgccgaatggcacgcggcatgcggcgacggcgcgaccgctggctaaagcggaggaagaatttcctggcggcattgacacaacacgggttgatgccggcggatggcaacgcgcgccgggcgctggctgccatcgacccctacgcacttcgcaaacggggactcagcgaagcgctcgcaccacacgagcttggccgtgctctatttcacctgaaccagcggcgcgggttccgcagcaatcgcaaagtagacaaagccgacgagaaagagagcggcaagatcaagtccgccctcaatgacgttcgcgatcggctggctgcgcaaggcgcccgcaccgtcggcgagtggctggcagaacgtcatgcgcagcgactacctgtgcgggcgcgactgcgcggacaaggcgccaaagccgcttacgagctgtacgtcgggcgtgacatgatcgccgacgagttcgatgcactctggtcggcgcaggccagcttcgatccgtcatcgttcacagcagcaacccgtgacgagctgcgcgcgatcctcctgcatcagcgcccgttaaagccgatccgaccaggccgctgcacgctggagcccgatgacgagcgcgcaccgctcgccctgccctcggcgcagcgcttccgcatcctgcaggagctcaatcatctccgttacgaagtcggcgttggcgaagagcggacattgactctcgaggaacgtgatctttttgcccgcctgctcgaaggccagagcggcccgggccgacgcgacaaggccgacgctcgcgggcaactcagcttcgacaccatgcgccggctgctggggctgcccgataaagtcaggttcagcatcgagtcggacaagcgcgacggcttgaaggccaacgtaaccagcttggcgatggcgaaggctgatcgcttcggcgcagcttggcacgacctttctctcgcacagcaggacgcagtcgttgaactgctgctggaggaggagcgcgaggcagtcattgtcgaacgactcatggccttgcacggtctggacgaagccgccgcgctgaaggtggccaacaccggacttgccaacagccacagcagcctgggccgaaacgcgttggcgaaagtgttgccgcaactcgccgcaactgtcaccacgtacaacaaggcggtgctggcggcaggctatgcgagccacagccagttccatacaggcgaatacttcggacacagtgccctgccttactacgggcgcatcctgcaatcggcggtaggcttcggcaccggcaatccagccgaccccgaggaaaagcagttcggtcgcatcgccaacccaaccgtgcacatcggtctcaaccagctccgaaagctggtcaacgcggtgatcgagcgctatggcccgccgacacagatcgcgctggaggtgacccgcgacctcaagcagagccaagatcagaaagtacgcattcagaaggaacaggcagagaaccagaagcagcgcgatgctgaccgagacgaactgcaacggctcggcctgcgcgataccggcgaaaacctgttacgtctcaagctctggcgtgagttgaacattcgtgacccgctggatcggcgctgtccgtacaccggtcggcagatcgggcgcgaaaagctgttcagcgaagaagtcgagattgagcacattctcccattcgctcgcacactggatgacagcatcgccaacaagacgctggccttccgcgaggccaatcgctacaagaaaaacggcacgccctttgacgccttcgggcaatcgctgcacggcttcgactggcaggcgattcaggaccgcgctgcaaacatgccaagcaacaagaaatggcgctttgcggcgaatgcgatggatcagtttgaagcgcggcatggcggcgacttcctcgcgcgccatctcaccgataccgcgtatctcagccgcaccgccaaggcctacctcagctacgtgtgccatccgaacgacgtctgggtcacgcccggccggctgactgcattgctacgcggcaagtggggcttgaatcaactgccgtcgggcagtaccagcaaggaccgtaccgaccaccgacaccatgcgcttgatgccgcaaccatcgctgtcacggatcgcagcctgttgcagaagatcgccacactgtctggccaagagcggttggcgcgggagagggaccgtatcctcgtgccgtacccttgggacggcttccgtgacgcgctggagcaagcgttgcctcgcgttgtcgtgagctacaagcccgaccacggccatcaggccggtctgcacaacgacacggcctatggcttcgtcgaacctcatgcgcgtggcaaaccgtcgcgagtggtgcatcgcgtgccgctgctgtctctgaccaaacacgccgatctggatgacattcgcgattgcgcgctgcgcgagcgcatcaagtctgctgtagccggcaccgaaggtcaggcgttcgccgcgaagctggcggcgttcgtcgagcagactggcatcagccgtgtacgggttgtcgaaacgctgacggtgattccaatggggcgtccagcgtcgcaccggggccgcggccgcgaagcaccggacatgccttacaaggcctacaagggcgacggcaattactgcatggagatttttcgcgacgaggccggtcgctggcgcgaccacatcgtcacgagcttcgaggctgcacagattgcgcgtagggctcctgagcggctgcggcacaagtcgcttgcccagaacgggatgcccctagtgatgcggttatgccaagacgacatggtcgcgttggggaccgatgagcaaaggaaaatctaccgcgtcatcaaattcacaaaaggccgattgacactggcgagtcatgagcaggggggcgacctcaagcgtcgggatgacaacagcgatgatcctttcgagtatctgagcaaagcggcgagctggtttcatgaagccaaggcccgtcgcgttttcgtcaccgagctgggctacgtgctcgaccccggcttcaagccctgatccgcgtcgatgcttggccgcatcatcgaagtcgcgcaggatggccgccacctttcggtggatcgaggctttctgctgattcgcgaccatgagcaggcgctggcgcgcattccactggacgacattgccgccgttattggcagcgcacacgggctgacgattaccaataatgtgctggtggcgctggccgagcgcaaggtgccgctggtcgtcatcggagccaaccactccccggtcagtttcctctggcctttggaaggccatcacgaacaggctggccgcatggacgcccaactggatgccagcctgccactgaaaaagcgcctatggtcgcagttgatgaaggccaagctgcaacaacaggccgcagtgctggaagcctgcggcgaatcgcctgatctgatcacagcgctcatcccgaagattcgggttggcgaccccgacaacattgaggcacaggccgctcggcgctactggagccgggtgatggggaaaggcttcacccgcgatcaagagggtgccggcgtcaatgccctgctcaactacggctacaccatcttgcgctcggcgacggcacgcgcggtactagcggcggggcttcatccctcgctcggactgtttcatcgcaatcgccagaacggcatgcgcttggtggatgacctcatggagccctatcgcccagtgatggattggtgcgtgcgcgaactgcatcacgcgggcacgagcacggtcacacccgaagccaagcgccggctcgtgcacacgctctatctcgacatggacagcgaagtgggccgaacaccgctgatggtctgcacgcagcggctggcaatctcgttagcccagatcttcacgggcgcgcgggagaaactcgatttcgcgttgccgctgcatccactgctcttgacccagagcggcagcggcgcgttctgatgctttcaggctatcggctgatgtggatgctggtgatgtttgatctgcccgtggtcgatgccaaggagcgcaaggcggcgactgcattccgtaaagccttgctcgatcagggcttcgaaatggcgcagttttcggtgtacctccgtcactgcaccgggccagaacaagccgataccctgaccagacgcgtgcaatcggaacttccagacggcggaagggttgacatcctttacttcaccgacaaacagtacgagcgcatcgcaagtttcgtcggcaagaagcgagctggcgcgcgaagaaatccagaccagttcgcgttgttttagcgttcgaggatgctgtatttaagatcctccggaataaaaaacccctgatttatcatgggcttctgttacagctagcgtaaccgattgggaattgcgctcagaccggaacgtagctgcgacgggtgcgccttcgacgaagagcgtaaccgattgggaattgcgctcagaccggaacgaacccggaaacaaacatcgcggcgtcaatagcgtaaccgattgggaattgcgctcagaccggaacgccagcgccgagcgtgccgaattccgcagtagcgtaaccgattgggaattgcgctcagaccggaactgtgaccccgttgccccgcccagccccacaagcgtaaccgattgggaattgcgctcagaccggaacaagatgctgtagtcggtcaccgcaaaggcagcgtaaccgattgggaattgcgctcagaccggaacgatggcagcgcgggcagatcgacgggatcgagcgtaaccgattgggaattgcgctcagaccggaacgtcgtcatgttctacgcgcgtcggttcttcagcgtaaccgattgggaattgcgctcagaccggaacgacggcacctattcgctctacaccgacccgagcgtaaccgattgggaattgcgctcagaccggaacaacagtcgacgaggtgctgcttgatgcaagagcgtaaccgattgggaattgcgctcagaccggaactacgcttcgtgccactcaatcagcatcagcagcgtaaccgattgggaattgcgctcagaccggaacgacgctggcgttccgtacgagaccgacatcagcgtaaccgattgggaattgcgctcagaccggaacaactgagcgccgcagaaaaggcggacttgcagcgtaaccgattgggaattgcgctcagaccggaacgctgcgctagatgcggaaagcgcccggacgagcgtaaccgattgggaattgcgctcagaccg

SEQ ID NO: 431 - DNA, 23213 bp, synthetic construct
  misc_feature 1..23213: note = Synthetic
  source 1..23213: mol_type = other DNA
ttattttcggaacaaattattagggaaaggcaagccgcctgatttataaatgtatcccataataatgattgaatggaaattttataacataaatttaggcgaaaaacaatcattatttgacaaaaggacaaaaataaattataagacagtgattaaaggctgtactttttgctttttttgagtataatattttccgatttgctaataaggaaagtaagaaacattgaagaaaattatttcagccacggaagcgggccgacttatcggaaacaatgcttcggttatgatcggcggctttttgaaatgtggaacgccgacaaaagtgattgaggaaattttgaaaaacggcgtcagcggtttaactttaatcgccaatgacacttgttttcccgacagtgaccgcggcaagctgattgccaataaaagagtcaaaaaggcgattgtcgcacatatcggaaccaatcccgaaacgggaaagcagatgaacgccggggaactggaggtcgaattgaccccgatgggaacgctggtggagaagattcgtgcggcaggttccggtttgggcggctttttgacgcctacgggggtgggaactccggttgaggaaggcaaacagacaatggaagttgacggcaaaaaatatttgtttgaaaagccgctgaaagctgattttgccctgatatacggaaccaaggccgacaaattcgggaatgtttatctggaagggacgacccgtaattttaatgttgtgatggcttctgcggcggatacggtcattgttgaagccgatgagctggtggacgacagtcttgatccgaatatggtaactattcccggcatttttgttgattacattgttgtataggtgaaaaatggaactgaccaaagaacaaatcagagaaacgattgcccgtcgtgtggcacaggagctgaaagaaggcgattacgttacgctgggaatcggcctgccgacagaagtggcaaattatattcccgagaacgttcatgtgatgattcagtcggaaaacggcttgattggcgtcggaaaaaagccggctcccgacaaagttgatccgaaaattaccaatgcgggcggtattccggtaacgacaaagcagggggcggccttttttgacagtcagatgtcgtttgcgatgattcgcggcggacacattgatgcgacggttttaggggctttgcaggttgaccaggaaggaaatattgccaactggctggttcccggcgtgtttgctccgggcatgggcggcgccatggatttggtcgtcggtgccaagaaagtaattgtggcgatggagcacttggcaaaagaacagattaaaattttgaaaagatgtacgctgcctttgactgccgcgcatgaagtcgatttgattgtgaccgagcgctgcgtgttgcgggtagaaccggaggggctggttctgcaggagattaatcctttgttcagcctggaagatattacttcgacaattacggccgatttaattattccggatgatttgctgcaagaagcagtttagacagatagaaaacggaaaccccgtcttgaggaaaggacggggttttttattgttaaattaagatattttaaaccggggagaggtatgctggttacagattaaccgggcagggttttgttttggctgtgtatcattcttaatttaaggatatacagatgctgaaacaaataatggctctgctttttgttttatcggcggcggggtgttcgccggttttgcagatgacgcgggaagaatgccgcgaacaaaaggaaattatcgggagcgttcggattattcgggcggagatgcgcgccttggcggcggcttatcggccgatccggagggagcggatgccgggaatgcctttcggatttaaccatccgtggacggtgggcgaagaccctcaaatgtgttatgtggaagtttatcagctttccgaggcgttatgttcggctttggcagatgccgaggcgggagcggccaaagtgctggttaacggcagcatgtggggaatttgcacggaaaatgcgcgtattcgctggctttttaccaaatttccggcatacagccgggaagaatatcggcttgacattcgcaaagcggcgcaataatctgagcgcaaagaaacattagcgaaagactgaaagaccatgaaaactgaacttctggcgccggcgggcgatattgaagccgggtatgcggcgctgttttacggggcagatgccgtttatctggggctgcagcaattttcggcgcgggcaacggcaaccaatttcagcgaagaaaaccttaatgaatttgtcggttatgcgcatcacctgggacgcaaggtgtatgcggcggtcaatacgctggtgcaggaaaaagaactttccgatttgctgaaaagtctggatatttgttcgcgctgcaaagtggatgcggttattttgcaggacttgggcgtggcgcggattattcgggagagttatccggaactggaaatgcatgccagtacgcagatggcggttcataataaagaaggggcgctggcgctgcaaaaggaagggttcagccgggtggtggtagcccgtgaactgacgcagggagaaattaaagaaattgccgctgttccggggttggaaaccgaggcttttattcatggggcactttgctattcttacagcggtctctgtctgttttcgtcggtggaaaccggacgcagcgccaaccgcggcaaatgtttatatccctgccgagcgaattttaccggcgaagccggggaaaagcattatttttcgatgaaagacatggctttacaggaagatgttctgaaaatgccggtaacgtcgctgaagattgaggggcgtaaaaagacggcgctttatgtggccgcggttaccgattattaccgccggatattggacggcaaaggggctgatgaaaaccgggccgaacatatcaaacagattttttcgcggccgtggtgcaaatttcatttcaaaggcaaagataaaaatgtgattgaacgtgaatttgtcgggcatcgggggctgctgatcggcaaagtggagcaggcaggcaaagggcgtctgacttttcacagcaaacataaggtagcgcgctatgacgggatacaaattgaaattcccggcatggaaaagccgttcggtttttcggtccagcggctgcgtctgagagggcaaagcgtgtttgaagtgccggcaggagaagaaattaccatggatttgccgccgcagacgccgcgtttggaaaaagggtggaacatttatctggcctcggcctccgaagttaagggcgcttatgactatggcaagcccaagccgggtgaatttcggcagaaagcggcggttgacattgtcgtcgagataaccggcggggaaattgttgctcgcagcggcgatgttgagtgccggataacaggtgattttgctgcggcagaacatcctgagaaaacggttgaagccgcccgcaaagcttttgccaaaagcggcgatgccgcggtggagccgggacggtttgaggtgcgcaatccggatggtttgtttgttccggtgtctttgttcaatgagctgcggcggcagctttatgcgcagataagtgttgaaaacaagaagggaaatctgccggagacggacgctccgcaccagattcaaaccgccaaatgggttataaaaaccgacagtttggctaaaattgccgccattgcgccggacgaaaccgatgaaattatttatctgctgaatgaacaaagtgatgtcaacgaattgaaaaagctgcctaaaaacaaactccgtctggcgctgccgacggtctgccgacgggttgacaagtttaagccgctgatagagactttgctggtgcagggatataaaaaatgggaaatcggcaattactggggattgtcggagctgccgaaaaacggaattgatttaagctttgacgcgcctttatatatgctgaatacccaagccatgcagatggctaaagagatgaatgccggacgggtgacgctttcggtggaagaccagcttgacaacctcagcctgattgccgcgcaggcgcctttaccggtgacaatggtggtttatcaggatgcggcattgtttaccagtgccgcctgtattcgcagtaatgcctgcaaagattgtccgcgcggtgaaaaatggctgaaattggagaaagacggacagaaatatcaggctttgtcgaaggactgccagacgatgctgtttgccgaacagccgttgtgttttgcggcagaggcggcagaaattaaggcggattactatcgggttgattttgtttataaatcatatgaagcagccaaggctgcgcaagtctggaataaagtccgccgctttgaagatgttgccaactgtcgaaaagctaatctttaccgctgtttatagaattgataaaaggattttccgacccggccgggagacggtgcggttccggccgggaagaaacggcagtgttcggagcgcctgccttaattgcggaaatattttttttgatagttttgcggcaagccgggaaaaaaacctttgctcaaacccagtttaatccgataaaaatccaataatcgcgcgatgatatggaaatctatgtccgccgacataacttcctgagcgtctatccgaaccggcggaatgcctgtggcccggctgacttcctccaggctgagttttttctgccgccgggcggaataaagttcttccgccaggtaataagcaccgtcaaaagggagctctttccagtgaaaaatatatctgtcgtccattagtcgtctccgaggctgaggcggaacttttcgccgtaaagtgcgagataacggattaagatgtccagattgacttgaggactgtcaaattgtccgctttcaatcttatcaatcacgtcaacggaaacattgagttttttggcgcagatatcaatcggctcctgctgttcggcacgcagccagtgaaatctccagccgagattttgcttatcttcaatgataaaatgggacaaatcagcttgcataacaacctatcctttcaaaaggcgggaggagctgaaaccctgtacatacccatatacagttatgcttattaccgtatccgtgccggacgaagccggcacggtacgggtattcgcaatactcctccccttaaaaagggtacgagtgcagattaacgcctgctgcgttgggtatgtaacatatttatctgtgtcggggtttcaaaccgtccacactgaattattatatgttataacttaagaattttacaaagccaataccgtgtttataaaattcagcagcttaatcaggttttatttgtttcgagctgccatcaaaacaaaaccctcagacctgaaaggtgtgagggagctagtaactgtaccagtcggacagccctccttattcgtgcggaagccgccttatattggaggctccctcacatgagagggtcttgtaactgatgaaagaattactaggttcccgcccgctctcacggttaatcaggtttggggttcggacgaaaccggacttaccttgcctgaaagctggttctactgtaaatgagagccggctaaattgcaaggggaaatttatgtaaggccaagagatgattttaagtttgattgatatatccggctgtttttttattatgttccggtttgagcggaatgttcggataaaaccggaaaggcgtataaattcagattacccggtcaagccgggtaatgacaggggagggagcactgattatccggtcaagccgggtaatggcacggagaaaggacatgaattatatggttatcagagcaatggcggagggaggacaacgagtgaggaacgtgaaggaaaaacgcgggattaaaaaatattttgaacaaaaaagaaaaaacgttcgttttaagaagtgtcagacttaaaaaaacagggcgttttatttatgaaaaaatttttgatgctgttggctgcggtaacgatgttaagcacggggacggttcaggcttttcccggccacggcggggcgcatttccgtccggggcctgtttattcgtatcatcggccgggagccgtcaggcacaagcatcaccgcagcgggacggctctggccgtggcggggacgattgtgggaatggcggcattagccaatttgctgacgctgcagcagacggttcagacctatgtgccggtacaaaccgccgttgtgccgcagccggttgcgacttccaactgcacaactaccgttaacaacggtgtaacggttcagcagtgtgtgacgaccggatattaattaaatatcaaataaaatgaactttaatgacaacagtctcgttctaataagggtaaggagtttgaaacatggatgacatttctcgtttgttacaggaggccaagccgctgtattttgcccgaaagcgccgcaacaaccggattaaagcaacactcggaatgctggtgtgcgtggtgatgatgagcagcttgtggccgcagaaatacaacacctataccctgctgccggatacggagtttgaaaatcaggtggcgcagatagaagaaggttcggttattgaagatatgggcttgccggttgacgaatacggcttgttgatggtcggctaaatgaaagaaattattgcagcgcatcagggccggattaaggcaattatcaaaaaattgaccggctcgtataatgaagacatcgaacaagaggtttatatcaagacctggcggaatctggaccgctatcatgaagaagggaagtttgttcagtggataagcgctttggctgccaatgtctgccgcgattatctgaaatccagtcagcaccgggccgagctgcgcaaagcaggtgacgaatcgattttggaaaaagtggccgtcggcggaaaaatcgaagagcggtttgatgccagagagcgccagaaaattattctgaaggccgtggacactctgccgaaaaagctgcgccaggtgattattctgtttgagtttgaagagatgagttatgagcagattgccaaaaagaccggcgatccggtcggaaccatcaaatccagactctttaatgctcggaaacttttgagcgaagtgttacaaccgttaaaaggagaatgataatgaagaaagttttattaactgccgtttgtttcagcgttatggctttgggcgccctgaatgttcaggctgccgatgatatgccgctgccgcctccgccgccgcatcacggagatgaaatgctgcctcctcctccgccgccgggtgccgataaagcgatggagaagaaaatggaaaagatggagaaaaagatgtctaaaaaactggcggacgatttggggctgacaaaagagcagcaggagcaggccgagaaaatccgcaaagaaggccgtgaaaagcttaaaccgctgtttgaggagatgaaagacattcgtgagaagatggataagctgcgtgaagacaatatgctggagtttgaaaaaattctgactccggagcagaaagaaaagcttaaagacatcaaagcccggcatcatgaagaaatgaaaaagcgccatgaagccaggaaagcccgtcatgacatgcgccgtgaccgccatgagaagaagcttcatgacgttcatgacaaagactgatttttcaatcagtaaatatcccgccgttaaggcgggatatttttttgttggcaatttaaaattaaccgatatatgcttaatttattacagatgtttgtcagcgagggaaaaatgccgatagccgggttgattgtgattttatatgtggtgattgccgaatggcggattgccaagatgaaaaaacgctggatcagttgtgtgtccagcttggccaaaatgcaaaaagacaaaacgctctggtattccggcgttctgccgcaggctgatgcgctttgcctgtttgaggatgcagacggaaagtatttgatttcgacgctgaacggcacgccctccgccgatttttccaagattaagcgctggatttatcttaaagatttagaaaatttgtaaaatttaatttgcacggcagtcaaaaagtgttaaacaagtttccgtgaaaataggaattttgtttatattgttgtcttaaaattattttttatgaaaagaaaagacttttatctgttccgccacggcgaaaccgagtataaccgcctcgggctgcgtcaggggcagggaattgacgccgggttaaatgaaaccgggcgtttgcaggctcaaaaactggcggtttatctggaagaaaaggagatagaggtgatttatacttctcctttgcggcgggcaaggcaaacggcagagattgcggccgtacggctctgtattgcggttatcagtgacgaacgcttgctggaaggcaatttcggtgcggcggaagggctgtccaaagaggaagtgaaacgccggtggccggagattattgacagctggtacaagccgggtttggcgatggcacagggatttccgggcggggagagcaaagcagccattcaacggcggatgcagcaggctctggccgatttgctggagaagcctgaaagtgttatcggcatttcttcgcacagcgccgctttgcgctttttgctgatgacaatgggcggcaacggcgaaaaactgccgaatgccgaagccatacacgttgtttgggacggaaactggcggatagaagaatgacttgaggataaaaaccgggtgtgcagcccggtttttttgtgtcataaaattttgttgcgaaaatgtaaattttgtctataatgttgtcaagttatgaaagtttgagaaggaagaaaaatgccccgttccaaaacaattcaatccggcaggcctgtccgcagctgggaacagccgtttcgggtggccgatttgtttcagacttatctgccgatgctggtcctgattgtcattatggctctgtttatttataatctgggatatttttacgggttggactggcgctatatgagtctgctgcggacaagggactattacagcggaacgctgccggggcttgttctggggctgattttatacacttctctgatagtacagattttagacagttcttccgggccgtatcagaaactgctgcataagctccgcttttggtgggcaaaatatgacgggccggcagacagcctgcagcaaattgcgcgtttgaaaaccgagctgtggaacagtgccttggagcagtggctcttgcggttgcaattggcaaaagcttacggcaaaaatacataccgcaaattatcgcggcggcgggggcggaaggtttcggtagagcgtttgcagcgttttctggctgccgaaaaaggccaatatgacaagctggtttataaatatgagctttcgcggaagaaaatgtggcccgagttaaaagtgctgggcggaattgctcttcgtatcggcggatggagcctgctgggagcagcggcggttgcggcagtttattttttgtttttgattccggtgtacgggaaagtctgggcagcgactccggcttatttcttcggcggattctttgttacggttattgtgctgctggcggatctggcgttgcggattgttcaccacaatcgcagcgttttgctgctgacggcggcagtgtggggaagtttttattgcggcatgctcggctgccggcaggatttgcaacagcgggaagttcgtgttattgacgacgaaaaccgggaacattatctgacccgggcggtcaatcgcggttattttgtccgcagcggcagcgaagttctttttattcccaaactcaaagccgtccgtttggaacaaaatctgagcattcattaaagaaaaggcagagacggaactctgccttttaattttgtgaatctttcatcttgttaacggaaagaccaccttttcctatttgctatgttatcttttgcttgataacaattacactttagattagaattttcaaaaatgcaacaaaaaaaagaggagatgtcatgttttatcgtctgggaattgatatcggagaaacttctatcggttggtttatcttgcagttggataaaaaattggaaatctgcgatattgttgatggaggtgtgtatatttttccggacggcagagaagccaagtcccgcgagccgttatctgtttcccgccgtacggcgcgcggaatccggcgtaaccttgatcgtaaaaataacagaaagcgccgtcttatccgtttgttggaagaaacaggaatctggccggacggcattgccgaacaaaagaagcttgaggcgttggatccttttgttttgcggcaaaaagcggtaaatgaaaaaatttctttgccggaactggggcgggtattgtttcatttaaatcaaaggcggggctttaaatcgaatcgcaaatcagacggcaaggaaagtgaaagcggtaaaattaaattggcggttcaggctttggaaacgcagctggcagaacaagggtgccggacatacggcgagtatttatgccggcgtcatgaaaaacggataagcactaaagtcagaccgatggcggacagtaaaggttatgagttttatccgacccgggaaatggcagagcatgaatttgatttgataatgtcaagacaacagcagtatcatcccgaacttacaagcgagattacggaatctttgcgagacgtgattttctttcagcgttctttgcgtccgcaggctgtcggaaaatgcgagcttgagccgcaagagaatcgcgctccggtatggcatccgctctttcagagatttcgcatattgcaggaagtcaataatcttgatttggttaaatcgacgccggatgaaatcggtttgacggcggaacagaagaaaaaaattcttttgatgctgcaagagggaaccgggctgaataagcagggtttgttgttatttaccaaaattaagagcaaacttaatattccgacgaagagaaaattcaatttgcagagcgataaacgcaccggcttacagggcgattgggcggcttggaaattatctgacgacaattgtttgggaaaaggctggtttaagatgtctcccgacagacaggtcgaattgttggaattgctgcataacgccgaagatgacggcaaactgaaacaggatcttatcgatctgttcggtttgaatgaagaacaggctgaaaacgtggcaaaacttaatctgccggaaggatatgcttctctaagtctgaaagccataaagaatattctgctgtatttggaacagggaaaggtttattccgaagcctgcaccttagccggttataaccactcagaccgcagaacaggagaaatctacgattatttgccgtattatggcagaattttaaaatcggcagttatcggcggtcggtttgaaggggaagaacccgatgttgacgaggatatcggtttacaggaagtttatttcggaaaaattaataatccgacggttcatgtgggattaaaccagctgcgaaaggtggttaatgaaattatttcccgttacggcaagcctcagcaagtggttgtcgaactggccagagagttaaagctgggtgtcgaaggtgttcgcaagcttgagaaaaggcaaaaggaaaatcaaaaagacaatgagaagattgcggaagagcttgagcgtgcgggacagccgaatacttatcaaaaccgaatgatgtataaaatatgggaacgtttggcggagaatccgtcgcagcgctgctgtccgttcagcggccggccaatcagcgtttccgatttgttcagcggggcttttgaaattgagcatttaattccgttttcccggagctttgatgacagcattaacaataaggtcatatcttcccgcgatgcgaaccgtttcaaggcggaacggacaccgtatgaagcgtttggcaacagtccgggaaattataaatgggaagagattgtggcgcgcagcgaaaatttgcctagagagatgcaatggcgtttttcagcagatgcgatggaaaaatttgcggaagaagatggttgtttggcaagaatgctgaccgatacgcagtattttgctcgctgtgcgttgcaatatcttgaggccatttgcgaaaatcagagcaaggaccgcaaaatggcatggggaattccggggcagttgacggcgatgttgcgggataaatgggggctgaattccctgattaatccggcggacaggaaagaccgcagcgatcatcgtcatcatgcggttgacgcttttgtggtggcttgtacatcccggtcattactgaaaaaaatggcagatgccgcacgcttgtatgaaaaaacggatgagggtgaatataagcaaatccgcgagaaaagggaaaagctgattgaaaatatgcctttgccttttgaaaattttgacagggaaaagctgcagcaatgggtaaacggcctggttattgcttttaagcccgaccacggtgtgcaggggcagctgcatcgtgacacttgttacggttatattgaaaaagggagcaacaaagggagctctgtttttgcggttagaaaggatttacgggcagtcgttgaaggttcggcaaaagatggaaacaagaaaattaatgaaatagccgatgtcgcaatccgcagcaaattgctggatttgctgcaaaacgttgaggataaaaagcagcggcagcagctgacagaggagtttatggctgagacaggcattcgtcgtgtgcgctgccatattgaaaaatcagacagtgttatgattccggtgagggacaacggcggtcaaatttacaagtattatgaatccgggaataacagccgtgcggatatttattgtgcgacaaagggcaaagatgccggaaagtggaaatgtgagattatttcgacttattctgccaatcaaaaagattttgtgccggaatggcggcggagagatccgcatgccaaattgattatgaagctgcatattaatgatatggtggcttatgatgaattaaacaaaggaacaggtcagacggaacgggtaatagccagagtgaaaaagatgactagcgggttagttttcttaagggggcatttgattgccaaagaagaaggcgataagttaagttggggagcaagtgcaaaccagatgcaggagaaaaatctgcgcaaagtttatgtcgatgctatggggaaagttaaggatccgatgtttaaaaatgaaaggaaagtttcatgagcgggcagattatagagattcaaagcgataaccggcatttatcctgtgagcgcggatttatgacggtgagcagtgaagggcaagttgtggcaaagattcccatgagtgatgtagaggcggtgattaccgcctctcatggtatcagttacagtaataatttattggtacgtttggccgaggagaatattccgtttgtgttttgtaacaaaaaatttcttccggtcggttttttatggtctgttgctgggcagtatcgtcaggcgggagtgatggatgcgcagattgccgtccatgaaaaaagccgcgataaattatggaaagaagttgtgaagaaaaaaatatattttcaatataaggttttggaaaccttggctttgccgcatgaaccgctgaaacaaatgattgccaaggttaaattgggcgatgttgagaatattgagggacaggcggcccgaaagtattttacgactttgttcgggagtgattttcgccgtgatcgggatagcggcggtattaacagcttgttgaattacggctacattattctgcgttcggcaatggtgcgggcggtgatgggggccggactgcatccgaccataggtattcatcataagaattatcttaatccgatgcggttggtcgatgatttgatagaaccgtttcgggcgatggttgatttgaaagtttacggattaaacaagcagggcaaaacagagctaacatcggagataaaaaagcatctggttggtgttctgcatatggaaatgtattcggaaaaaggtctttccaatgttggggtttgtatgcaaaaattggctgtttctttagcgaagtattataagaaagaaacagaggaattgctgtttcctgattttgtggcgccggtatttatgcaggggtaatcttatgggaattgcagtaagcggagtaaagctgatgtggatgattgttatgtttgacttgccggtagggacggataaagaacgtaaaagggcgactaaatttagaaattttttgctggacgagggatttgcgatgagtcagttctccgtttatcttaaattctgtggcactaaagaacaaacagctccggttgtcaaacgtattgtggataattcccctaaggatgggcaaatcagcatcttgttttttacagataagcagttttctgatatcataaatatacagaatcgggaaattattgaaaacaaaaatataccggaacaactgttgcttttatgatgaaaatttgttgcaaaaatagatatgaaaatctccgcaaatccttgttagaaaatagtttgcggagattatattatagcaaataggaaagagtggtcaagccgcaactcaacactaaaataaatccaattgtcctgtattatagcaaataggaaagagtggtcaagccgcaacacgaccagcttcgtaacgggaattctcacaattatagcaaataggaaagagtggtcaagccgcaacgtggtgttttgttcatacaaaccgcctttaattatagcaaataggaaagagtggtcaagccgcaactttggacggcacaaacagcgcagagtttaaattatagcaaataggaaagagtggtcaagccgcaacgttcggtcaattggttaaataaatcgacttattatagcaaataggaaagagtggtcaagccgcaacatgatgcccccttttattttaacgacggaaattatagcaaataggaaagagtggtcaagccgcaacctttttgcctttcttcaatatactttgttaattatagcaaataggaaagagtggtcaagccgcaacaaatacgacatttatctctttctccctcatattatagcaaataggaaagagtggtcaagccgcaacggtgcaaatagatttttcatttttaaccttattatagcaaataggaaagagtggtcaagccgcaacagatacaatccagatttgttacccaatcaaattatagcaaataggaaagagtggtcaagccgcaactcttggaatgaagcaataaaaatagattttattatagcaaataggaaagagtggtcaagccgcaacgatttttggcgaatacatcctttaagctttattatagcaaataggaaagagtggtcaagccgcaacagtattagtatctccatatactttattgggattatagcaaataggaaagagtggtcaagccgcaacaatgaaaaccctactgtaaatttatataaaattatagcaaataggaaagagtggtcaagccgcaacgaagtattgtcttggtagcccctgaccgtaattatagcaaataggaaagagtggtcaagccgcaactccatacccgttaactgaaccggtaccataattatagcaaataggaaagagtggtcaagccgcaactcttctgatttttacaaaaatctgtggtaaattatagcaaataggaaagagtggtcaagccgcaacgataaactaggaatttaaaaaatgagtgaaattatagcaaataggaaagagtggtcaagccgcaacttttgcttgttctgttgcagatagattgtgaattatagcaaataggaaagagtggtcaagccgcaacctatcatcaaatacagcaattacattgcaaattatagcaaataggaaagagtggtcaagccgcaacttagtttggttaattccattttttgatgaattatagcaaataggaaagagtggtcaagccgcaaccttatgacatgtaattgcaattttcataaattatagcaaataggaaagagtggtcaagccgcaacaatacttcaacagatattcatttaagcaatattatagcaaataggaaagagtggtcaagccgcaacagcatttgccacaataacacgagactttacattatagcaaataggaaagagtggtcaagccgcaacttagttactgtttttagtgatttagaagacattatagcaaataggaaagagtggtcaagccgcaactcgcaagctcttatcaaagcaatgattgatattatagcaaataggaaagagtggtcaagccgcaactgccattaccattgccactttgattactgcattatagcaaataggaaagagtggtcaagccgcaacagcggttgcgattgcactatttagatcagaattatagcaaataggaaagagtggtcaagccgcaactcggtaaaggaaacaaacgtattgatgtcattatagcaaataggaaagagtggtcaagccgcaacgcgtaacgaactgtacaataacaattaattattatagcaaataggaaagagtggtcaagccgcaactggagaaaatgaagcctgtagagattcttattatagcaaataggaaagagtggtcaagccgcaactaagcaatattcaaggcgtattgaacagtcattatagcaaataggaaagagtggtcaagccgcaaccaatatcggcgtcaacctgtcctgaaaagtattatagcaaaaaggaaaaggtggtcaagccgcaaccagcaaccgctccgcccaacgatagatataattatagcaaaaaggaaaaggtggtcaagccgcaactactggtcaatctgtccgcgcagcggctcaattatagcaaataagaaaaggttgtcaagccgcaacgataatcataccacggttaaaaaagctgagattatagcaaataagaaaaggtggtcaagccgcaacaggcgccgggtgctgccgagttggacttccattatagcaaataggaaaaggtggtcaagccgcaacgagccgcagacaattacgactgaggccgcaattatagcaaaaaggaaaaggtggtcaagctgtaacgaaagctgcaaaagctttcctactgccgcgataactacggggtattcttcaaacgcccgggcgacaacgtgcagcagattgacacttcgctgactgattttgacgcgctgattatgacccagtatcaactggtggcctcaattgcgcgtatgccggcaaccaaactgctgaagacgcagccgaaaggctttaacgccaccggcgaatatgagatgaaagactatattcaggagcttcagcacctgcaagacaatcagatgaagcccctgattgagcgcaacaacctgctggtcgaaaagtcagagttcggctattcctacgagctggaagccaaattcaacccggtcgatatgccgaccgagcgtgaactggcagaagtccgcaagattgatgccgacaccgacatggttctgattaatgccggggctatttcgccggaagaagcgcgggcgcggattatcgccgacccgaacagcggctacaacggcctgccggcagaaatgccgcacagcgattttatggaagaaaatttccttgatgacgaaactgcagcgggcgaacagctgtttggagagcagccggaacaaacgcttgacgaatggaacgaggaagaccacccgcgcgatgacgacggcaaattcggcaaaggcggtggaaaggccaaggaagatgatactgcaaataaaaacgagaaaattgaaaagattaaaatcgatttttcaaaagataatattcttcccaagttgaatgaagaagacataaagactttaggtatagaaaataaagctgtacgtcttaaaaaaaatattattgatagaaatgcaaaacgtcatcctgatattaaggaggaagaagcggcgagcctgataggaaaagcgctttattctccggaatatattgttccaggcaaacgagaaggtgcttttcactttatctcaaagagtaaagatgggaaaagtcctcttgtgcttcttgatgtagaggaaagcaaagacgggtatttagatgtcgtccatttcttttatgtcagggatagaggaaagaaagcattaataaaataaaaaaaacggtaaggagggactgccattcccctcataagcttgataaaatcaagtgccatccggggcagttgcccttgcgggctttatggtcttcttaccgtttgataccaatataataccctgaatcgcaataaaaagcaagcaaaaagttctatggcgcagtcacaaatcatacgcggcggcaagctcaatgccaatgccgggatagaatcctggtatatgggagagctggagaaactgagccgggcgatgacccgtgaatgtgcccgcgagctgaaaaagctgtatgccaaggaagacgagcagataaaatttgccgaagacgccggcatttcctcgcagatgcggattaagctcaactatctgcaaaagaaatacggcgataagtttgccgaaaagtcaaaagagctgtccaaaaaactgctgacaaagctgattgcctaattgttctcagggcgggattctctgatgagattatcgacgaacgggggcagggtttgtccggccgggccgtagatatggtggtcgaagtaatagttgttggcggttggttcgagtgtaaattcccaggtgtcggcgccatggtatttggctgtctgcacaaaggctgcggcgggaaaaacgacgccggaagttccgacggaaataaataagtcgcagttttgcagcagttgttcgaccttgtccataccgagcagattttctccgaagaagacaatattcggtttcatcatgccgctgataccgcattgagggcaggttgtttcagtatcgacatcgccgaaagtttccaagatatggccgcagttaaggcagacggcctggttgatttgtccgtgaatatgacagatatttgtatttccggctttttcgtgcaaggtgtcaacgttttgggtgataacgctgacggtgcccgggtattctttttgcagtttagtgatggcgagatgtgccgggtttggtttggccttttgaatttcaattttcagttcattgtaaaaatcgtgcacgagggcaggattgcgctgaaagccttcgacggtggcaacgtcttcaacgcgatggttgttccataaaccgttggaactgcggaaggttgccaggccggactctgcggaaattccggctccggtcagaatgacgatatttttataaaggcgtgacattgttcatctccttgtgtggcatttgcctttaatatagcgctttttttgtttctgtctgcatttttttatagaaatctttaccataatgtggtattttatagacaaataaacgacaaaaaaagagagcgttatgggaaaaagacctcgaatcagccgatcggatttgcctaatcaggaacgggttgcgcttttgaacaagtttgatgcagcgtttggtgcatttcaacgtttgcaagagcggcgccgggcctgttccgacgaggtggaaaagcggcggattaacacgctgctgaacggctatcgttcagaatttcagcagttgtttgcacaactgaagctggttgacctcggctgtaaaaataacatggaagctttgtttaacaattactgtgagagctataatgtttattttggccgcaaactgggaaattatgttcgggatgtgttgcagtccgaggaaattaaaaagattacccatttgattcatacggtcaaaaatgacgaagaacgggctaagcttcaggaatatatcgacaataagccgcaaagcgaactgaatgcgctgattaagctggccgtgcgcaattatcaacagaatcgcagtgactataaccgggcgaagacgaatgactttctggcttattttcataaaaaaatcgagtgtaaaccatatacgaaagcaagcgaagacgaaataaaggcgacccgggctgattttaacggattttttcagattcccggggttgaacagctgaaacgttataatccttattcggaagcatacagagatttcagccgtcgtccgtcccggtcgcggattgatatttcgccgttcagctatgatttcagccgaagcaaggcatggcaggcctgctgccggacgacgatgctgtcgtcaattgaaatgccgttgcgtgaggcaatggcccgacagggcgttccgcctgaattgttgccgaaaatgaaagtggcggatttcgggcgcattttgttcaatgagtatggcaaggagccgtatcatccgggaagaggaaatattcttgcgctggaagacgtggttcccgggctggacagccgtcataaagcgtttttttggaaatataatgccattccgacgccggaagctcagaaaaaattttgcgactctctgctgaagcacggcgtttctcaggaatatattgacgtgctgctgccgagcattttaaacgaaggccggccgaatcccaaagttgaccgaaagaagtttaaaggggttattccgtttttttccctgcatcataaatgggcgattcaatatctgggcggcaaggcaaacagtcagaagaattatgtgggaattgccgaattcaaatcagtcgacgattggtccaatgatacgccgcagcatgacatttggcacgaggccgatgccgttatccgcaaggcgcatggcgaactcggcaacggcgaccagctttatgaaaatgttttggccggcgatgagcaagattccgattttattgaatatctggtcgatacgagatatgacaaccaaaatgacgggaagtactggaccgtcagtatggggtataaggcggaagacaatatccgcggagagataaaagattttgcaataaccaatgaaaaagcaaaatccccggctaaaaaggagaaaaacattgataaaagatatcgcccggcagcttatgcaagatgaggacgtttggtgcggagaggcggttaatccccgttatctggatgattgcaagaagtatttggccgcagaagagcgttgtgcgctgccgccggattatgttgccttgctgcgatatgtgaacggtgctttttccgatcgggctttgttgttcggagtgatgccggaatcctggccggggctggaggatgttgtaacgcagaacgaacgttataattcggatgtcttcggcgagatgattttgctgggaacaaatgattttgattggctggtctatgatgccgcgcaggaggaatatcagatacgtgagcggcagggaatgacagttattgagaattttgccgatttggagcaagctttgcattattggtttttttagaaagtcgttgataaaaaatattttgtattaattattttaaggagccgtgttaattttagtctaaaggagaattttcttatgactaaaattgatttggtttatttgtggtgtgattctactgatgaagagtggaatgccaagcgaaaaagatttcagcaatatgattgtattgaagaaacagcggcagctgattgcagatttattaataataatgaattgctgttttctatgcgttcggttgcaaagtttgttccttgggttaatcaaatttatctgattactgatcatcaaattccttcatggttaaatgttgaacatcctaaaattacgttggttaatcatgaggatattttgccccgagaggttttacctacttttaattctatggctattgaaaccgggatacataatatcaggggattgtcagaacattttttgttggccaatgatgatacttttttcggacgtaaagttgatccggatttctttttttataaaaattttccgatttctcgtatgagtgtgccttttgtgaatcagggcgacaggtatagtcttttgatacaaaaatgttttgaacttgttgagcaaaagtgtagaatcggctttgaagccaaaccttatcataatattgatgcttatcgtaaaagtgtatatagagaggtttatgatattttttctcaagaaacaacccgaacaaggcgaaaccgttttcgttgttctgatgatattatgcggtggtgtgtttctttgtacgaagtatggcataataaagcgccattcattgtaattgataacagggagctttccgggagtgtctgtttttccggtgtgaaaaaatggctgaataggatcagatatcgtttttttccgcggcaggctgcttattattcttgcttgcgcaaaatagatgttgatcgttttttcaaaaatcctaagccatgtgttttttgtattaatgacgatatgatgactacagatgaacatcgggaaagagcgtatgagttgctaagcagaatgtttccggataaatgtgagtttgaaaaatagctaacaatccgcttcggacaggttccctttggatttccggctcagaaggaagtcacggttaaaaaaaaacctcccagagggaggtttttttattggctccggctgcctgatgcgacaatcccagagaatttattcaatttacagccttgtttatatgtaaaatcaacaacttataaaaatattggctccgacctaaattccaaaagtattagcaaaagttattagcactgctaataacataaatcatctgtaatcggctgtcaataacggtttgacgattattgttggttgtttttatcagttggttgcaaactataactaactgacatcgattttaacgcggttttttcgcgcgtacacgcacgaaaacggtcaaaaccgataagttatgcgtaaaaacaggcaatcgcattatatgacaaaataatagtttcaaaatttgtaaataatagttgcatttttgatacaattatgcaacaattatggtaagaaaatgaaacaattaaggaaaatgctatgttaaacaaacggcaaaaaatgatttttaattacattgaacagtcaggtgcggttagtcgtgaacagatacaagaggctgtatcaaaggaatttgaaaagtgttcaaaggtaacgattcttcgtgatttagatgttttgattgccgaaggattaatttcaaaaaccggaacgacaaaatcagcactttatgcgctgtccatcaaaaataaacttctttcagaggttgatgttgaggcttattttgcaaatgatgagcgcaaattagagaataatcgtt

SEQ ID NO: 432 - DNA, 22631 bp, synthetic construct
  source 1..22631: mol_type = other DNA
  misc_feature 1..22631: note = Synthetic
aattgttgtttatggcattagtgttaaaaatgagtttgattattccagcgcaagcaacaacctgtgccgttccgccaacatgtaagcagatgggttacacgatgaagaaggcagactgtggcgggaatccggttttgcgttgtccgtttgcgctttctgatgacagccaggtgttctgcggcgttgccgcagcatctggtgaagcagataaagatactgatacaaataccgataatgagatggatggtgtggtccaaaatgttaccaatggggctatcatttatactgacggcacagttacaaactctaaagttacaggtaaaacaccaatgggtgttgtctttgatgcaggaaatcgtttggcgatggctttggttgaggttaaagatgatgtgacaggggagatggttatgacgtgggctaataaggcttataagattcctgatttacagaactgtaatacttcggtaattccctctggtgaggtttcttatccagctagtaatgttagttgtggtgtcgatggtcgttccaatacaaatgccatattggcttgtgggagtgattgtggcggcacaccggctgcaacaacagccaataattttcagccagctggatgtattaaagatttttgtaaaaagacaaaatggtttttgcccagtatgagagatataatgaggatttatgaacagaaagcaatgctcaatacggccctccaaaatgtgccgactcttgttcccggaactaagtttactgctgtagggaatgctctttggtcttctactcagaatggtcttaatgcatgggtggtctatatgagtaatggtattagatcatgtaacgggaaggagagcaacgcctctgtcagaccagtgctgaagttttgattagggcctcacacaaaaaaatgcctcgaaaatcgaggcattttttattagaggaaaagaaagtcagttcagtcttttccatgtcttatacttactccagaaacccgaaacgcctatacgacggcagaaatcggatttttgaattttgcttttattctctttgaaaaagaggataaaacgctgccagctttctggcctggcaaagtgctcgtacatttcctcaaaagagaaatgatcgacagcgaattgccatgcccattgatagacttccttggggttggtatgggaatgagcatatttcagcatatagccgttgagctcgtttccgtcctcgtccaaatagtctagcagaccgaacacaatcttggtgatgtgttctttggtgagttttgcttggtagcaagtatgtgcttgagcttgcaaaaacttccagcaggtgtctgtcatcaagcccggctggtcgcccatcgcggagtatttccagtaggcttggggcaggactttgaagctgtgggcttcatgaagaactgcgcctttggaaagtctttgcagagcgatttccagcattatttcaccggtgaagtggtcacgaagccagcattttgtgccaaattcggccatgagattcatgtagttttctccgatgcgccagccgcgggtgtcttgtccggtcgggtagaggatttgaggaaggactacagagttaatcacttggcgatagggcattgctgcgagttcgttcacgttcatgtctgtcagttcggcaactcttgccaaaaattttgtttccatatttttttattttttaagggtttatactagaaaacaatgtatggaaaggctggttgccagatgtttataatcgtattccataataattgttttgtgctatttttatagcacaatttttatactaaaacaagcttaatttgacaaaaggacaaaaataaattataaggtaatgattaagggctgtacttttggattttttttgctataatgttcccgattttaagtaaggaaatatatgcagtgaagaaaattatttcggccgcagaggcgggcaagcttatcggaaatgatgtgtcaattatgataggcggttttttgaaatgcggttcgccgaccaaagtaattgaagaaatacttaaaaacggaaccagcggtttgactttaattgccaatgacacctcgtatccagacagtgatcgcggcaagctggtggttaaccgccgggtgaaaaaagccattgttgcacatatcggaacgaatcctgaaacaggaaagcagatgcatgatggcgagattgaggttgttttgacaccgatggggactttggtggaaaaaatcagggcagccggcgctggtttgggcggcgtgttgaccccgaccggaatcggaacgccggtagaagaaggcaagcagctgatggagattgagggaaagtcctatttgtttgaaaagcctctgggagcggattttgctttgttgtatggcacgaaagctgacaaatatggcaatatctatttggaagggacgacccgtaattttaatttggtgatggcgactgctgcgaaaacggttattgtcgaagcagacgaactggttgaaggatgcctggatgccaatatggtgactattccggggatttttgtggattatattgtcgtataggaaaacaatatggaattaagcaaagaacaaatcagagaaacgattgcccgccgtgtggcgcaagaactggaagacggtgatgtcgtgactttaggcatcggtttgccgacggaagtggcaaattatgtgcctgaagatgttcaggtgatgtttcactctgaaaatggtttaatcggcgtcggaaaaaagcctgcgccggggcaagctaatccgcatatcactaatgccggcgggattcccgtggatattgttgagggcgcttcggcttttgacagcgtgatgtcttttacgatgattcgcggcgggcatattgacgcgactgttttgggcgctttgcaggtggatcaggaaggcaatattgccaactggatggtgccgggcgtatttgtgccgggaatgggcggcgctatggatttggtggtcggcgcgaaaaaagttattgtcgcgatggaacacctgtctaaaaatcaggttaaaattgttaaaaaatgcactttgccgctgacggctgctcatgaggtggatttaatcattaccgaacgttgtgtgttaaaagtgacgccggagggattggttttgcaagagattaatccgttattcagcttggaagatattaccagcacgattacggcggatttgattatccctgatgatttgttgcaagaagctgtttagggtttcgtttttttatttacaggctgtcatgtggcagccttttttattaagataatttaaactgcagctatgccatagtaacaaatcgatgaggttttgttttggtttgtgtaattctgaacaaggatttatacaaatgctgaaacagcttattttctttcttttattgtttattgcggcggtttgcacatcttgtgttatcaggccggagatgacgcgtgagcagtatcgcgagcaagaagaaattatcggcagtgtgcggattatccgcgcgcagatgagggctttagctgctgtttaccgtccaatcaggcgggagagaatgcccggaatgccttttggttttaatcacccatggactgtgggcgaagatgctcagatgtgttttgttgaagtgtataatattccgcaggcaatgtgcgagaatttggtgcgggcagataccggagcggcaagggtattggttaatggcagtatgtggggtttttgtacgccaaattcccatattcgctggttgtttgccaagtttccggcatatagccgtgaagaatacctgcttgacattcgcaaggcggcgcaataatctgggcacaaaccaacctttatgaaagacagatttatcatgaaaaccgaacttttagctccggcaggggatattgaagccggatatgccgcgttatattatggggctgatgccgtttatttgggattgcagcagttttcggcgcgggcgacggctactaatttcagcgaagacaatttgaatgaatttgtgggctatgcgcatcatttggggcgaaaagtttatgcggcaatcaatacgctggtgcaggaagatgaactgcctgatttgttaaaaactttggatatttgctcgcgttgcaaggtggatgctgtgattttgcaggatttgggcgtggcacggattatcagggaaagttatcccgaattggaaatgcacgccagtacgcaaatggccgttcacaataaagaaggcgcgttggctttgcagaagcaagggtttagccgtgtggttgtggcgcgggaactgactttgaacgaaattaaagagattgccgctattccggggttggaaaccgaggcttttgttcatggggcgttatgttattcttacagtggggtgtgtttgttttcctctttggaaacggggcgcagcgcgaatcgcggcaaatgtttgtatccctgccgttcaaattttaagggggaagccggagaaaagcattatttttcgatgaaagatatggctttgcaggaagatattttgaaaatgccggtaacgtcgctgaaaattgaagggcgtaaaaaaacagcgttatatgtggcggcggtaacggattattatcggcggattttggatggcaaaggggctgatgaaaaccgcgcagagcatattaagcagattttctcccgcccttggtgcaagtttcattttagaggcaaagacaaaggcgttattgaacgggaatttgtcggacaccgcggattgcttatcggtaaggttgaacaggccgggaaaggacggttgacatttcatgccaaacataaagttgcgcgctatgacggtttgcagattgaaattcccggcgtagaaaagcctttcggtttttcggtgcaacggttgcgtttgaatggaaaaaatgtttttgaagcggcagccggtgaagaaattacggttgatttgccgccccaaacgccgaaattagagaaagggtgggaaatttatctggcttcagcgacagaagttaaaggtgcttatgactatgttaaacctaaacctgatgagtatcggcaaaagccggctgtagatgttgtggttaaggtgatgccggagttggttgttgccaaaagttgcgggtttgaagcgcaagtttcaggggtgtttatgtcggcacagaacattgagaaagttgaagctgccgctcgacaagcttttgctaagagcggtgaggcaacggtagctttggggcgtttgttttttgataatcctcaagggttgtttgttcccgtatccatgttaaatgaactgaggcggcaattatatgcgcagataattgttgaacacaaaacaggggttttaccgtctgtggagaaaattgtgcgaaaaatggcgtcgaagtggattatcaaaactgatgattggataaaaatttctgctattgatttggacgatgttgatgaaattgtttatctgctgaatgaacaaacagatgccaatgttttgaaaaaacttccgaaaaataagcttcgtttggcgcttcccgcggtttgcaggcgtgtggatgcgtttaagccgctgataaattcgctggtggcgcagggatataaaaaatgggaaatcggcaattattgggggctgtccgttttgccggagaaaggaatagatttaagttttgatgcgccgctttatatgatgaatactcaggcaatggcgatggcaaaagaaatgaacgcttcgcgggttaccttgtctgttgaagacagatttgataatttgaaaaatctggtaaaagaagcttcgttgcccgtggtgatgactgtttatcaggatccggcattgtttaccagtgcggcttgtattcgcagtaatgtctgcaaggattgttcccgcggcgaaaagtggttgtctttatcaaaagacgggcagaagtatcaggcattgtccagagattgccagacgatgttatttgctgagcaggctttgtgttttgccaaagaagctgctgaagttaaggctgatttttatcgcgcggattttgtgtataagccgtatacagcagaacaggcggtgcagatatggaataagctgcgccggtttgaggatgtggaaaatacacggaagggcaatttacatcgcagcctgtaacggcaaaatttatttaattaaaaaattttttgaacaaaattaaaaactcttcgttttaagttgtgtcagatttgaaacgaggagttttttatatgaaaaaatttttgataatcttagcggctgttgtggtattgggggctgggaatgcagaggcttttccgcgtcatggcggtgggcattttcgtccggctgcggctcaccgcatacatcgtccggttattgtgaagcataaacatcatcacggcggtgcggcattggctgttgctgggacaattattggagcttccgtcttggctaatttgttagctccgttacaaccggtgcaaacggttcagacttatgttcctgcgccgcagccggtaacaacttcaaactgcacgacaacaattaataacggcgtaaccgttcaacagtgtgtgacggccggatattaaagaaatataaaataaaatgaactttaatactggttatctcgttatagtatgggtaaggagtttgagatatggatgatatttctgatttgttaaaggaagccaagccgctgtattttgcccgcaagcgccgcagaaatcagattaaagcgacacttgggatgttagtttgcgtcgttatgatgagcagtttgtggccgcagaaatacggtagttacactttgctgccggatacggagtttgaaaatcaagtggctttgattgaagagggatccgtgattgaagatatgggcttgccggttgatgattacggtttgttgatggttggatgatgaaagaaattattgctgagcaccaaggccggattaaggctattatcaaaaagctcaccggctcttataacgaagatattgagcaggaagtttatattaaaacctggcggaatcttgaccgctaccatgaggaagggaagtttattcagtggataagcgctttggctgcaaatgtttgccgcgattatttaaaatcaaagcagcatcaggcagaccttcgtaagtcacaggatgaaaccatactggacagagtggctgtcggcggaaagcaggaggagaggtttgacgcaaaagaacggcagaaaattattttgaaagcagttgatactttgccgaagaaaatgcgtcaagtgattattttgtatgaatttgaggaaatgagttacgaggaaattgcccgcaaaacaggcgatccggtcggaactgtcaaatccagactttttaatgcccggaagttgctgggcgaagcattgaaaccgttaaaaggagaatagatatgaaaaaaactttattaaccgcagtttgcgcaggtgttttagctttgggaattgcaaatgttcaggccgcaaaagatatgcctttgcccgtgccgccgcatggtgatgaaatgttaccgccgccaccgccgggtgctgaaaaagatatggctaaaaaaatggcgaagcttgaaaagaaaatgtctaaaaagctggctgataagcttggtttaagcaaagaacagcaggaacaggctaaaaaaatccgtaaggacggccgcgaaaaacttaagccgtattttgaggaaatgaaagcaattcgcgaaaaaatggataaggttcgtgaagataatatgaaagctttcgaagatattttgactccggagcagaaagtcaagttgaaagaaatcaaggacaagcaccgtgaggatatgaaaaagcgttttcaagaacgccatgataagaaacgtcacggcaaaaagaaagactaagatttgttttcgaaaatatcccgctgatatgcgggatatttttttgttggcaatttaagttaatccgatatatgcttaataataaatcaaaattaataaaggaacagatatgcacttaatcggtttaatcgttatcatttatgttattcttgcggagtggcggattgccaaactaaaaaaacgctggggcagctgcatggtaaatctggcaaaaatacaaaaggacaagacgttgtggtattcgggtgttttgccgaaagcggacgagctttgcctgtttcaaaatgaagagggacattatttgatttcgactttgaatggaacgccgtctgctgattttgccaaaatcaagcgttggatttatcttaaagatttggatagcatataatggctttgaaaaaacgttttgtttcaccaaacagggtgcggttagtgaatgaacaatttcggattaccgatttgtttcaggcttatttgccgattttaatgattgtcgtgttatctgtattgctggtttataatctggggtacttttatgcgctggactggcattatctgtatttgttgcgtatggcggattattacgctgggacactgccgctgttggcctttatattggtgttatacagttctctggtttatcaggcgcttgatgtgccgtattggccttatcagcgtttgttggaaaagctgcgccgtctgggcgatgaatatgataatttgtcagaagggatggcgcgtgcgaaagaaactatttccggattatggttcagccggttggaaaagatgagcttacggcagcagatttggttgaccaaggggcggaatttgttgcgcagtttgcggcggaagccggggcgaaaattgtctgtggaccgtttggaaaagattgcagcttcagaagaagcccattatgacaaacttctatatcagtatgaattgttaaaaccgcggttgaaaacggatgtgaaagtcttggcaataatggctgctaaaatctgtggtttaagttcattgggggcgctggctgttgccggcctttatctgctgtttttgatgccggtgtatggtgatgtatggcgagacaaaccatcattgctgttatgggggatagtcataacggcattactggcgctcggggaaatagctctgcaagtttcttatcgccgccggcgctggttgttggcctttgctgcggcttggataagtttttattgcggcatacttggttttcaccaggatacaatgcagacggaagtaaatgttatagatacggatgaccgggaacatagtttgattagggctgttggtaagggctattttgttcgtgatgataaggatgtggtatttattcccaaagaaaatgccctgcggctggaacagcatttgaaaaaaagcagataaaggaaaaggcagagacggaactctgccttttaattttgtgaatctttcatcttgttaacagaaagaccaccttttcctatttgctatgttatcttttgcttgataacaattacactttagattagaattttctaaaatgcaacataaaaaagaggtgtttaatgtttttttatcgtctgggaattgatatcggagaaacttctatcggttggtttatcttaaaattgaatgagcgtatggaagtttgtgacattgttgatggcggtgtgtatattttcccggacggcagggaggctaaatcccgcgaacctttatctgtttcccgtcgtatggctcgtggtatccggcgcaataatgaccgtaaaaaaagcagaaaacgtcggctgattcgtttgttggttgaaacaggaatttggccaaaaagtgttgaagaacaaaagaaacttgaaagccttgatccttttgtattgcggcaaaaagcggttaatgaaaaaatctctttgcctgagttgggacgggcgttgtttcatttaaatcaaggacgtggttttaaatcgaatcgcaaatctgatggtaaagcaaatgagaacggtaaaattaaattggcggttcaggcgttggaaacgcagctggcagagcaaaaatgccagacgtatggtgagtatttataccgtcgtcatgagaaacgagtaagtaccaaagtcaggccgacggcagacagcaagggctatgaattttatccaactcgggaaatgtctgaggctgagtttgatttaattatggcacggcagcagcagtattatcctgaactgacaaccgaagttgtcgcggctttgcgagatacaattttctttcagcgttctctgcgcccgcaagctgtcggaaaatgtgaatttgagttgcaggaatatcgtgctccggtatggcatccgctgtttcagagatttcggatgttgcaggaagtgaataatcttgatttggtgaaggcgactaaagaggaagtggggctaactgcggaacagaagaaaaaaattcttttgatgttggaagacggagcttgtttgaatagtaaagggatattattgttttcgaaaattaggaaaaaacttgatattccttctacacgcaaattcaatttacagagtgataaacgggatggtttgcaaggagattgggctgtctggaagttagctgatgaggggtgttttggcaagagttggtttaaaatgttacctgaaaagcagctcgaagtattagagctgttgcagggagctgaagataatgttgagctgaagcaaaagctgattgagcagttcggtttagatgacagtcatgctgaaaaggtgacgcaggttaatctgccggatggttatgcttctttaagtttgaaagccataaagaatattctgccgtatttggaacagggaaaggtttattccgaagcctgcgcgttagccggttataatcactcagatcgcagaaccggagaaatttatgattatctgccttattatgggcgaattttaaagtcagctgttatcggcggtcgatttgaaggagaagaacctgatgttgacgaggacatcggtttgcaggaagtttattttggaaaaattaataacccgacggttcatgtgggattaaatcagctgcgaaaagtggtgaatgaaattatttctcgctacggtaagccgcagcaggtggttgttgaattagccagagagctaaagctgggtgtcgaaggtgttcgcaagcttgagaaaaggcaaaaggaaaaccaaaaagataacgagcggattgcggaaaagcttgagcttgccggtcagccgaatacttatcaaaacaggatgatgtataaaatatgggcacgcttggctgaggatgagctgcaacgctgctgtccgttcagcggcaagtcaatcagtgtcactgatttgtttagcggggcttttgaaattgaacatttaattccgttttccaagagttttgatgacagcattaacaataaagtgatagcgtttcgggatgcaaatcgtttcaaagccgaacagacaccgtatgaagcatttggcagtagtccaggagactacaaatgggaagaaattgtggctcgcagcgaaaatttgccgcgtgaaatgcagtggcgtttttctcccaatgcgatggagaaatttgcggatgaaagcggatgcttggcacggatgctgaccgatacgcaatattttgctcgttgtgctttgcaataccttgaggttatttgtgaagaccaaagcaaagaccgtaaaatggtgtggggcgtacccggacagttgacggcgatgttgcgagataaatgggggcttaattcgctgattaatccagcagacaggaaagaccgcagcgaccatcgccatcatgcaattgatgcttttgtggtagcttgtacttctcggtcattgctgaaaaaaatggcggatgccgcccgtttgtatgagaaaacagacgagggtgaatataagcaaattcgcgagaaaagggaaaagctgattgaaaatatgcctttgccttttgaaaattttaacagggaaaagctgcaacaatgggtagatggcttggttattgcttttaagccggaccatggcgtgcaggggcagctgcatcgggatacttgttatggtcgtattggcaaaggaagcaagaaagggagctctgtttttgcggttacgaaggatttgctggcggttgtcgaaggttcagctaaagatgccgacaaaaaaattaatgaaatagcggatgttgtcattcgcggtaagctgctggatttgttgcaaggcgttgaagataaaaaacagcggcagcagctgactgagaagtttatggcagaaacaggcattcgccgcgtgcgttgccatattgaaaggtcagaaagcgttatgattccggtgaaaaataatgatggtctggcttataagtactacgaatccgggaataacagccgtgcggatatttattgcgcgaccaaaggcaaagatgccggaaagtggaagtgtgaaattatttcgacttattccgccaatcaaaaagattttgtgccggaatggcggcggaaagattctcatgccaaattgattatgaagctgcatattaatgatatggtggcctatgatatcttaaatgaagaaacagggctggtggaacgggtgattgccagagtgaaaaagatgactaaagggttagtctttttaagggggcatttgattgctaaggaagaaggcgataagttaagttggggagcaagtgcaaaccagatgcaggaaaaaaatttgcgcaaggtttatgtggatgctatgggaaaagttaaagatccgatggttaaaaatgaaaggaaggcttcatgagcggacagattatagaaattcaaagcgaaaatcggcatttatcctgtgagcgcggatttatgacggtgagcagtgaaggacaagttgtggcaaaaattcctgtgagtgatgtagaggcggtgataaccgcctctcatggtatcagttatagtaataatttattagtacggttagcagaggagaatattccctttgttttttgtaatgaaaaatttcttccggtcggttttttgtggtctgttgccgggcagtatcgccaggcaggcgtgatggatgcacagattgccgttcatgaaaaaagtcgtgataaattatggaaagaggtggtgaaaaggaagatatattttcagtataaggttttggaagctttggccttaccgtatgaaccgctgaaacaaatgatacctaaagttaagttgggagatgttgaaaatattgaagggcaggcggctcgaaaatattttaccactttatttgggagtgattttcgtcgtgatcgcgatagcggtgggattaacagcttattgaattatggttatatcattttgcgttcggcaatggctagagctgttatgggagccggactgcatccgaccataggtattcatcataagaattatcttaatccaatgcggttggtcgatgatttgatagaaccgttccgggcgatggttgatttgaaggttcacggattaaacaagcagggtaaaacggagctaacaccagaagtgaagaagcatctggtgagtgttctgcatatggaaatgtattctgaaaaagggatttcaagtgttggaatttgtatgcagaagctggctgtatccttagccaagtattataagaaggaaacggaagaattgttgtttcctgattttgtggctccggtatttatacaggggtaatcttatggtgatagcgataagcggagtaaagctgatgtggatgattgttatgtttgacttgccggtcggaacagataaagaacgcaaaagggcgactaaatttagaaattttttgctggatgagggtttttcgatgagccagttctccgtttatattaaattctgcggcactaaagaacaaaccgctcctgttgttaaacgcattgtggataattctcccaaagatgggcaaatcagcatcttgttttttacagataagcaattttctgatatcataaatatacagaatcgggaaattattgaaaacaaaaatataccggaacaattgttgcttttgtgatgaaattttgctgcaaatataaatatgaaaatctccgcaaatccttgttagaaaatggtttgcggagattatattatagcaaataggaaaaggtggtcaagctgcaacggtaattttgtgggggtgtcgttcacggttattatagcaaataggaaaaggtggtcaagctgcaactaaattcgtcagcgtgacggttataaatgcattatagcaaataggaaaaggtggtcaagctgcaactcgctcgatacatacgtcatatgcctttttattatagcaaataggaaaaggtggtcaagctgcaacagcttgcaaaccgtcatcatctaaagccttattatagcaaataggaaaaggtggtcaagctgcaaccgataaacaaaacagtattggcagccatgtattatagcaaataggaaaaggtggtcaagctgcaactcggtcgatacatacgtcatatgcctttttattatagcaaataggaaaaggtggtcaagctgcaacacgcagaatgcgtgggcactgcgcgcttatattatagcaaataggaaaaggtggtcaagctgcaacgcggctatgttaaacaacctcttccggcgaattatagcaaataggaaaaggtggtcaagctgcaacaatccgctttatgctcgtatttctgaccaaattatagcaaataggaaaaggtggtcaagctgcaacatttgccgaaatcgaaccaaaagcatagtcattatagcaaataggaaaaggtggtcaagctgcaacaacaaattcaaacatggagaatataataaattatagcaaataggaaaaggtggtcaagctgcaacagagcttcttgttcagctttaattttttcaattatagcaaataggaaaaggtggtcaagctgcaaccactggtgcgcatttttcattcttcgttctattatagcaaataggaaaaggtggtcaagctgcaacgaaccctcctaatgctcctagtgctcctccattatagcaaataggaaaaggtggtcaagctgcaacagatgtcaaggtctacgttattttcttgcattatagcaaataggaaaaggtggtcaagctgcaactatatttttgcatctattggatagctccttattatagcaaataggaaaaggtggtcaagctgcaacgcattgataattgtattagctaggttttgcattatagcaaataggaaaaggtggtcaagctgcaactcttctgtttggtgagtttttttgagcattattatagcaaataggaaaaggtggtcaagctgcaactgtttgtcttgctcgccattcttcttctgtattatagcaaataggaaaaggtggtcaagctgcaacaagtgctattgtgaagagccttgtattattattatagcaaataggaaaaggtggtcaagctgcaactcaacgcttaagaggattatacaaaatgtattatagcaaataggaaaaggtggtcaagctgcaacaaatgtctaaccaatctactgcaaatgcgaattatagcaaataggaaaaggtggtcaagctgcaacatgagttcgttaatcaaatcactggagtttaattatagcaaataggaaaaggtggtcaagctgcaacactttctccaatctcttttctttggcttaaattatagcaaataggaaaaggtggtcaagctgcaaccacaaagcaataacaaaggctgttacttcaattatagcaaataggaaaaggtggtcaagctgcaacataatgagcatttgattaaatgttgttttgattatagcaaataggaaaaggtggtcaagctgcaacaccaatcgggcagccgagcgcagacgtataattatagcaaataggaaaaggtggtcaagctgtaaccaagtttcttggcgttagaaaggcattgggtattatagcaaatgttaaagattatgtaatgtttgcctcttttattagattatcaataaaaggagggagggtttgaccagccgaaccatagatatgatggtcgaagtaataattgttagctgttggctcaagggtgaattcccatgtgtccgccccataatatttggcggtttgtacaaaggctgcagcaggaaagactacgccggatgttccgattgaaataaacaagtcgcaagtttgcaaaagttgttcgaccttatccatacaaagcaagttttcgccgaagaagacgatgtttggtttcatcataccgctaatctggcagtgagggcaggcggtttcggtatctacatcgccaaaggtttctaaaatttgaccgcagtttaaacagatggcctggttgatttgcccatggatatgatagatatttttatttccggctttttcgtgaagagtatctacgttttgagtgataatgctgacagtacccggatattccttttgaagtttggtgatggctaagtgtgccggattaggggaagccttttgaatttcggttttcaggttattgtaaaagtcatggacgagagccgggttgcgttcaaatccttcgatggaagccacatcttcgactttatgattgttccataggccgtttgaactgcgaaatgtagccagaccggattctgcagagattcctgctccggttaaaataatgatatttttgtagatgcgcgacatagtgtaattcctttaacaacaatcctaatataatgcttttttatactttgtctgcatatttttatagaaatttttactatgttgtggtattcttgtggacaaagaatgacaaaagaggatttttttatgggaaaacgagcccgaattagtaagaatgatttgccgaaccaagagcgtgttatgcttttgaagaagctggagatggtttttgacaaacatatgcagatggcagaattacgcaaaaatgccaaaactgaagaagagcggcagcagattagccgtgtgttgaacggtttgcggcaaacgtcatctggattgtttgaagaactgaagatgattgattttgtatgtcagcgagagcttgaagctttgtttaataattattgtgaaagcaataataacgtgtatcatgggcttcgtctgaaaaataatgtttctgagaaaattcagacagaggaaattaaaaaaattacccatttgatacatactgttcatacagaagaagatagggttaaacttcagcaatatattgataataaacctcaaccggaattgaatgcgttgattacgcttactgtcaggaattatcagaaacagcgcagcgattttagtcgtcaaaaagcaaatagttttttggcatattttcataaaaagattgaatgtaagccatatacgcacgctactgaggatgaaatcagagcaacccggacggattttaatggcttttttaatattccgagtcttgaacagctgaagaaatataatccgtattctgaggcatatcagcgttttcgcgtgaatagaaataagggcaagcaacattattcgatgggaatgtataatcttgacaagtgcccggcttggcaagcttgcgagaaaacatccgttttgaaccaaatgaaaattcctttgtacgaagcattggtgcagcaaggtgttccgcctgaaatgctgaaagatatgaaagtcgctgattttgggtcattgttatttgatacatttggcaaagaaaaatataatccggcaagaggaaataagttatcttttgaggacattctgccgggaatagatagtcgccataagacattcttctggaaaaataatgcgcttctcacagtcgagagtcggaagaaatttactgaaagtctgttgcgccgcggcgtgtcacaagcatatattgatgttttaatcccgagtattttaaatgaagggcagccgaatcctaaagtccggcgtaaccagtttaaaggggttattccatattttactgttcaccataaatgggcaattcaatatttgggtggttcagctaataatcagaaaaattacgtaggaatcgctgagtttaaagacaatgatgattcttctaaagaaacaccgcagcatgacgtttggcacgttgcggacggcgttatccggaaggctcaaggacaactggcaagcggtgatcagctttacggagaagtccgccgcgggaatgaacaagcggaagattttattgaatatatggttgatacccgttatgacaatcaaaatgatggcaaatactggaccatcagtatgggctataaacctgaagataatattcgtaatgaagtgaaagattttgtggcattgcgtactaaggcacaaagtgaagttaagaaaggaagacgcattgatcaaggatatcgtccggcagcttttgcacgatgataatatcgtgtgcggggaagcagttaatcctcgttgtttgggagaatgtaaacaatatttggcagatatgaaatattctgatttgcctgctgaatatttggctttattgtcttatgcgaatggtatccgttcacataatgcagttttgtttggtgtttttcctaatgatgcctcaaatgatattgtggcagctaatgaggattatggcagtgaaagcaaggtattgcttctcgggcggacagatttggatgtattggtttatgatgcagagaataaagattaccgcgtgcgaagtaatcgggatttatcattagcagaagtatttgataatttggaagatgctttgcgctattggtttggaatgtagatagtgtttgctctgaataaggctgcgcactgaatagcgcgcgccaactatccgctccgaacagactccctttggtcgccactcgaccagatagtcacagccaataaaaaacctccccagaggggattagaattgtagggctgccagattgggtactcccgcaagcgggtcctcctcgcgtcgtagggcttgcgctctgaatagcgcgcgccaactatccgctccgaacaggcttcctttggtcgccgcccgaccagatagtcacagccaataaaaaacctccccagaggggattaggattgtagggctgccagattgggtactcccgcaagcgggtcctcctcgcgtcgtagggcttgcgctctgaatagcgcgcgccaactatccgctccgaacaggcttcctttggtcgccgcccgaccagatagtcacagccaataaaaaacctccccagaggggaggttttttattggctccggctgcctgattcgaacaggcgaccaatcggttaacagccgattgctctaccgctgagctaagccggaataataaatgcggtaatgaatgaatttggaggccggtaccggaattgaaccgatgtacaaggatttgcagtcctctgcatgagccactctgccaaccggccattcgggttacctcatcttgagttcctcattcactcaacgtcctttatatatacaaactttttaatccacgtcaataacttttttatattattttgaatttttttgtaatttgtttaaaaatcatattcttagcgaatgatattagctgtgttgtgtatggggaataatttaacattgcaaaactagtcttatcttctatgataaggcagattaacaaatggggagattgatatggcaattgcaattgcgtccgatcacggcggttttgaactaaaacagcacttggtggcttattatgccaagaaaggtatcagcttggttgatttaggcacgcattcttcagactcctgtgattatcccgatattgccaaagttatgtgtgagaaaatcaagtcaggagaagtggaaaccgggatattaatttgcggtacgggaatcggtatctcaattgctgcgaaccgttataaaggtattcgcgccgctattttatacagtgatgatgtggcggcattggtgcggcagcataataacgccaatattgctgtttttggcggcagaactatggggtttgacgaagctgccggtcgaatggatatttttttgaatacggcttttgacggcggccgccatgaaagaagaatcgaaaagttagacagcctggagggatgttaaatggattttgaacaagatttgcaacaagaagacaaagctgtttttgaggcgatagagtgcgagctgaaacgccaacagaatcagattgaattgattgcttccgagaatattgtttctcgagctgtaatggaagcgcaaggttctattatgactaataaatatgcggaaggttatcccgcacatcgttattatggcggttgtgaatgcgtggatgtggtggaagttttggcaattgaacgggcaaaaaaactctttggtgcagagtttgttaatgttcagcctcattccggcagtcaggctaatacggcggtttatgtggctttattgcagccaagcgatatgattatgggaatgtctttggatgcaggcggacatttaactcacggatcaaaggtttctttttcgggaaaatggctgaaagccgtttcttacggtgtttgcagagacagcggtttgatagattatgatgaggttgaacggctggcattggaaaataagccaaagttgattattgccggtggttctgcttatccgcggcagattgattttaagcggtttcgtgagattgcagacaaagtcggggcttatttgatggtagatatggcgcactttgccggtttggttgccggcggtgaacatccgaatccgttggattatgcggatgttgttacgacgacaacacacaaaacgctgcgtggtcctcggggcggtatgattttgactaataatgccgagattgccaagaaagttaattctgcgatttttccgggaacacaaggcgggcctttaatgcatgtgatagccgccaaagccgtttgttttggcgaggatttgacaccgcagtttaaagcgtatgccgctcaggttgttaaaaatgccaaaagaatgggcgaagttttaaaattgcgcggattggatttggtttccggcggaacagatacccatttgctgttggtggatttgcgccctaaaaagctgaccggggatgtcgtggccgctgctttggaacgggcgcatatgacttgcaataaaaatgctattccttttgatccgatgccgccgaaagtgacatccggcatcagagtagggacaccggccggaacgacccgcggtttcaaagaagctgaatttgaattgattgccaattggattggcgatgttattgacgctttggcggcaggcgatgcagaacaagttattgctgaggtaaaagagaaagcggttgctttgtgtgagcgttttccgatttacggctaggttagcctttaataaaaaacacctccggccgaaaggcgggaggtgttttttttagatgcttccggaactgttattttttagcttcgaaaacttttttggcttgttttgcggtcagttttttgacgcgtttgcctgtctggtccagtgcagcggcttcggcaagattccagttatacttcttggtcttttcattgaagtatggacgtttgtcatttttgtttttgacaacgttgtaatttttgccgtcccagagaatctgattgtattcaccggggatgatcgtttcaccttttctgttcaatacgccgtattttccgtttttgaggaacaggacgttgccggcgggatcaagggatatttgttcatattcaccggtaaccgtagacttttcttcagtgaagtagaagcctttgacgttgccggcggatagttcgaagtatccgtcacccgtggtgattttgtcttgcgccgggataagagcattgccgttggtgttgaagagcaggaagccgacggagtcattggtcaggaagtagccgttgtcaagatagtcgatgtggtcgaagatctggggtaggacttctttcttggttgtgctgttaatgacgccgtatttgcctgaaccttcgacggttacggaagtgtagtcggggttggcgagcggttcttcaatcactttaggagttttgctgcatgaagagaacattgtcactgcggctgcgatagccagaaaataaaactttttcataacatttaagttttaagttaataaatagaaaaaataatcgcattgttgtttgatatttagcatagtttattttaaaatgcaatagacaaaatttcgataatgtcagttatttggatgaagggcaaaataagctattgcaaaataagcgctttatccttataaagggacaagatgaaactaatccgtgaggttatggtatgaaatgtcctttttgcggatgcgatgatacgcaggttaaagattcccggaatgcggaggacaataccgctattcgccgccgtcgcgagtgcccggagtgcgggtcacgttttaccacttttgaacgaatccagttgcgggaactgattgtggttaagaaaaacggcgagaaagtgatgtttgaccgcgataagctggaacactccattttgctggctgtgcgcaaacgcccggtagatattgaacgagtagagaaaatcgtcaattccatacagcgccgcttggaaacttccggcgaaacggaaattccttccgtcctgatcggcgaatatgtgatggaagctctgtcaaagctcgaccatattgcttatatccgctttgcatcggtgtataaggattttcgggaagttaaggattttgaagaatttgtagaaacattagaccggctggccaaaccagaagccgggttggttataaaggaaaactgaaaatggctaaaaaatatatttcagaaa

SEQ ID NO: 433 - DNA, 15980 bp, synthetic construct
  misc_feature 1..15980: note = Synthetic
  source 1..15980: mol_type = other DNA
gaaaagctatttggtgccgtaagggcaggagttaaaaaggttctgattccggcagataatgtggcagaccttaaggacgtaccaaaggagattgtggacgagttaaccatagtgccagtggagaccatagaggacgttttgagagaggcacttggaataaatatgcgggacagggggacgttgtttttgtcccggaatttcgtctaaactttaaaaggctgcatgacaaattaacatgcggccttttgttataatagcagattcttatgttataatataaacatatagaaatttaaggggagaagttatgttttatgaagtccttaattatttatttttccaattataaaaacaatactgaaaggatagctaaggtatttgctgaaaaaatcaatgctgacttgataaacttaaaaggctccggtgaaattaaaatcgaggattataacttaattggatttgggtccggggtttataaggaagacctggcaccacagatatataaatacgttgacaagctgaacttgaaagataaaaaggtctttgtattttcaaccagtggtgttggatttacctactataataataaactgataaggctcttagaagcaaaaggtgcaagctgtaagggaagctttgcttgcaaaggaagttttgtcagcagagaattcagtgataagaagatctttgaatttatgagcaagttcgcagaaggccatcccaacgaaaaggactttaggaaggctgaaaagtttattgataaggtagtacaataattcattatccacatcaatgtagaaaaaagggcattaatgtggatttttctttttttcttgtggattattttaaaagtatgtataaaggaaactattactggcatatagaatagtaaattcaaggtagtgaatctgagaaaaataaaaagagaaaggaaattcaatatgagaactatagcagtgatgacaagtggtggagatgcaccgggaatgaatgcagcgattagagctgtagtaagagtcggactggataaggggcttagggtaaagggcgtacagaggggctataaaggcctcataaacggtgagatttttgatatgaacaggagcgcagtagctgaaatcattcaaaagggcggtactatactaaaaacttccagctgcgacgagtttagaacgccggaagcgcgggaaaggtctgctaatgtacttagactatttggtattgatggccttgtggtcataggaggagatggggcttttgccggagcctcactgttatcaaagcttggggtggcagctgttgccatacccggcaccatcgacaatgatctgggatatacagactacaccattggctttgacacagccctgaatactgtcattgaagcaataaataagctgagagatacagctaattctcataacagggtaagtatagtggaagttatgggaagaggctgtggagaaattgccctttatggaggtcttgccggtggggccgaaagcatattaataccagaaaaggattttgataaaaatgaaatatgcaaaaagatctttcaaggcaagtccagggggaagctccatcatctggtgttagttgcggaaggagtgtgcgatacaaatgagcttgcaagagaaatagaagagataaccggtgttgagaccagaacaactatccttggccatatccaaaggggaggaaacccatctgcctttgacaggatcttagcttccagaatgggtgaaaaagcagttgagctgttattggagggtaaaacatccagtgcggtaggcataagaaaaggggaaatcatcgacatggatatcgatgtagcccttagcgtaccaagagtatttaacgaaaaaatctacaatatgatgaggatattgtcttcgtagagacatagagacaaagggacgttgttattgtcccgctaaaaccagaatactttttcggaacctggaaataatcactagataaataataaatttgaggtgattattatgccaaggcaagccagaaagtatagtaatagtggaatataccatattatggtacgaggtataaacaagcaaaacatttttgaagaagatgaagatagagaaagatttataaagacattaaaatattacaaagaaataagtaagtacgaaatttacgcatattgtcttatgaccaatcatgtgcacttattaatacgggaaactatggaaccgatttctttgataatgcaaaggatcaatgggagctatggaatttggtataatacaaagtatgagcgctgtggttacttatttcaagggagattcaagagtgagcctgtggaggataacagatatttccaaacagtattcagatatattcatcaaaacccgcttaaggcaaatctggtgaaggatatcaaggagtggaagtggagtagtcttaaggaatattacgacaaagcttcattcatagatacagattatgtactggatatgttctcagaagataaagaaagtgcagtggaaaaggtcaagcactatttaagtgaagccaatgaagatacctgtctggaatacgaggaaagacggaaattaagagatgaagaaataataaatttctttataaaactgggaattaaaaatattagcgaattacaacaaagcgagaagctgaaacggaatgacataattaaaaaagtaaaggccataaagggagtaactgtaagacagttggctcgaattaccggtatctcaagaagcgtaattggaagactgtagtgggacggaaactacgtccctttggctcatgtgacttgtgaggtgggtggcacctaaaaagagagggaaccccgccataaagggaggaattaaaatgaactatgagattttaaatggcaatcttaaggactatgaggatattattgactttggcaattatgttttcggtatagattttcctaccatcctgccaaagttatataagggacacgaagaaacttctgtgtatcactatattgtgaaggaagcaggcaaaataaaggccatggtgggaagttttcccttggagttaatggtaggagacagtcacttaaaaggaaagggaattggtacggtttctgttcataggtattcaagaagagccggatatatgaagctgttaatggatagggctatggcagagatggaggcagaaggttgcgactttgcggttttaagtggcatgaggcagcgctatgagtattggggctttaccccttgcggactgtctttgaacctggagtttaacagtgctaacatcaaacattgcaacataacagtagaagataactataaatttgtggaatacaacacggatgtggacaagcgtactgccgagcacacttccgccgagcagaataccaccgagcatatctccacggacaagcccaaaaccaacgaactgtcccaagacctgaccaaggccatccaactacataatgcccagcaggtccatgccgtaaggcctgaagaaaattttattgatatagcaaggtcctggaacagccgcgtttactttgtatataagaatgatgagtttgctggctatatatctgcagcggacaactttgaaaggttaagagagatggtattggtagatccggaagacatagacagggtcctcatatccttcatgaaggccttcagcctgcaggacacaactgtagttatgcattttcacagggctaaagagtttatgaagctgagcagattttgtgagagctactccataaatggttctgccaacatatatgtcatcaattataagaaggtcatagaggcctttatgaagttaaaaaatacctaccaacccttgcaagaaggtactttagtgctggatataaaagaaaagggaagatataaaatagaagtgaaggacggaagtgttaaggtggaggaaaccgatgctgactatgacatatccctatcccatcttgatgcaagtgctttgttgttttctcattccggcttcgtaaatacagcctataattactctcaccctgtggtgaagtcctggttcccccttcccttgttctatcctgaacttgataatgtgtaatacttcctgatgaggtagttggcttgggggcagcaatccaggcggccatgaaggagagaaaggaagcaatcagggagataatcctcacagatgtgtgcccctttacccttggcaggcaaagaagccatagatgtaacctatacctacgatatcaaatacatgatagccccttaagttcattcaccaccaatacatccgccggcacccaaggaaggctgtccagttcatctatggttatccacttggcatcattgtgggcatttaaacggagctcaccgcccactatattggatataaagcagtgcatggtaaggtgaaaagtggggtagtcatagtcaatagtggtcaaatactgggagatagttatgtccaactctaattcttccttgatctcacggataagggctgcttcacgggtttcatgaggttcaacttttccaccgggaaactcccacatgtccgcgaattcaccatagcctcggcgggtaaccaatattttatcatcctgctttataatagcagcaactacttctattgttttcatatccaaatcctccgttaaatatatcttaagcattataacactatggataattggctacaatacatatatgattaaaaatcacagatgcagtttcttcagtgcatctgtgatttttttagttgatgttattataatatgtttattttgacttctttatgagaagtacaaggctggaaaggcctgaaaggccagctagtactgctacgcccattgcacctgcatcaccagtttttgggttgctagagtcaatgcttgcaccactttctcctgcagtttcagtttttacaaggaagttatcgaagcttacagctgcaaagtgtgatcttaccccaacagctcccgaagtatatgtatcatcttgtgccgtaactaccggttctttggtgttatctgcgtaaacagtgatgtctgatccctttacaataacttttaaatgtacagttttatctttcaataaaccaggaataacctcgcttctgcctatttcattccaggactgatcaaacctaccgatgtagacagttccgtcttcaccgccaccgatgtcatttatacctactgtataaccattgaaaaagtcaccattctcagcctttgggttggttaccctaaaaattactccagaatttgctataccgtttaaaacctttacatcaacttcaatagtaaaatcgcttatgttttcgccaaccacagttttaatgcttgtatcagccggagctgtataagtaccatcagtaaatagcatggatcttcctgcatcttggctatattctacccagccggtagcctttccatcattaaaattatattccaaaacagtcttttctgctgcaaaagctatagttgaaaaagtcatcagagatgctaataaggtagtaaaaaacacttttcttttcattgatattcctcctatatattagataccgatattatatcttttagcataataattctttataaaatgatttttttcttataaactctactttgttttggcgccacaagcaaagtaaaattattttcaatattataataacttatattaatatacaaaaatatactgaatttagtatatttagttaaatttcatgaaattattatgaaattttttgatgaattgcctacatagttttgtccggcaggtggcaagtggaagtttaattcaggacaaacttacttatatattcaacagtgcaattgtgatataatcttttataaaaagagtggtcaggtaatactaatgacagactgctgaaaatatatagatctataggaggggaacataatgaaaataactatgtacggagcagcaatttgcccagattgtgttgaagcaaaaaccatattggagaaaagagaagatatccagttggattacagaaatataaccgagagcacaaaaatattaaaggagttcttagtttaccgcgataaggatgaaatgtttgaagaggttaaaagtgatggcagaatcggaattccattttttatcttagaagatggaaaaaagacttttgacatcttcgaatatattgatgaagaaaaaccacaatctgttcctaatgtttgttccatcgatggaagtggatgctagtagtaacaagtaattaattaggtaaaagtgccaatctttaacggagggcacttttttgtttttttacaattgtttggtaataatttaattttatgatattatatttataaactaaaacactattgcggagggcgcatatgaaattttttaacaagttaggagcttacaatcagatcaataatattttttggatatatttattattatcttatgtatgctgtgtaatggctataggacgattgatttctacgggagagggcagttttctgtttttgatttggaatctttttcttgcctggataccttttattatggctctgataataaattatatttacagcttttataagtccggtagggtaaaaaatctgatgctcttaggctgcggagccatatggcttttcttttaccccaatgccccctacttaataacagactatattcatctgagcagaatcagttttttctcttttatgggcagctacaatatgaacttcacagtgtggtatgattttgtgatgttctcactatttatatttacagggtttttgctaggttttgtttctctttatatggttcaaaaattagtggctgttaggtttaataaggttgctggatggctgatggtgacaggtaccttatttttaagcagctttggcatatatcttggaaggtttattaggtggaatacttgggatattattacaaatccggtgagcttaataaagagtgttttggaaagtctgaacaggcactctggtgcttttacaattacttttggggtgtttttggtgcttatatatgtagccttgtattatattacaaggttgagtaggtatgaggtggtttttgatatttgatggattttcatatttcgtgtagaatactagagacttgtatgcagtaattaggaaagaaaaattacataatccaattaagcagaaatatggtcacattcaggtattaaagcatgtattgtgtgattttttggatataaatctcatttctatagttacatttactacaaaggctgatttaaaggtaaagactaagagcgacgttacatatacagtaagaattccgagaaccataaagaagtatagtattaagagtattgatgattctacaaaagagtatatttatcggaagttacttttattaaacatagacagcaaagagaatagagaagcccatgttcaaggaattaagaatgaattaaatagaaatgcttagtgctggtaacactaagcatacctagaacatttattttggtttaggactattggattttaactttaaatagttaagtggagaaaagtgctaatctttgtgggatggagcacttttttgtttgctcttaacttctatgctaggaccttgcttatcaagcctaatcttaagatactgtacaaacaaattatgttctttctggatttagaaggactttaccacaatatgtagaaatctacaatattataatagtggatgaattccatcatgcagaagcaccttcttatcaggaacttttggattattataagcctaaaatacttttagggcttacggctactccggaaagaatggacggtaaaaatgttctggacagatttgatgacagaatagcagcagaaatgaggctgccggaagctatagacagaaaactgctgagccccttccaatactttgcggtatcagatcaggtggacttatcgaagcttacttggtccagagggggctatgacaagaaagaactggagaaggtatacaccaacaatgatttaagagtaagtcagataataagcagtctgaataaatatgttacagatatagatgaagtaataggcctaggcttctgcgtaagtgtagaccatgcaaagtatatggcagataaatttaacagctatggcatagcttctatggcagttttaggagaaagcagtgcggacgaaagaaatgatgccaagagaaagcttgtcagcggagaagttaaatttatatttaccgtagacttatataacgaaggagtagatattccggaaataaatacggtattgttcctaaggccaacagagagcttaacggtattcctgcagcagctaggaagagggctgagactaagtgaaggaaaggaatgcctgacagtactagacttcgtaggtcaggcccacagaaactacaacttcgaagtaaaatttaaagctctaatgggcagatcaaaacattctgtagaatacaacataaacaatggatttttaaaccttcccaagggctgctatatccatctggaaaagcaggctaaggaatatatattgcgaaatataaagaacatgaggataaccaaggccaaccttataagcaaaatgaaatacttcgaaggggataccggtctgaagctaaccttgggcaactttttaaagcataacggatattccttaacagatttttatggaagccagggcaacagaagcttttcaagattaaaggtagaagcaggattaatgccggattttaactataaggatgaggaagttataacgaaaagactaaaaaatctattccatataaattcaagaagatttatagaatttgcagtaaaggcactaaaaggatttatagatggacagagcagcttctttactgaagaagaaaagcagatgcttggaatgttatattacagctttttcctggatactcctcaaaaactaggattccaatcctttgaagctgctatgttggaactatgtactaacaaggttttgatagaagaggctacagaaattcttcaatataattatgaaaacatcgactttgtagataagcatgtagatttgggatttacttatccactggatttgcattgtgaatactccattgatcaaattatggccgcctttggatattataatgaagaatttaagccatccttcagagaaggagtaaagtattttagagacaagaagctggatgcgtttttcataaccttgaataaatcagagaaggatttttcaccatctaccctatatgaggactatgccatcaatgaagaactgttccattggcagagccagagcaggactactgtggagagtgagacaggacagaggtatataaatcatatgaagacaggtaacaggattgtgttatttgttagggaaagtaaaaagaaggatggattggcttcgccttatgtttatttgggagaggcagagtatgtaagccacagcggcagtatgcctattagcttcgtttggaggctgaaggaagagatgccggcggggatggtaagagtggcggagaagggggtggtgtaaagttttattagaagatgcttaaaataaattacggttagcagataaaatatgttagcaatttgcttacgtcatcaggaataaatttttatagctgtatctaataccataatctttacatggaaaatcatcttcgcaaattctaaaaagtcaactagaagaatatctagcatgagaatcttggttagatttttaaaagataggggtctctatgaagctaacagaattatgggtatttaattagaataataattaaaatatcttgcaattagtaaattattattgtaaaataataacagacctatatcatagcggaaaatgataaggactataataaacgtaacgtgagaggttgaactgcccctgttttttaacgggggcatcctctttttttgtccaatttattggttaatatttaaataaaaggatataattataagtaacaatataaaagtggggggagtaataatgagatacgttttgggattagacattggtattgcttcgataggttgggcaattcgaaatttggacaaggatagaatagaagacttaggggtaagaatatttgagaaaggagaggctgataaaggtaaacccataaatgcacaacgtagggagtctagatcagctagaagaaccttaagaagaaaagctatgaggatgcttaaggttagagaattattagttaaatatggactagtaaatttagaagatctaaagagtttatatataaagcaccctaatgaaatgtcaccatggaaactaagatacgaagctttaaatagagtactgagtggagaagaaatggctatagtgttaacacatttagctaagagaagaggttttaagtcaaactctaaagtcaataaagatattgatgaagctggtaaggttacgaaagccatagatgagaataggaggtatatgaaagcacaaggctatagaactataggagagatgttttttaaggatgatagatataaaaatcataaaagaaataaaggtaaaaaaataaaagaggaaggttacctttgttcagtttctagagatttaatcgaggatgaaattaaaaaaatatttgatcgacaaagaggacttgggagtaagttagctagtgaggattttgaaaaggaatatctaagtactgtaatgtttcaactccctttttcaaatgaagaattgttactaaaaatggtaggggaatgtacttttgaaaggaatgagaaaagagcaccaaaacactcttttacagctgagagattcactttgttggataaggtaaataacttgaccatttataatagagaaagtggaaagaggttcttagttaaggaagagaaggaacagattatagctttatgctataagaaaaaggaagttaagtatacagatataagaaaagttctaaatttagagcctatagacaggttttctacgcttacatatagttcaaaaaagaatgtagaagagagtaaatttatttcattaaaaggctatcatgagatactagggaaacttaaaaataaagcattaattaataatactgaacttatggacaagataatagaagcattaacactaattaaggatgaagataagttgatagtgaggtttaaaggccttggacttgacgaggaagaggctagagaactagcagaacttaacttctcaaactttagtaacctttctatgaaggcgttaaaaaatgtattgccttatttagaagagggaaaaccttattatgaggcctgcaatttagctggatataactttaataatcctaggcagttagacaagcatagacttttgcctaaaattgatgatgatattaaaaatcctgtagtacttcgtgctataacacaaagcagaaagcttattaatgcagttataagaaaacacggctcccctactgctgttcacattgaggtggctagggatctagctaaaagttacgaggaaagaataaaaataaagcgaaatcaagatgagagaaagagtgctaaagaccgattaagtgagcaactaaagaatgagatgcatgttgagaacataacatcaaaagcatttgagaagtacatgttagcttcagaacaggattttaagtgtgtctatagtcaagaagctattgacgtaaatagattactcaatgatccgacctattgtcagatagatcatatacttccatattcacaaagttttgatgatagtttcaataacaaagttgtagttcttacgagagaaaatcaaaataagggaaataggataccctatgactattttaaggctattgggcgagaatggtcaagctatgaagcctttataaaagggttaacacaattggataaagaaaagcaaaatagactcttaaagcatagttttacaaaagaagaaatgaaagacttcaaggagagaaacttaaatgatactaagtatatagctagatatctaaagaactttatagaaagtagattagtaattgaaaaggaagaaggcagacgtgctgtaatggtaataccgggtagacttacagacactatgagacatcgatggggactaaaaaaagacagagataaggaccatttgcaccatgcaatggatgcctgtattattgcctgcattgatgagaagttagttaaacgaattgctgagtactctatgaattgtgaagttcaatttgttaagggtgaggtaataaatcctgaaactggtgaagttattaataaaactgaccagaatttaataagagaacggttccctatgccatggaaatcatttcgtgaagaggttttagctagattaagtagtaatccggtagctgaaattcagaagatagggaataattattatgatgacgcccttattaatgatttagaacctattttgatttctaagatggcaaagacaaaattaaaaggacaattacatgatgctaccattaagcgggtgacagatgctacattaggtagaattcaagtaacaatgcctcttaataaactgacattagaagatatagacaatatgtgtgataaagagaaaaagcctgagttatatgctgccctaagggaaaaactcatttcccataaaggagatgctgcaaaggcttttgaagaaccattaaaatacctaccttctggtaaaaagaaagaagtaagtgttgaagaaattaagatatacagagctccaattaataaattttttataagaaatggaatcgccgagataggccaatgcataagagtagatgtatttagaaagcaggatagttactattttagaaatgtatatggcattgatattttaaagggtaaattatcagagatagcaaaagggggctcatatgtttatttgactgatgaatatgaattttgttttagcctttataaagataatctaatatcaataaattatgatggacaaaaaaaacttggatattttgagtattttgaatctgatgggagagttaatataactagtacaatatcagaggagaagattggtaggatttctttaggtaaaataagtgaaataaagaagtatgatgttgacttgcttggagagaaaaaagagataaagaaagaagcaatgaataataactataaaaagaaaaaaagagataaaagaagggagagaaagatagtataaatgagttatagaactgtcgtagtttcaaataactacgatttatccttaactaagaatcaactattgataaagggaatagaagagtttgaattaccacttgaagatatatcagcaatagttctagaggatccaagaattaaaattacaaatagacttttgagtgaggctgcaaaaaataatattgtaatgttttcctgtgatgaaaagcatataccagttggagtttttacatcctttaatagtcatagcagaaccacaaaggtacagaagcagcagataaagttatcagagcctttcaaaaagagggtatggcagaaaataatctgccaaaagttaagaaatcaagggagagttctacagctattaaatagaaataattgggagattctatttagtttatcaagtaaggtgacttcaggagataaggagaatagagaagccatcggtgctaaagtgtatttttctagtttatttgggaattttactagagagcaagataattggataaattctgctttaaactatgggtatgccattatcagaggttgtataataagagctatatcagctgcaggatttataccttcattgggcattcaccattgcagtgaactaaatgggtataatttagcagatgatattatagaaccttttagacctattgtagatttatgggtatattcaaataaagaaggcaaagatgaactatctagtatcgataagagaaatcttatcaatttaattaattataatattaaaattgatgatgaaattcatagtgttaagaatgctatagataagatggttacttccctttctacctctattaataaggataattataatgaattacttttgcctgatattataggattggaactacatgaatatgagtagtgggtttagagtaatgagattattagtgttttttgatcttcctgtagtaaagaaagaggatagaaaggaatatcagaaatttagaaagttcttgattaatgatggctattatatgttgcagttttctgtttattcaaggttgtgtaacaatcaagaaacattagataaacatataaaaagattagtcaaaaatcttcctaaaaaaggttcggtaagatatttacaagttacggaaaaacaatatggagctatgaagatagttcttggtgaaaaaaataaaaaagagaagtatcaaaaggttgagcagctatcggttttttaatggtaaaagccttgtgaataaagaattcacaaggcttttcgcagttcctattatatcatagcggaaaatgataaggaactataacgaaaggataatgtcaaatgcatcattgctaattatatcatagcggaaaatgataaggaactataactaggcacattaatgggattccaacttattgattatatcatagcggaaaatgataaggaactataacctggttcgccaccaggaggcagaaggcaaaattatatcatagcggaaaatgataaggaactataacattagaatgacattggaagaacagacaaagattatatcatagcggaaaatgataaggaactataaccaaggaacctaaagtatggcaatgaggacgattatatcatagcggaaaatgataaggaactataacagggggggtgtaagaagttaataatactatattatatcatagcggaaaatgataaggaactataacaattaaatgaggaattgctagaagatggaaattatatcatagcggaaaatgataaggaactataactaagtattatttttaaaattataagttattattatatcatagcggaaaatgataaggaactataactattctatcatttcgcattcttgacaatcgattatatcatagcggaaaatgataaggaactataacaatatgaaataatctacaccccgtataaatattatatcatagcggaaaatgataaggaactataacaccgtttatgctcacctctttacgctattaattatatcatagcggaaaatgataaggaactataactgatataccactctcagaaaccgcaatagaattatatcatagcggaaaatgataaggaactataacgcatgtttttatgctataaacagtgctaccattatatcatagcggaaaatgataaggaactataacattaatttaagtacatgattctcccaaaacattatatcatagcggaaaatgataaggaactataacttaaggcgaaaacgatacttttagcttaaattatatcatagcggaaaatgataaggaactataacataaaaatagtcggacttgccgaccagctgtattatatcatagcggaaaatgataaggaactataacttagcaatattaattaataaagtggcagatattatatcatagcggaaaatgataaggaactataacaaagatttaattggaaatggtatggcttcaattatatcatagcggaaaatgataaggaactataacgctaaatttaatggaaaaataataaatacactctttaattgcaaaagtaaattccacctctctaggtgataagagtggaatttagtagtacaaatatgaaagagtatagagagtggaatttagtagtacaaaatattattatattgatatatgcgtcattacagtaatccttgcttggtaaggaaggagcatacatagatttgtgtaaatcacatctatgtatgctctttttatgtatgtgtagctggtaactatggaaataataactaagaaatatttttgagaggagtaagtatttatgccagaattaa

SEQ ID NO: 434 - DNA, 23219 bp, synthetic construct
  source 1..23219: mol_type = other DNA
  misc_feature 1..23219: note = Synthetic
gacgtgccgagataggtggcatcgcggacagtgccgtgcagcaggggggtggtgctatcgggcttcgccagtgccagtttctcgggacgcagacaggcggtcaccggctgatccggcggtgaagcaagggcatcgatcaacagggtggtgcctgcctctgtttgcaggctgtcgccgacgatccggccccggaacagcgagatttcccccacaaagccagcgacaaactccgtttccggctggtcgtaaatctggcgcggcgttccttgctgttcgatctggccgcgattcatcaccaccaccagatcggacatcgacagggcttcttcctgatcgtgggtgacgcacaggaaggcaatgcccagttcgtgctgcaggcgtttcaactcggtctgcatctccttgcgcagtttccggtccagcgcggccatcggctcgtccagcagcaggattttggggcgcaggaccaatgcccgcgccagcgccacccgctgttgctggccgccggaaagctgggtgatcttgcgcgtttccatccccggcaggcggaccatctccagcgcttccgcgacccgctggcgtatttcggctttcggcaccttggcgatttccagcccgtaagcaacgttgcctgccaccgtcaggtgagggaacaggccatagtgctgaaaaacggtgttggtcgggcggtgatgggccgggataccttccatcagcttgccgtcaatgaagatgccgccgccggtcggttcctcaaagccgccgatcaggcgcaacagcgtggtcttgccgcagccggatggcccgagcagggtggtgaacctgcctgccggaatgtcgaggctgaccgccttcaaggcttcgaccagccgcccgtcgggggtgtggaagcttttggaggcggcagagacgcagacgatgggcgtggtgccgggggcggggaatgggggggcggacatcatgggggaggcgtcctttgatcgtgatgcataaaatttgagcgataatttttccgcccatcatttgtgcaagtgtgatggagagaaggaatgttagtcaacaatatttttctgaaaatgttgattgactaacatgcgccggtcagagcatcgtttgccctgttctgcttccctgcccgcgaggttcccccatgtcttcatcgcccgatcctgctctggtctcgccatccggctcgttgcgtgcccgtggattgggcctgcccgtgccaggccggaccggcctgcataacgccatcaccgacgtggcaggtgtcacggttggcatgaccaccctgaccgatcccgccaacccggccctgcacaccggcgtcaccgccattctgccccgtccgcgacaggacttgctggcgccggtgtgggggggggcctttgcgatgaacggcaatggtgaaatgaccggaacgcactggctgcacgaagcaggctggttcaccgggccgatcaccatcaccaacagcctgtctctggggcgggcgcaccatggcaccattcgctggatgatccgcgagtttggcccacgccttgaccgacacgggctatggctgctgccggtcgccgccgagacctatgatggctggctgaatgacatctacgcccagtcggtcaccgaagatcatgtgctggccgccattgatgccgccacggcggggccggtggccgaaggcagtgtcggcggtggcaccgggatgatcgcctatgagtacaagggcggaaccggcactgcctcgcgcgtggtgaccctgaaagggaaggactataccgttggcgtgctggtgcaggcgaaccacggcctgcggccatggctgacggtgtgcggcaagccggtcggcaaggcgttgccgggcaaggcggtgtggacgcaggaaaaaggctcgatcattgcgattgtgaccaccgatgcgcccttgctgccgatccagttgcaacgactggcgcgacgggcggcaatcggcattggtcgcggcggcacgccatcgggcaacaactcgggcgatatctttctggccttcagcaccgccaactctcccggacctctccccgagccgccggagctgtcattgaccgccgtcggcaatgacctgctggacccgatgttcatggcggtggtcgaggcggttgacgaagcagtcctgaacgccatgctggccgctacgccctgtctggggcgcaaggggcgttttgtcgaagccctggatggcgcatacttggcgtcgctgttttcctgagccatgcgggatgtgatggatagtcttcttgccgtgttccaatcccccgaggcccgccgcaccaaggccgggcgcttgctgtcggagtactttgcccagaatctggcaaccattccgttcgagacggccgcctccatcgccgcccatgtcgggctgagtgcgatgaccgtcacccgctacctgcgcgagttggggtatggcagtctggacgccctgaaatccgaactgcgccacggcccgatcagctcggcgtgggagttgcaggatacggttgatgacctgcggcgcgatcaggggaacgggcgtttggtgtccgggatggtgatccagcaaatcgaagccctgcaaagcctgaacaagctgtcccacagcccggaatgggacgaggccgtgcgtcgtctgacgcaggctggcggtgtgtttatcgcctcttttcagaatatcagcggtatcgcccgctatttttccgaacagatgtcctatgttcggccggcggtccgctatatggatggcctgaacggaacttatctggagctgttcgacggcgatcccgccgggcgcttgctggtgctgatcgactgtcgccgctttgccagcaagtcgcagctgttgtttgatgaagcctgtgccgcaggcatcccgattttgctgatcaccgacacccactgcgattgggggcaggccgagggggccgttaccctcagcattccggcgatgagctggcgggcgtgggattccttcatgccgctggcggcgctgctggacttgctggtgaccagcgccatcgccgtgcagggggaaagcgtgctggagcgcagcaaggccatccgccgcctgcaagaccgtttcggagatttcgagcggcggtaggggcccctggctaaagaaaacagtccggggtgagtgctttctcctctgctgccagcgcacgggcctctcgcaatacaggggcgcgccagatgatgcggccatcgtcggaggagcacagcggggcgtcgtcttcgtcctgcgcccatggatgggttcgggcaatctcccacagtgggcgcaaaggagtcacccccagccggacagcacgggccagggcgtgagccaattcggcaggggacgggtaatagggtgacagcaggcgggcccgggctgccgatggccccgcccagtcgagtccgcgcttgaccatggtggcgacggcggtgacgctggtcagcgccgccggggtatctgccacccacgccatggtggcaacgttgacattcgcgcacaggtcaacgtcgttgggaacgtagcgcggatccagccaggtgaaatggcatccttcggtatgccatggtttggcagcccccgagacccaggccatgcggaagcggttcaggaccggcagcacccgttcggccagagatgcccgaggccagcgtccgccgttgaccagcgccaacgagaacagggcggtatcatcggcatccggtaccagtggcaggggcatccaggacggatgttcgccaaggggataaaagcggaagctgcccggctggtccggggcctcgcagcgggcaaggaagtccagagcccgttcacgggcggcggtggccgcctgtgactccccggcagccgccagggcatccagcaccagagccgtgacaaagccgttttcatcgtcagccggcccatcgggcagaaagaccaccgatggaaaggctccacggtctgtctgggtggcgagaatccgttgcaggcgatcggccctgatggggatgctcatccgcagctctcctcgggtggtgccagtccaaagctcaccgttggcggtgcgtcgccgaccaaggtgatgccgaacatggtgtggcgggtggtcaggtcggccagatttgccagcggtgcggacaggtcggcgtacagccccagatcccagccataccgccgccccagcgacagcagggaactgcgaatgctgccttcccggccaaacagggtgcgggcgtgggtatagagggtgacggcgaccgggccggtgggggcgcgggcgtaactgtatccgaacaccgatcccggcaagtcccgctggacgggaaagccgaaacacaacgacagcagctccagcagctcggccttgcggtgagccagcccgccccgccacaggacggttccgacttcgtggctcatcatgtcggtgatgcgcccgtaaatttcgatccggccatcggtggggtcaacgccaatcatctcaacccgctgcgggcggttggggagaacccccggacactccagcactccgctggcataggcttcggctgcagaggcagcctgttccgggacttccagatacagcttgaaacggtcttcggcctgtcggtggcggacaccgataaaggcgtggaagcgcggctgaccctgttgccacaaggcttgagccgtctccagcggttcggagggcagggtcggggctcccagccggtgccacagggccagcaactccggcagatcttgcacccccggatcgacggtatagcgcagggacagcggatcatgggtggcaaaggcaatttccagcgggtcgcccggcatggtcagggtgctgcctccccagtcgcccccgctggtcagtcggcgcgccagcgcgacgggtagtacctctgccatgcgcgctgcctcggccgggagccagcgggatatgaccgcgtgcgcccacgacagggtggggggaaggcctccccccaccgggacggttggatcgggactcagcattggtctcctgtcaatgagccggttgcagggagtatcagggttgccggtgcaggaacggacgtctgcttttctgtccgcttgctgccatcgctcaggctgtaaaccgcgcaatagctgatggtgggaaccgatccggggcgggcgacgggataggtcgcatactcgaaaccgctggccggggtgaaggtcatcgttgaggattcagcagggtgggcatcattgcagagggtcagggtcacgctgtcaacagtcttccagtccaccagcgtcgggttgacggtgatggaatagggaatggcatgcggggccagatggagactgctgttggccgaaatggcgttggtgaaagtccccatcgtttgatcaatcagcgaaccggcaaaggacaaggctgcgaggtccggggaaatggcggcaaaggtataggtctggctgggagcggctttggtcagcatcacgggcttgttggctccgttcatcgtccactggctgttgtcgggcaggccaaggttgccgttctcggtcgagaacagggtcaggttaaaccgctgggagtccgtcaggccgctggcagtgacggtggtggttttcaccgtgaacggattcccgtcaaggatcacccgcggtaacggcggtacttgtgctggcagcgcatagctgccggtctggagcgcggctcccggctcgatgctgccgctgagggcataggtgacggcatacgagaacgggccaggctgatagtcaccgctggtgatttgcaagatggccggtgcctgtgtcgttttggtggtggcaccataggtatagctgatgctgatgccgcccagcaccggagccattgccggagcgacatcaaaaatgcgcactcccatttcactcaggacaaccgtgctgttgcgttcgccggtcaccgtcgcggtgtagctggacaggcccgaagcctgggtatagtggacggtataggtataatcgtacagcagggtccaggcgcttccttgctgtgtttcaaaaatatcggcacctgtcggaccgggctggctggccgtcagggtgatctgcggcggctgtccacccggattggttggcatcaccgtaatgtggtcaatcggcaggcagtcaaaataagccgagtccaccgagaaggcgatggttgccagcggaggcaccggcggcaacagcagaaccggtgccgtggctccggtcgcctggacggagaacgtttgtccttcgttcagggtataaatcagggaccagtcatagctggcagcagacaggggaagatagcgtgcaaccgtgtcgttggggctgaagcggaagtactgcccgttcacctgtacctctgcctcgctgacccgcgaccaggcaatctggacaggtacgatcgacagggtacggggcagggaaacattggcaccgaccacgatcgggctgcccgctccggcggccaccgccatgccaaaggatgttgcggcaccggcctgcgggaccagcatgccgtggtaaaacagcgtgccatccaccgcagggccaggatcaaaggtccacgatgccgttggctcggccgcagtcagaatgaaccactgttcggcgctgtaggcgttcagcgtgtccacataggtcaagccgaccgcaatttccgataaggtcgcaccgggaccggtcagtccttgcgactggacgtgataggtaatcgaactcatggacggatcctcacgggcctgccgggatgaagggtgactgaaaaggtcggggaagaccgttgctggtcttccccgtttcccccgggcgtgcgttggatggcgcacgccgtttttcaggcaaaggtcgcaggttcagcctcgggcagggtcgccagaccaggccacaggcgcttgtgcgccgccgccagcgtcggggccgccacatccggatccagatgcagttgctggttggtgtacagcgcccgcgtggtaaccgtcgaggacaggatcagggtgttgtactggcacagggtctgcggcacgttgatcgtctgccccatgccgggagccgggatgtagctcatggtgtaataccagtcgagctgggtcttgatcccgtccaccaggaaggtgcggaacttcggcccggtccccttgatgaacgaatagctctgcatctgttccagcccgccccgagaatcaatcaggtaggcattcagcgacaccattcgccagatgttccagtccaccagcgatggatcgatgataacggtgtacgaggtctgggtgccactgacgccaataaagaccccgtcattgttccacggggtgttcggccgcacgatcttgccgttgatgaccatctgctgagaggtgatctgcggataggccgccggattgttgggggcggtaaactcccagtcggcaggctgggccgacgaactcggcagataccaggtctttgacggtgccgagacgtcgttgttggggtccacccagcgggcactgacgccaacgttggacatgccgttcgaccactcgacgtacagcatcacggtctgcggggtcagcggcgagttgatcagcacccggttggcattgtccggcgtggtcggagccatggtaatcgccgtgccatcgcccataatgtacttgaccgcatactggtagggggtcgtatagggcaggtaggtgaagaactggatcggcgtcaccgtctggttgtcgcggaaggtcagaacctgtgtgaccgtctgcggatccgtctgggtgtcggaggcaggattgacgaaggtgaaatcaacttcgacgtagtcgaccttgccggctcccagcccgaacggaatgttggtgcactggaacgaaacggccagcgccttcagatcaccggcattgatggtgaccgccggagttgtcagggcattggtggcaaccgacggagactgccaggactgtccgctgacgtactgaacgacatagtaatagctgtagttcaggttgggtgcaccagagggagacactgccgccgggcgggagaagatccagttggacgaggcatcggtcagcgtaccaatgtcattccccgacggcgagctgacgtaaagcatgacgccagagatccccaccaccgacaggttggtgttttccagcgcaaaaacaacggtcagcgggcgggtatcaacggtacggaacacttctgcccacaccgcgggtgtaaagcccggcagctgggtcgcgctttgtgctacccagatcaccacctgattctgcacgtagtgtgtcgagaacgacgacacctgattcatgctgaaggtgtagtcctgaccagccggcacattctgcgacatcatggccatggtctggttgaccgatgcctgcacctgattttgcagggtctggttggcccagttggtaatctgttggccctgtgacgagtccgggtcaatcgcaccccagacgatattgatcgtcccggcctgcgactgcttcagatactggttgatggtgacggtttccttggtgaccgacccccagatgttcttgtcaaccttgatggtctgttcgaactggtaggcggtctgggagtcaaaggagatggtcacatcaaccccgggcagcgatcccggaacctgcatctggtattcaaccgagaaaacaccggcattcggcccgttgaaagcgttgacgaaggcctggacagccgcctggctgggcaggctgacgctccacgatgcctgccccgagctttgggcggcctgaccgatggtggtggtgggctgcagcgacggccaggcaaccgtcgaaaatgcctgcatggcaccctgttcgtcgggatactgatagttgaaccaggcgctgccgccgctccattcccacgcaccgatgatggcaccggggaacttctcctgcacggctccgaccgcaccgggcggtgtctgcagcacggtggtgaaattgcactgcccggtcgtttcctggccattgttgaacgaggtcagggagaacgaaggcagacccgtgttgccgatctggatgatcggttgcggcaaaatgtaataaacaccgtccttcagattgtctttatagacctgaatactgtagctgctcccgttataggtgtaggtgatcagctgggatgtggacaaatcaatcattgtcgtctcctgaagggtttatgcgtttcgcattccaccataaaatgatcttatggatatattattctcataagttgcaattcatggcgtgcgcctgccttccccggaactcattctagggttcatcatccagagacgtgtgtggtcaaggcacgtcatccagtgatggcatagacggaacatcatgatgtcatggagagtcaatgagaaaaatagtgattttttatttggacatgattctcatatctgtatcaatgattgttagtgttacaatatttgaattgtaattttgtttttattggaagagtttctttttgtttattttgaattaacattccacggatacgacttttacgagaaaaattgtttcatatgaaagtaaatgaagcctgccaaatgcaatccatgcttgtttttgtctggtggctggaattccagcgacaaggatctctgggaagatgccccgcgatgcgtcctgccgagatatacatcctatgagtttatttttttgagttggaacaggcttcacaggggacatgtgaatgccctcaccgggcttgcaggccctggagtggccgtaattctttccataacaagctgttgcaccgtctgtggagttgccaaagcatcgacggtcagttcaccggctgaacaggagaatggcctgcgcagcattgctgtccagacaacaaaaaagccgccactccggcttcacggtgtgcggctgtttgctgggggacggagaaaaaacaaaagcgggccggagcccgctttcgcatttggtggcatcagccgtgttaacaggctgaccgcattttctgaacaacgcgagcacgttgtcataaaacagtccatccgtcaatatgatccgcataaacacgttaaagtggagagtgacggtgtggaagctggggcttgatctgggtaccaattcgattggctggtgtgcttttacgttttccgagggacacgatcctgactggagcgactggcgactgaccgatgccggggtgcggattattcctgacggccgcgaaccggcggcggatggacgtgtcggagaatccctggctgtcaaccgaaggcaagcgcgggggatgcggcgcaaccgcgaccatggcaacaatcgtatcaaggcattggcaaaggcgctgatcgattatggcctgttacccgttgagagcagtcaacgatcagccctgttaacggaaagcccctatcagttgcgcgccttggcggtcaccacaggccatccgctgacggcgcaccaactggggcgtgtcttgctgcatctgggggtgcgtcgcggctttttgtccaatcgcaagacggacaaggccgatgacgacgcgacggttttcaagcaaaagatcagccagcttcatcgggtattgcagtatcgtgtcctgaccactgccgatctggaagctctccccgacgatgccccgcccgcacagaccccatggacactgggcgagttcctgtggcaacgggagcaagctggcctgatgatccgtttccggggcgagcagggggatttgtatcccgaccgcgccatgtatcgcgcagaatttgaccgtatccgcgccgtacaggcaccgttccatccctcgctgacggcagcggactgggaccgcttgcgcgacaaccacattttgtttcagcaccccttgcggccagttaaacggggggcgtgctctttttatccccagcatccccggacgttccgcgacaccccgattgcgcaacagttccgcatctccaaggaactgagcatcctgcgtgtgatcatgccggaccagagcagccagcgcctgactgccgggcagtaccgggccattgccgatgttctgggccgtcaggagaaagccacctttgcaggaatccgtaaactgaaaggaaccgacggcacgccgctgttccccaaagaaagccgtttcaacatcgaagacgatcgccgcaagcatcttgagggcaaccgtgtggcaactgccctgcgcaagtcgtccaaagcaaatatcctgatgccgctgtgggatacgctgcctgacaacgtgctgaatgatatctttgaacgcctgcacaacccggttgatagcgggcggatcatggatgatgcggcgctggtcgggtcgctggtgcgtgactttggcctgaccaatgcggcggcccatgcgttgatggaattgccgctgggggccttgaccaccagctattcccgacaggcgatggaagacctgttgccgatcatggcaacgcagggactggatgaatacgatgctgccgtcgagttgctgggggaagacgaagccaaacgtcggctggcgggctttcaggcgtcggaaaccctgtacgagcggttgccgtattacggggaagtcttgcgcggtagcctgttgggggcggacccacgcaaacccgaagacagtgatcccgaggggcactatggcaagatcggcaatccgacagttcatattgccctcaatcaggtgcgcaagctggtcaacgaactgatcgaccgttttggcgagccgccagccaccattcaggtcgaactgtcgcgggacctgaagctgcccaaggtcaagcgcgaggcgatcagcagccagattgccaaaaacgagaaggccaataaaaatcgcattgatcaatggaaagtgatgaccaatggcgccgagccaacagcagcagacctgcgcaagatcaagctgtgggaagagctggcccgcgatgaggtcgcccgccggtgcgtgtttactggccgggtgatctctgcccagcatctggtgaacggagaggtggaggtggaacacctgctgccccgttcgcgcacgctggacgacggaatgaacaacctgaccctcagtttccgcaatgccaaccggctaaagggcaaccgcaccccttacgaggcattcgggctcaatcaacatgccgaacaagggatcgtctgggccgaagtgctggagcgtgccaaggggctgtctccggccaaagcggcccgctttggcgcgtcagcgatggatgactgggaagtcgggaccaactttatcgcccgccagatgaccgacaccgcctttatttcccgtgccgcccggcggtatctgacagccgtctgcgaggacgtgatgcccgcgccgggacgcttgacggcgatgatccgcagccagtggcggctgaatggcctgttgtccgatgacaaccagaaaaaccgcaatgaccatcgccaccatacggtggatgcctttgtgatcgggctggccaaccgctcgatgcttcagcgggtgtcgtcagcgatgagccacgaccgcgaacaggtgcggctgcccgatttgcccgatcccctgcggcaagccctgcgcgaccggctgaacagtctggcggtatcgttcaagcccgatcacggtggcagcggggcgatgttcaaaaaaaccgcttatggctttgtcaaaacccccgatggccacaagcccgattacaatctagtgactcgcaaacggctggacgatctgtctttagacgagctggatgtcatccgtgacgggcaatggcgtgcacaggtgcgggagtacctggaggcaaatgcccaaaagccgttgagtaatgacacggagcggcggcggctgttggcggaattcggacaaaaacacggggtgcgctcaatccgcattctggcaaaagaccagtcggtcgaacctgtcaaaagtgcgccgtacaaaggctacgccaagggcagctatgcctgttgcgacgtctggtccctgcctgatggggagccagggaactggaaggcagggagtttcaaatggaaagggaaattctggtcctacggtgagtgtagcaagggtcttccgccttcggtcaccagtggaaaacctcatccggcggcgaaattcattacccgcctgttcaaggatgatgtaatcgccctgtctgagggaggccgggatgttctgtatcgtgtggtaaaacttctggcttcttctaagcgtatccatatgcaacccatcgtaattgcaaaaagtaatggtcgttctgttacgattaatgagcttcagaagcatcattttcgcaaggcgagcatttccccaagcggggtggtgcaggtgccatcatgatcgggggcgtgctggaactggcgcaggaaggccgctcgctgggattggcgcacggctttgcctgcatttatgaccatcacaccgaaatcggtcgggtgccgctggatgatttgaccgccgtcctgttaacggcccatcaaatcaccctgaccaaaccggtgctgtcggcattgatggaacgcggcattccgctgatttgatgtggtgacaactatcatcctgatggtctgatgttgccctatcgcggttattaccaacagacgggggttttgaaacagcagattgcgctgtccgaaacgcggcgcaagcggttgtggcaacagatcgtgcgggcaaaaatcgcccagcaggaacaggtgttggcgcaatggcagggggatgaacacattcgtcaggcattgcgccttttgcaacagcaggtgcaatccggtgatccgcacaatatcgaggcgcaggcggcccgactgtactggcaaaccttgatgggaaccgccttccgccgtgatcaacaggaaccggggatcaatgcctgcctgaattacggctatgcagtggtgcgggcggccaccgcgcgggcggccatttctgtcggtctgaccccggcattgggcattcatcactgcaatgagtccaatgcctttgccctgattgatgacctgatggaaccataccgcccggccgttgaccatgtggttcgggcggtggtgggggatatcggcgagactgctgacctgatggtgacacctgccgtcaaaaaacggctggtggcggtgttgttgcatgattgtgccgggccggacggcattacgccgttgatgacagcggtgcggattttggcgtcgtcattagtggcggcattgggcgagcggaatgcgtccctaaagccgtgagccgtgctcacagctttagtcttttgttgtgtcgcattgtttttgcgaaaaccggttcccacttttcgcacaatgctcgcgtcattccggcggtgtcactctcgaccgaggtgccctgatgcgggtgcgcgagactggcccttgggcaagcgggtatcgtctgttgtggatgctggtcatgtttgatctgccggtggtcgaggctgaggaacgccatcaggcaacaaaatttcgccacgttctgctggaccatggttttgccatggcccagtattccgtctattatcgcattctggccgggaaagaggccgccgaggcaatgaccaagcatattgccgccgccgctccgcccaaagggcatatccagattgtgaccttgacggacaaacagtatgccaacatcgtcagcctgcgggggcgtgaatacgagccttcgccagaaaacgagcaactttcgctgttttgatgggctgattctatcggtttttctcgcagaaaaaagcctgtatcccatatggatcaatggggtacaggctctctatcttagctgttcagaaaatgcggtcaacccgcaacggttcgtcaatgcacaactacggcctagctatcttagctgttcagaaaatgcggtcaacccgcaacaaacggaatgcgcctgagagcaaaaatacaatcttagctgttcagaaaatgcggtcaacccgcaacagtaatcaaatcgaccgtttcaagaccagtatcttagctgttcagaaaatgcggtcaacccgcaaccggcgatgcgcgctggaagggttccttcctatcttagctgttcagaaaatgcggtcaacccgcaacatgagcaacggtagtttgggggtggtggggcgatcttagctgttcagaaaatgcggtcaacccgcaacaagcacatacacatcataaggaccacggaaatcttagctgttcagaaaatgcggtcaacccgcaactgggaatgttctggatcggtacgcaaaaatatcttagctgttcagaaaatgcggtcaacccaacctgcaccgccaaaggaacggggtccggggccgactggccccggcgaggtgtggagcagcgctccacgaccctgttttttgttccccacctcctcgacaggcaacaaaaaagccgtctatctccttgagacagacggctttttatggcggagggggtgggattcgaacccacggtaggcttccacctacggcggttttcaagaccgctgccttaaaccactcgaccacccctccgcagttggggcgccgaagcgccccttatgtatcgagttcttgccccgccgtccagtattttatgcagcccggcgacggctgaccaacacaatccccagcacaatcagcaccatggcgatgcccagcccggcggggggaacttcgccgaggaccagaacggcgatggttgagccgacgatggcggcaacccagccgatctggctgagggcgaccgggccacccagcttttgcaggtaaaagaacaccgcataggtgatggccagaatggcggactggatggcgatatcgctccacgcgcccacaccggcggggctgatgaccgggttttcaccggccagcagggacgccagcccgacctccagcgcggcagcgaccatcatgccgggagccagcgacagcggagacgacccctgcggccaatgcaggctgcgatagatgttgccgatggcgataaagaccggcgaggcaacggccattgccacccacagcagggcgtcctgctgggcgatgcctttgctgagggcgaggccaccggcgccggtcaggccgagaatgatgcccagcgtgcgcagcagggccgggggttccagtcgcatcgccaccgccagcacataggtcagcaggggcgggaaggcgaggcaaaaggcgatgaagctggcgccgacgtgctggatggccagaaatgacaggccgttgggaacggcaaagctgaaaatgcctgcgatggcataatacagcaggtggcgtttgcccagcgcgggcggctggcggctggcgatggccacgccccacaggccgaggccgccgaacagggtggaccagaacaggaagggcagcggttgccagccgtggtgcagggccagcttggcggtgttggtcaggacgcccaacaggctgccgacgataacgacgcaaccgatgaccggcagcatgggggcgtggggggcatggggggatgacatggcaaaaaggccctttgatcaggggactgccggggattgacccttggtccgggaggggatcggcgctataattgtcttatcgaaaagtatcttaacatcaagatatattggtgcataatgtctcaccctccacaaaagccgtcagaccgggcagcctttgctgccgcccagtggcgacgggaacggcccgatctggacccgtttccgatggaagtgctcggtcggctggccgaagcgtcccagcacatttcgcgggatcgcctgttgccgctgttcgagcggtatggcttgcaagggggggaattcgacgtgctggcaaccctgcggcgcagcggtgatccctgtgccctgaccccgaccgcgctgtacgaggcgacgatggtttcctcgggcgggatgaccaatcgacttgatcggctggaaaaagcaggctttattgagcggcagcgccatccgaccgaccggcggggaacgctggttgtgctcactccgcaggggagggcgctgattgacgagctgctaccgttgcatattcaaaacgaacaaaccgttctgtccgtgctgaccagcgacgagcagcagatgctgaacgatttgctgcggaaattgcagggtatcagcgaataagagcgggttaattccggcttcgaaataaattttccgtcttcagacggaccatcaacaggagaaagcaggtggtttcatatcagtctgttagcaagaaatgctcggtgattggttccacctgtgttgccgcactgatggtgtttggctgtgcatcgtccgccactactaccaatgcagcgaaggcaacgcctcctgctccgcaggcacaggcgaccacagctccctccactgcggccgccccgaccgctgacagcgtgaccatcgaccccgccgatttccgccgctggctggacggggtgcgcagtgatgctctggcgcaaggcatttcagcccgcacgctcgatcgtgccttgccgggtattcagccgcagcctcgggtgctggagctggaccgccgccagccggaattcacccagacctttggcagctatctgcaaaaaaccgtttccgcccgccggattgccgatggcaaggcgatgttggccaaacatcaggcgttgctggggcccatcgaggcgcaatacggtgtgcaggcgcgtttcctgctggccttctgggggctggagaccaactatggcagcaactttggcggctttccggtgctcggttcgctggcgacgctggcctatgatcagcgtcgcccggcctttttccgccgcgagctgatggcggcgctggcgattgtcgatgccggagacattccagccgacaagatggttggctcgtgggccggggcgatggggaacctgcaattcatgccgtctaccttccgcgcccatgcggtggaccgcgatggcgacggacggcgcgacatctggggcagtctgccggacacctttgcctcggcggcgaaatacctgtccgatgaaggctggaagcgcgggcagggctggggccgcgaagtcatcctgccgaccgggttcagctatgagcaggctgacctgagcattcgcaagccggtttccgaatggctggcgcaaggcgtcaggcccgccagtgccagcgccctgccagccagcgagggtggggtgcaggcctccatcgttgtcccggccggggcgcgcggtccggcctttatggtctatgacaatttccgcgtcatcatggtgtggaacaagtcgatcctctacgcgctgggggtgtcttatctggccgaccagatggtgggcggggcagggttggtggtgcagccacccgccgacgatgtacccctgcggcgcagtgacatcactgagatgcagaccctgttggcccgtctgggctatgaccccggtccggctgacggcatggccggggggcagacccgttccgccctcaaggcattccagacccgacaaggcctgattgccgatgcctatcccagtcaggaagttttgtctcgtttgcgttcggtggctcagtaaaggttgcgcctgtgacccgttatggctagtctgtttccgccatttccagcacccgaaggacagtactgtcagatgcccacgctgttgaagccacaagctgcttatcgtttggctgtcctggcgggagcatgccttgccttgagcctgggtgcctgctcggaaaccaagctggccgtcaatacggccaaggaggtcgcgccgacgcaaagcaagatcggcggctataaaatcggcaagccctatcagattgatggcgtctggtactatccgcaggaagatttcaactacgtcgaggaaggcgtttcctcgtggtatggcccgacgttccatggcaagtccaccgccaacggtgagacctatgacatgatggacctgaccgccgcgcaccggaccttgccgatgcccagcgtcgtgcgggtgaccaacatggaaaacggtcgctcgctggtggttcgggtcaacgaccgtgggccgttcgcccgcaaccgcatcatcgacgtgtccaaacgggcggcgcagttgctgggattccacgaacaggggaccacccgcgtccgtgttgaaatcctcgccgatgaaagccgggcgctgaaggcgcaggccattgcggcttcgggggacatgccggcggtgacggcggccccgcgtgggtcgatcagttcggaaagcctggacagcccgccgtcatcgggcggaagcagcagtggtagcggtgcggtcacgacggcgtcgctgtcatcgccgccgccgtcatcctcatcctcatcctcatcttcttatagtggcggggcctcgacctcgacggcgggaagcagcgcgtctcacggagccgccagctataccccgaccacaaccgggaccagctatgtgcaggcgggggcgttctcggacaaatacaacgcggaacgcctgaaaaaagagttgaaaaatctgggggcggccaccatctcgacggttcaggtcaacgggcgcgagctatatcgcgtgcgcctcgggcccctgtccagcacatccgaggccgaacgtctgttgtcggcggttcaggccaagggtgtctcgggtgcgaaggtcgtgaacgactgacgtaccatgcgcgggctggtctccagcggccagtttcagcgcagtttttctttcggatccttgtgaggctgatatcaagaccatggcccgctaccgcctttccctgtccctggctgccagtgcggtggccctggctgccctgttcgggggggctgcccccggatatgcccagcaagctgtcgaaaccaaagcccgcgaggctttgctgctggattacgaaaccgggaccgtcctcctcaacaagaatgccgacgagcggatgccgccgtcttcgatgagcaagctgatgaccgccgtgatgatctttgatcgtctgaaggagggttcgctgtctctggacgaaaagttccgcgtcagccagaacgcctggaaaaccggcggcgcggcctcgggcagttcgacgatgttcctgcatcccaatcaggaagtccgtgttgaagacctgctgcgcggtatcatcatccagtccgggaacgacgcctgcatcaccgtggcggaaaacctgctgggtaccgaagccgcctttgccgaggcgatgaaccgccgggcgaaggaaatcggcttgactggcagccatttcatgaatgccaccggcctgccggacgaaaaccactacatgaccccgcgcgatctggccaaactggcgcgcttcatcatggaacgcttcccggaatacttctcgatctacagcgagaaggaattcagctataacaacattcgtcagcacaaccgtaacccgttgctgtacaccatgccgggtgccgacgggatgaagaccggccacacctcggtggcggggtatggcctgacggcaaccgccaagattgatgaccgtcgccagattctggtgatcaatggtctcgacaccatggcggcgcggtcggatgaagcgcaaaagctgatggactggggcttccggaattttgaaaaccgcaccctgttcaccaagggtgaggtggtcaacactgccgatgtgtggctgggggatatggacgaagtgcagttggtcgccgaccacgacctgcgctttaccttgccccgtcgggccgcgcagaatctggatgtcaaagtggtctataatggcccgatcccggcaccgatcaccaaagggcagccgattgcaaggctggtggtaaacggtaccgacatgccgaccccgctggaagtgccgctggtggcggccaccgatgtggaccggctggggttctttgggcgtctgggggctgcggcccagcacctgatctttggccatgcccagaagcagatcgagtccgtggcgtctgctgtcaagcagtgattgatccgcaggcctgaacgtttgtttttttagagggtacctttggggctgtcacgccctgaaggtactctttgcgttcaaccaggttagagcagcgctccatgctcctgttgcctgtgtgttacctgctgtcgcgtcacatttaccgcccactggttcagagcattgtcggggtgtcatgtctaacggtcgttttatcacctttgagggtggagaaggtgcgggcaagtcaacgcaggtccgccgtctggccgaggctttgcgcgcccgaggcatcgatgtcctgaccacccgtgagccggggggatcagaaggcgctgaacaaatccgccgcttgctggtcgaggggagtgccgaccgctgggatggcctgaccgagacgctgttgcactacgccgcccgccgggatcacctgcgtcgggtgatccgccccgcactggcggcagggacgtgggtcatttcagaccgtttcaacgattccacccgggcctatcagggctatggtcacggcttgccgcagggtgatcttgccgccctgtatcagcttgtttccgaaggactttctccagatttgacgatcgttcttgatctgccggtggaggttggcctgcaacgggcagggctgcgcggtggcgacgagaaccgctatgaaggcatggcttcggcctttcatcagcggttgcggacgggctttctgaccattgccgccgccgagccggaacgctgccgggtgatcagcgccgatcaaccccttgatgcggtccacggtgagattgttgcggtaatagaacagtcgtttaaagagctggcggcggcttcatgaaaaagaacgccgctgaaaccctggccgatcaggcccccttgcccgaaccccatgccaaccatcatctggtcggccacgaggccagcgagcaggaagtgctggcgtcgtgggcatcgggtcggatgcatcatgcctggctgatcagtggcaagcgcgggatcggcaaggcgacctttgcctatcggctggcccgcttcgtgctggccgagggcagcgggcagggcgcgcaaggcttgttcgggccgccgcaaagcctggacattccggcagatcatccggtcagccgccgcattgcacagggggcgcatcccgacttgcggatcgtccaacgtcagtgggacgagaaaaagaagcgccgcaaaggtgaaatcgtcattgatgatgtgcgcagcatcggcacctttttgtcgatgacctcgggcgatggcggctggcgagtggtggtggtggatgccgccgacgagatgaaccgcaatgccgccaatgccttgctaaaggttctggaagaaccgcccaaacgatcgttattgctgttgctggcccataatccggctcgcctgttgccgaccatccggtcccgctgccgccgcctgaccctgtcgccgctggccgatgagcaggttgtgacactcgttcgctctgccatgccaaaccttggcgttgacgatgcgcagtcgctggcccatctgggggaaggcagcgcagggcgggcgctggagctggccgaggctggcgggctggagctgtaccagaccatgatcgcgttgttgcgcgggcttccacggcttgatgtggtcgggctgcatgcctttgccgatcacgccttgcgcggggatgacggctttcggatgaccgccgaactgttcctgtggtggttcgggcgggctctggccgctggcgggcgcgggcaggctccggtcgaggtgatccccggcgagaatgctttggttcggaccctgatggcgtcagcaccccttgatcagtgggtgcaggtgtgggaaaaggtgaaccgtttgttcgagcgggccgatgcggtgaacctggacaagaaacaggtcctgatcagtgccttttctgccatcgagcgtctggtgcgcccccgctgacccccgtttttccgcctcctttccacggggcggtgccgtatcccaggagattgcaggccatggccgctgctgaaaaaccgcgctattacgtcacgaccccgatttactacgtcaacgatgctccgcatatcgggcatgcctacaccacgttggcctgcgatgttctggcgcgtttcaagcggttggatggctacgacgtcaagttcctgaccggcaccgacgaacacgggcaaaaggtcgaaaagtcggcaatggcgcgcggaatcgcgccgcaggagtttaccgatcaggtgtcgcagaatttccgcgatctggcggcggcgatgggatattcgaatgatgacttcattcgcaccaccgaagagcgtcaccgcaaggcctgccaggccctgtggcaaaccctgatcgagcgcgacgagatttatctgggggcttacaagggctggtacgccgtccgcgacgaggccttttacggcgaaggcgaactgaaggacggcccgaacggcgaaaagctggccccgaccggcgcgccggtcga

SEQ ID NO: 435 - DNA, 23132 bp, synthetic construct
  source 1..23132: mol_type = other DNA
  misc_feature 1..23132: note = Synthetic
aaggaaaagggacgtcctctcatcgtgaatttctggtcatatgattgcgtgccctgtctggcggaaatggccgagtttgatcattttacacaacaacatgatgatgtgaagttgacattggtgtccacagatccgtgggatcaaatgaaacgtatccgccgaaccttggcaaaatatgggccacaaaggttcgaatcctgggtgtttgcgcatgcatttgttgaaaaaattcgtttcagtgtggatcgcaagtggcgagggcaattgccgcggacttatcttgtcgaccccgatggaacgcgacatagcctgacaggggcggtagatggggatcgcctcgatcaatggtataaagggttttcaaaatgacggccgtggcaacttatccgtcgtttatgacacatgagtttcggttgccacttgcatcgttcttggctcttttaggacatgtcttggtcttgggtgccctgtatttcatcccaaaaccagagatacaggcacccgtgccgttaagcggtttcgaaatggtggaattaccgtcaccaactgttatgcctgatgtgcccgttgatcagccaatggaaatgccacctgaaccggaaaagacagtggcaatggaaccggaggtgccggatgaaattgtcgtggagaaaaatattgagaaggttgcagaaccggttgcgcgggttaaggtgatggtcttgaaaaagccaaccccgccaaaagttgctcgtcttcctcaaaagcccgctcaacaacctgtagagaaaaaacatccggttaaaatacaggaggtgtcggctccggccttgtcgtacatcccgccgaatgcgcatgtttcttatcttcgtaatccaaaaccattttatccccgcatggcacgcaaaagagggatggaaggcattgtcctgctgtctgtttctgtgagcgctaaaggattggtatctgctttatcaattaaaaaatcttcagggtttgctttgttggataatgccgcaaaagaaaccgtcaaaaaatggaaatttcagcccgcgcaaaaggggttgaaggccgtcaatgctgttgtcgatgttcctattcgcttctcattgaacgcaaaatgaaaggaagtttctaaatgtctggaactgatatgtcctggtttgcctggtggagcgaggccgactggattattcgtagcgtttttataatattggtcctgttgtcattggcgagttggacaatgatgatccagaaggtttttcaatttaaaaatatttcgaaatttgaaaggcttgtccgccaatatcttttggggtcaaactccccccggacccttgttttacatcatccggtgcatgtgccctctgttcatctagcggaagaactccccgatcatgcggagctgtcggaattgaatgaatttgcggggcaaattttacgagagaaaaaactggatttggaaagcgggctgactttgttggcaacaattggtaattcggccccctttatcgggttgtttggcacggtctgggggatcatgcacgctttgcaagccttgggtggtgttgaacagatttcgatggatatgattgcgggccccgttgccgaagcattggtggcgaccgctgtggggttaatggctgctattcctgcggtcattggctataacttcttacttcgcaaactgcgccgattaaatgccttgattgatggcaatgcggttcggatcgtaaatcattggggcaggggagattgatatggcacttggtggaaatggatcagacccagatcagcctctctccgaaatcaatgtaactcctttggttgatgtcatgctggtgttgttggttatctttattgtggctgcacccattatgtcgcaggcgttaagagtgaatttacccaaggccaatggtaccccggaaaatgaaccaattgtcgcttcattgattgtcagaaccaataaccagtttgaattggatggggtgatctatcacaaagctgaccttttaaatgcccttaaggctgttaaggaaagcaaaggagagaaaatggttgttcaattgggcgcagatgccgatctaccttatcaattggtcgcagatgcgctttctgaattgaaaaaagctgatatatccagaatatcatttgccaccgcctcgcctaattaaacctagagtaaatcccgagtaatctgttttagatcgcgacgatgcatttgcgtaaaatcaagctaaggggggcgtaaaatcaaccttcggcttgaaacggattgactatattctggcaggattggctctggcttacaggtgtggtttgttcttgtaactcacaaggcttgagggagtgtgattttaacgcccagcccgccaaggtccgagttaaaaaagtcaagctgcccgccatagaggtcaacgatctcggacgcgatatgcaagcctaatcctgtgcccggttttgtttcatccagccgaagccctcttttgacaagattattcatctgttcaagggggacaccggggccatcatcctctatctggatgagaacttgccccgcctgacatgtaccggagatggaaattttgttctttgcccacttacaggcattctccataaggtttccgaacaattcttccatatcctgtggatccgcacggataatcacgccgtccaaacccgacaggctaatctttaaactcgattggttaaagagtttttccagtgaaaacttgaggtcttttgcaacgtcaccaaggctcgtttttgttcccaacaagcgggaagatcctgcaattcgcgccttgttcaggtaacgggaaatgctatcagttgcgctgttcaggtgtttcctgatcaatttgccttttgcaccgggaatgtcctttgtttcattcatcaaaacggcaatcgggttttttagggaatgggccagattaccgacctgagttcgcgcccgttcaagtaacgtaaaattataatccaacagggtattgagctcggatgccaaaggttgaacttccaaagggaagtcctgtggcattttgtccaaattaccggatcggatcaaagcgagtgattgtgtcaggcgcttcaggggtaacaggccatatttgatttgtaaaaaaaccatccccacaagaaaacagctcaagaccgataaaaccagcacaatattgctcaaaaaggtgcgaatatcgtcttccatatcactgataggaccggccacgacgaaaatgaaaatgctggtgcttctgggcaaggcgatctgacggctataaagccgaagctccttaccggacggcccgtttgtatgcaggaaggtatcggttttttgatccttgggaaagaccgatgccattaacaatgaacttgattgatgtatcaccgaaccattttcaagtatttcccaataccatcctgaatgcggccgattaaagcgcgggtcagacggtgaccatgttaaatccagacgaccgtttgccgaaatatcgctggcagccaccagttcttccagatgatcgctcaactggttgtcaaatctcttttcgatatggccttcaaaaagggatacgatcaaaaatccggttaacacgagactggcaaccgtccagatcagggatgacaaaatcagacggagttgtaaagacgatttaaacatcattcattcgccgtcaactgatatccccggccacgatatgtgcgaatacaggacgccccaagcttgtttctaagcttattaatcaagacttcaatggtatttgaatctcggtctccatcatattcataaatatgttcggtgagttcagtttttgaaatcacggcttccgggtgatgcataaaataggacagcagcctatattccatcgaggtaagcgacagggtttcgttttttagaaaagctttcccactggttgtatccagtttgatttcaccacattcaagaaccggattgctttgtccggcaccgcgacgtaccaacgcctcaacccttgccagcatctcttccatttcaaacggttttgcaagataatcgtcagccccggtccttaatccaatgaccttttcgcgccatgtatcacgggctgataaaatcaaaacaggtattgtacggccacttttacgccagctttccagaacgtttagaccgctcattacaggtaaccccagatcaagaatgaccatgtcataggcttccgtgtcacccagaaagtgaccttcttccccatcataggcattgtcaaccgcatagcctgcgtcacgcaatgccgaactgacctgacgggcaatttcctgatcgtcttcaacaacaagaactttcattacgtctgcccccttttttttgtgacaaattatttgcgatgatcttttttttgttttcccttttcgacttttacaatctcaagggattttgcgtcatattctatttccatcacaacaccgtcttcgcgcaaaagcttggtttcataaacccatcccgatggtgcatcatcttcgtcatccagtttgattttaaggatatgtccgggaaactcggattgtactttttttagtaaaacctcgacagaaacgatctgtccggattttaacaattcgattgccgtctgtctgtcatcgtctgcctgtgcaacgcaaaagattgaaaaaaccgccagtatgccaagcggataaagtaaaaatttcatcgtcttctcaacttcgcaattaagggtgaaaagttccgttcaacatacagtttcgaaccttaacgccagcttaaaacacccttcagtctgcgacaaggtatgatccgttagagtgttgttcatcgacatttagagcatgtcccttttaatttgactcatgtgtcatgccctaagttattgattttacgcaaatgcatcatcgcaatctaaaacagattgctcgggatttgccctaacatatgaaggaaacacaccatgaaaccgatgatccgcaattccatgatcgccgctctcgctttggccgccctgagcactcaggcttattcatccgagaatgtgccaacctataaaagcgatactctgacatctttcaaaacggtcattgaactcgttcaaaaacaaggatacggcgacatttacgaaattgaaagcgaatacggttttatcaaagccaaggttcgcaacgcaaatggtgaccgtatcaagcttgccatcgtcccggaaacacaagtcgttaaagttctggaaaagaaacacaagaaaaacaaaacacaatatgcaggcatacccgcgcacatctcgctggatcaggccttaaatattcttggcgaacaaggttataccactatcgaggaaatcggacttgagaaaggccgttacgaggtggaaatcagagatcaaaatggtcaaaaacaggagattatccttgatgcccagaccggtcaggttctgtcgcagtggaacactttttttcgctaagtatcaaatgatcaggttgtaagggagcttgcaacctgatcccaacattctgaccggagaattttacaatgcaatatgatcgactgacccgacttttccatatgctgattgcctttgggatcacaacacaaatgatgctgacgctgatgatggtccaccccaaacccggcagagaggccaacattttttataatgcccacgaatatctgggagccttcctgcttggtgtattgattttgaactggggttggacttttgttcgacagggacccatatcactcggccacctgtttccgtggttttcaaaaaaacgtctttcggctttaaaggacgatatcctcacgcatataacctatttgttccgccttaaactgccatcaacggatgaaccatcgcctttggccggttccattcagggattggggcttgttattgcgactgctctggccattacgggaacccttattctggtatacgccgacccaaaccaaaaaatgaccggctggttgcatgatgtaaaggaaatccatgaggcctttggccccttgatgtggacttatctgggcattcatgttggcgcaggtatgttacaccagattttgggacataaaactattcagaccatgtttggttctgtctgacaaaacgctgcaataacaaggtatgttattcttgcggatagaatgacattttataaaaaaacaaaaacaggaaacagacaggtcgcaaaacaacagagtggacattccggccagcaattccgttttgtggggctggtctgtccacttaatcaacgatctcaacatagtggtctagctttggctgagcttcaaagggacatgcaagccgacttttacacgatccgatacgatattggattggtaacgtttgacattgggggcatctgcgaaatattgccgggcgaaggcctcgtattcctgcaaggtatctgttgatagcatgacgataaaatcgaccttacctgatatgaaatagcactgctggacctgatccagttttaacatggtttggcgaaactcgttcaacaggtcactgcgtacgctttccagcttgacttcaacaatggtcagaattttatccgcgacgattttaggggacagaatagaaatatcggccgcaatcaccccttcattgcgcaatcgtttgatacgacgttgaacggaggaacgtgacgacccgaccttttctgctaggaccacggcggaaagctgattgtctttctgcaataaattcaacaactgtcgatctattttgtccaattcgattggtaatttgctcattcctgtgcctgatatgatcccaaaaacccaattgagttacaaactatgggtacattaccacgcatattcgtgcaaactaaaaacatatttgaattcaaccttccagccaccatttgtcttttatctggtgccaatgaaaagagtatgacgcatggagatcaaacgcccttatttgctgttcctcggtgatgccgccgatccgcttgctgccaaagttgcccaaggtatcaaggattggcgacctgaaaacgcgatggctcaattccgtctggagggatgtaaagccgatcttggccttgaggatatgacgattgaagaagccgtcaaagccggttgtaagacaatggtgatcggtgttgccaatcgcggtggcgtgatttcagacgcctggatccgtgttctgattgatgcccttgaaaatgggctggatttggccgccggtttacataacaaactggcggatataccggaactggttgccattgccgatcgtttgggacgtcagctttttgatgtgcgccatccaacagaaatttacccggttgcttcgggcaaaaaccgtacaggtaaacgcctgttgcccgttggcacagattgttcttgcggtaaaatgtacacggcccttgcccttgaaaaagaaatgcgggcacgcggcatgaaagctgattttcgcgcaaccgggcaaaccggtattctaattacaggatctggtgtttccattgatgcggttgcggcagattttatttcagggtcggttgaaaccatttctccggataatgatagcgatcattgggatttgattgaaggtcaaggttccctgtatcacgcctcatttgcgggggtaacggcaggccttattcatggcgcacaggccgatgcgctcatcctttgccatgaaccgacccgtacacatatgcgtggattgcccgaatatccgatcccatcgatgcaagccgtcatggatctggccttgcacatggcacagttgactaataaagaggctaaattcgttggcatctgtgtcaatacatccaacctttctgatgaagatgccgagaaatttatgcgcgaaaccgaagaaaaatttggtttgccgtgtgttgaccctgttcgaaacggtgttgggcggatcgtggatgtgctgcaatgacggtttcacttaaggtcagtcataaatcctggcccattgccggtagtttcaccatctcacgcgggtcaaaaaccaccgctgatgttgttgtcgctgaaattcatgaaggtgagtatatcggacgtggtgaatgcgttccctatgcgcgctataacgaaagtattgaaagcgtcacagacctgattaacggtttgaaaaatgacattgcaaatggtttgacccgcatggacttgcaatcacgccttccgggtggagcggcacgcaatgcccttgactgcgccttctgggatttggaagccaagaaagcaggcaaacgggtctgggacttggcgggtttttcttcgtttcataaccttacgacagcttatacattgtcgttggatacggctgagaacatggggcaaaaggccaaagaggttgcgcatctgcctttgttaaaactcaaactggcaggtcccggtgatttggatcgtgtcatcgctgtgcgaaacggtgcgcctaatgcccgtattatcgtggatgccaacgaaggatggtcggccgatatctatacagagcttgcgccaaggttggtagcgctgggtgttgaaatgattgaacagccgttgcctgctggggatgatgcgattttggcagaaattgaacgtcctgtacctgtatgtgccgatgaatcgtgtcacggccttgcttcccttgatgatattaaggggaagtacgacatgattaacattaaactggacaaaaccggtgggttgacagaagcactttcacttaaacaagccgcagaaaaagaagggcttggcattatggtcggctgcatgctggcgacgtccttggcaatggccccggcaatggttgtggcccaaggggcaaaggtcgttgatctggatggtccccttttgttggcagaagatcatgaaaacgcaattcaatttaaaaatggaacaatgtttccgccaaagcctgcactttggggataatgaacaagggatagttaaatgagccgtattgtttatgtgaatggcgcattcgtaccggaagaagacgcgaaaatctccgtttttgatcgcggatttttgtttgcggatggggtgtatgaagtttcttccgtactggatggtaaactagtcgataacgcagggcatatggtccggttgcaccgctcgttaaatgaattggatatggcagcaccgtgcagtgatgaagaaattgaagccgcgcagataaagctgatccaagacaatcacgttgttgaagggcttgtctatttgcaagtaacacgtggggcggcggatcgtgattttgcttatcccaaaaatgtcaagccaactctggtcatgttcacacaatccaaacctttgttgaacgatccaaccgccgataacggcatttccgttgtgaccctgccggatttacgttggggacggcgcgacatcaaaacagtcggtttgctttatccctgtatggcgaagatggaagccaaggcgaaaggggcaaatgatgcatggttgatggacgataacggttttattaccgagggcacatcgaacaatgcctatatcgtgacgaaagacggcatcattgtcacccgccagttaagcaatgatatcttgcacggaattacccgcaaggccgtgttgacaattgcgaagaaagccaatctgaaaattgaagaacgtccctttacacctgcagaagtacagaatgcgcaggaagctttctttacatcggcttctgcctttgtcatgcctgtcgttaaaattgacggacaagatatcgcaaatggcaaaccgggccgtatcacccaacagcttcgtgagatgtatataaagattgctcaaaacggttaggcaggggttgtcagatttcaggatggataaagttgctgccatcatatcgaccaggacggataatcttggatgatacttttaaaaatatctcgtttgtaaaatcaaaaaaggtaggccgaagcctacctttaaattttttggaatcatccttgttaacgggatgaccgcattttctaaaaagctggcctcatattccctgtattttatggcattgtcaacactcttttttatctttaaattgcatagggtgtaatttgtaaacaaaaagagggtgatatggggtatcgtttgggacttgatttaggaacgaattctattggctggacagcattgacaattgatccgtcaaaagaaggactggaacgtttctcacttttagacatgggtgtgcgcatctttcccgatagtcgtgaaccggcaaaggggggacgtgtcggggatagtttggcggttgcacggcgcatggggcgcggtatgcggcgcagtcgtgatcgcggtaaaaatcgcatggcttacatgatgcgctatcttattgatttggggttgatgccgactgacaaggcagaacgccgtgaaatggagaacttaaatccatatcaacttcgcgcagaaggtttggaacgtcccttatcgccttttgagttgggacgtgcgctttttcaattgggattgcgccgtggctttaagtcaaaccgcaaagagagtaacgaagccaaggaagaaacggcacgtgcccagcaaatcagcactttgcgcgaggctttgggtaataagactcttgggcagtttttatggcagagattgcaagcgggtgaacccgtgcgttttaaagagggaacggactggttccctgatcgtgccatgtatgcggaagaatttaatgccttaaaagatacacagcttccccatcatcaattgagtgaagaagaatgggaccgtttgcgcgataattgtattcttttccagcaccctctacgtccggtggagaaggggcgttgcactttgcgccctgaatttcgtcgcgcccatcgtgatacgcccatcgcacaatggtttcgcctttatcaggatgtggggaatttgcgctggattgatgaaaaactgcaaggccaccctttaacgccggaacaacgtgatgcgattattcaaaccctgctcacgcaaaaaacggtgacatggggcggtattcgtcaattaaaaggcgtggatggtaagtctcttttccaccgggattaccgttttaatctggaaagtgaacagcgcaagaaactggacggtcataaaatcgcgatctggatgaaagcggatgagcggcttcaagacctttgggaaacgatttcacctcagacccttgatgatatttttgaggatctgcacggcacgctggaggatgacaagttagttccgcacctgatacgcaagcataaaatcacgcaggaacaggccgaagcttttgccgcactgcccattgggagcatgacggttaacctttcgcgtcaagtcatggaagaactattgccgattatgcgagatcaggggctggaatattatgatgccgtcacgcagctttgtgatgaaacaggcaatcccttgcaccatagtgcatcagcgagcgtcgaaaaaagagaaaaactgccttattacggtgaaattctaagtcaatccgttatgggggaagatgcaagcaaagatccgcaagtcgaccccgaaggacatttcgggcgtattgccaatccaacggtgcatgtggcccttaatcagttacgtgtgctggtcaacagtttgattgatcgttttggcgaagctccgactgaaattcatgtggaactgtcgcgcgatcttaaacttggtcccaagcaacgtaatgaaataaataaagagattgcaaaaaataccaaacgcaatgaaaagctggcggaactatggcaggagatttccaagggacgcgaggccacagcgcgtgatttgaaaaaagtcaaattgtgggaggaattaagcacagatattatggcccggcgctgcgtctttacagggcaaaatattgcgggacatcatctggtgaatggcgaggtggaaatcgaacatattctgcctttctcgcgcacattggacgatacaatggccaacctgacattggcgttcaaaggggcaaaccgggtcaagggcaataattccccgtttgaggctttcggcgacaatcgccatcctgattttgactgggaaggcatactggacagagcctcgcgtcttcccaaaaacaaacggtggcgttttgctgcggatgcaatggaaaaatgggaaggcgagaacgattttattgcgcgtcaaatgacagacaacgcctatattgcccggtcggcgcgcaaatatttaaactgcctcactgaccatgtggtgccggcaccagggcgattgacggcgatgttacgggggaaatggcacttaaacctgggtgaagacggacgaaaaagccgggatgatcatcgccatcatgcgattgattcctttgtggttgcgctcagtgaccgctctgtgttgcagcgtgtctcccgcctaagcgcacgcggtgctgatgatcgtattcatatggaaatacctgaactccccagccagttgcgacaggacttcagggaaaagcttgataacatcctgatttcctacaagcaggatcacggcattctggggcgttattttaacgaaacatcatatggtgtgttgccgcaaagccagcatggcgatggttacaatcttgtgacgcgcaaaccgattgcttcccttagccccaaggaactggatgccattcgtgacccgttgatacaggccaatatcaaagagcacctttatgatctcggttggtatggtttacccaaaacggatcaagccaagaaattgccggaatatttaagcgcgtttggcaaggcacataatattcatcgcttgcgcattctggttaaaaaccagtcggcgattgccatccaaagcgccccacacaaagcctacgcaccagacagttatgtttgttgtgatatctgggcattaccaaaaggcaaaaaaggtaagtggaaaaaaggcgaagaaacatggcaaggggtgttctggaattatgctgaatgcgccaaattcggccccgatctacccgataaaaatgcacaaaaaccacatccggcggcccgctttgtcatgcgtatcttcaaagacgatacggtgtcatatcaggaggatggacaggaacatattatgcgcgtggctgggttcagtacaacaaacaacaggttggatttgaaaccgcataatctggctgatgcaccccgacaatatttctctatcaactcattgggggatagaggtttgcgtcaggtctttatttcccctgacggacgttacctgaataaaaggagaaacccatgattggtggtgtggttgaaattgccgaggatggccggcatttgtcgctctttcgcgggtttttaaaggtcagcgaaaatacaaatgaattggggcgtgtgccgctggatgatatcacggcccttgtcctgtccgcccatcaaattagcttgtccaaaaatattatgacggccttgttggaacgcaaagtgattatcgtgacaacgggtaaaaactggcatcccttgggccttactttgccgctggaggcccattatggtcatgccgggattttgcgtgaccaaattgccctctcagaagcgcgacgaaaaaggctttggcaacatcttgtgcgcagtaaaattgaaaatcagaaatatattctggaatgtgccggagtaaacccggataaagttcaggaactccgcaccctgatgaaacgcgtacgttccggtgatccggataatattgaagcccaagcggaacgtcattattggcccgctttgatgggcaaggattttcgccgtgaccggacattggatggaccgaatgcctttctcaattacggctataccatcttgcgcgctgcaaccgcgcgggcggttgttgccgctggtttacatccagccttgggactacatcataaaagtcaggtcaacgcttttgccctggttgatgatttgatggaaccgtttcgccccatcgtggatggcaaggttgcgaaaatcgcccacgagattgaagaattaacaccggaatataaacgcgcgctcgtcagcctcttgcaattggatttactgaccgaaaagggcgcttctcccttggtgaattgcctgcatcaactggcacgttctgtagtggtgtgtttgacggataaagaggcaagccttcaattgcccccattacgacagtcaggcagtttgtttatggggtaggggtatgatcgttgaacaggaaacatgggtaagcgggtatcggctgatgtgggtaattgtgatgtttgatcttccggttgttgaaaagaaagaccgaaaagcagcaaccagatttagggattatttgttggatgaaggtttcgccatgggccaattttcgatatactatcgattgttgtcgggcaaggaagcggtcgaatctttacgaaaaaggatcgaacgcaatttgccgaaatatggcactgttcaaatactggcgattacggataaacaatatgaaaatattcaaaccttcagaagccgcaagtcggaatcgtcaaaaaatccggaacaattgcttttgttttaatggtgtttttctatttttagaaaatgaaaaggccagtttattatttaaaaacaatgaactggcctttatctagtgtagcttcttagaaaatgcggtcaacccgcaacttttggtgcaaaaaggcgttcggctcaatgagtgtagcttcttagaaaatgcggtcaacccgcaacctagataagggggatgttctgggttcgagtagtgtagcttcttagaaaatgcggtcaacccgcaactaaagggtaaatatccattggctctgtcgtagtgtagcttcttagaaaatgcggtcaacccgcaaccatgaaaccctgcaccgcacacggctgtgagtgtagcttcttagaaaatgcggtcaacccgcaacttgcgtgacgggattatgacagcgtatcgcagtgtagcttcttagaaaatgcggtcaacccgcaacctttggatcgcagggcaaccaagcggcgcaagtatagcttcttagaaaatgcggtcaacccgcaactggggatgggggacgcaagacatcggcgttagtatagcttcttagaaaatgcggtcaacccgcagtatctgtctatcaaatacacagagcgtctggctgaaaccggtatcgatgcatgcgttggcagtttccatataggccctagtactctctactttatagggacgggatcaagaagttgcttcttgagaaaaaggccaagcgccttgttgcctattgagccgaaatgcacatgatcgacaaaggcagactcttttacatcttccaaagccaaatctgtatttatgaacgggaagtcatattgttgagacaagtcagataaatctttttctaatctggggtagaactttttaaaatggacatctaaatttggaaacagtttattgtatgtttccagaagtttctgttcgtttgaactgagttcttttttcgttacgtacaagcttggttgaagagcgaaaacaaactttatctggttgaggtcagcgaaatgtttggcagtgaggatttcattcttgaacctaaaccagaactgttcataagagaaatcattagattgcagtgttgtgttggggacggaaattaggcctgagagttctgcaatttttgctgcaacgtataccagtttaattgaaaatttctcaggcgtaattgtagtctgtgcctgaatgactttgggtatgtaggcatttcgatagagaatattggctgtataaagtgctctttgcacggaaagcatatcaggtgaggtataataatcaaatcctctataggcagcatagacatcgttccagccacttaaggcgacccagactttaggtttcagagtgtccgtcagatagtcttttataaaatcaaattcattcgcaaagagatatccgccgacaccggctgtttctgcatttggaacaaaatttgagtatatatctgcttgtttgacgccagcaccaaaggccgtggaaccaccggagaacaaggtaagatttatggagctgagctcctgacgtgtcatatcggagcgaatgccgatgtcattgattcttacacctcgacctttccagttttctaaaggtcgataacctgctttggagtaataccgagtgtaggcaaaattatcgaaacgaccaaaacactcgttttcttctatgtaggcatcatttttgtcacaagaccatacaaaatcgtctgaacgtgtggacgtaccataaagaagttgtaatgctccttctaaaaaagccagcgatatggcgatagagaagaaaagaagcagcagattggacgttcggttagtcaagttcatatttattctcgtaactaacagctaaagttggatcctgttgatctttacgtaaaaagcagtttccaatcactagaacttcaatatcagtgcccataaagcatttaaatgcgtcatgtggtgtgtttacaataggttccccgcgtacattgaaagatgtgttaacgactacggggcatccagttttttctttaaaagctgaaataagggcatgataacgtggattggtttctttatgcactgtttgaatacgcgcagagtaatcgacatgcgtaatcgcagggatttcagaacgggacacattaagtttatcaatgccgaataaattcttttcctcatctgtcattttgtagcggcgtttttcgtgaacatcggcaacaataagcatataagggctaggcgtttcttgttcaaaccagtcactcacatcttctgcaagaacagaaggagcaaaggggcgaaagctttcccggaatttcactttcaaatttagagttttttgcatggaagcagaacggggatccgccaaaatagagcgcccacccaaagcacgtggcccaaactccatgcggccttgaaaccagccaacagctttgttctcagcgagggcagatgctgtttgttcgaacaggacgcgatcttccatgacttcgaagacggcaccggcttttgaaagctcagattctataatgtcttgagaatattgaggtccaagataggaaccttgcatcgcatcagatggatctactacgcgttcattccctaattcttgatgccaagcggccatcgctgcgccaatggcaccgcctgcatcgcccgcagcgggttgaatccagatatttgggaaggccccatcgcgtaacagtttaccatttgcaacgcaatttagcgcaactccaccagcaagacacaagtttggaatgttatactctcgtgctaacccacgggtaatacgcagaacgatttcctcggtaacagcctgcactgaagcggcaatatccatatggaattgtgttagaggatctttgtcaggtcgacgtgcaggttgaccaaagagttccgcaaatttgcggttggtcatggttaagccgctggtataattaaagtatgtttggtctagtttaaaggaaccgtcttcttttaggtcgatcaatttttccaaaattaggtctttatatttgggggttccatatggggctaaccccatgaccttatattcaccgctattaacccgaaagcccgtatagtaagtaaatgcagagtagagcaatccaagagaatgcggaaaatagagttctttgacaatttccagattattaccatcgccgattgcaactgttgtggttgcccattcgccaacgccatccaatgtaagtacaatagctttttcaaatggagaggggtaaaaagcactggcggcatggctgaagtggtgttccgaaaataaaaactccggcatcttcgttaagccctgtttttccttaagctgtttgatcagaaggtctttctgaaacaatttttcgcgtaaccaaaccggcattgacatacggaatgaatttaggcccttgggggccactgcaacataagtttccagtaaacgctcaaattttaagaacggcttgtcgtagaaaacaacgtaatcaatatcgtcaggggcgatatttccttccgcgagaacaaaatcaatcgcatgagcagggtatcccgcatcgtgtttttttcgggtaaaacgttcttcctgtgcagcggctataatatttccatccacgattaaagcagcagcgctatcatggtaaaaagctgaaattcctagaatgttagtcattttagaacaaggtgtagatgaaaggagcaacagcagaaccttggctcaagacgatcaagccaccaagaacagcaagcattaaaaaaataggcaacagccagaacttttttctcactttaagaaattgtagaaattctgaaaagaaagacataataacctcaaaactggtttttcatggaatgatcggactttggtcgttccagccaataacttgaggccgctttgtcaatcttttgccctagcagatctttaccagcaaggcgcatgattaatccgatgggaacgacggtaagaataaatagaatggtcataacaaccggagcaacaataccccccagtaacagtccaaacttaaaccagacccggttgggaatagtgagtattttgggaaagaataaaccagcgaacaaaaaggcaatagataatccgcaagcccaaattaggacgggctgcccttttaatgtcggcaaaaaagctatgattgcaaaaaatatagcgaacacaataccgaaattgcgttcagaccccatttttacgacaacgtgacttgtattttcagacattgaggattctttcacatgttttttagtttcctagcaaaatatagaacgcaggtaaagaaatattgaacctatccaggctcagagcgcattggttgagataaaagataaaaatgcgaaaattcagaccgttgaaaagaaagtgggagcacagttatcatgctatattgtgacaggttgccaatatttcagttgcaaacaaaagttttaccgaacaggtccagtcatcgctcgtgtaattttatcgcataagcgggcggtggtttttgcgccatgctgatcaatgtcgtgtttggggctaaattcgacaagatcggaaagtaaccatttgatcttttttgttgcaaggtgagtgatgatgtcttcgattatttcgaggctgaccccgtaaggtgccggggcgctaacgccaggcatttgccaatggggtaaaacgtcgagatcgacgcttaagtaaagatgatcacagctttctaaaaaacgatctattgtgtctgtgacctgatggaacaagtgagggcgaatttccgtatccagcatatattggacatcccattcccgactacgttcaaataatgcctttgtattggatatctcagagatgccaagacaaaggtatttcattttttgaccgcgttgcgccaacatttcatgtatttgataaaagggagtaccggaggaaatgccatttttaccgggttttctcaagtcgaaatgcgcatccagattgatgatgccaattgaggcatttgtgtctttttttaaataattgagcaatccggtgaaactgccgactgcggtttcatgtcccccgccgagaacaacaacttttgtgtcttcttttaatgcacgttcgacttcttcgcccaatttgatttgcgcctgtgcaaggtcaagaccaacaggggtgttttgtcgatcatagatgtgtccgtccatgccatgccatgccatattagccaaggccgcgcggattgcatcgggcccctgttctgcgccgggtcgacccttattgcatcttacgcccaaatcacaagggaaaccaatgagggaagcaaagttatctggctgaggagatgttgtgacgatttggtgccatcttttggcatactcgccatcttcagggtccaccctgccggtccaggtaaattgtttgctcattggttgatatcctttccgcagtaaagccccgacatgttagccggggctttatatgcattataaaatagcaggcaggttcagttcatgttcgcgtgcgcattctttggcaatttcatatcctgcatcggcatgacgcataaccccggtggccgggtcattccataaaacgcgctcaagtcgtttggcggcctcatctgtcccgtctgcacagatgacgacacccgaatgctgagagaaccccataccgacaccgccgccatgatgcaggcttacccatgttgcgccggatgcggtattcagtaaggcatttaaaagcggccagtctgaaacggcatctgatccgtctttcatggcttctgtttcgcgatttggcgaggcaacagaaccggagtctaaatggtcgcgcccaataacaacgggggcggaaagctcgccgtttttaaccatttcgttaaacgcgagaccaagacgatgacggtcccccagaccaacccagcaaatacgggcaggcagaccttgaaattctatgcgttcggcggccatatccaaccagttatgaagatgtttgttatccggtaaaagctctttcactttcgcatctgtttttcggatgtcttctggatcaccggacaaggcggcccaacggaagggaccgatccctttgcagaaaagaggccggatataggctggaacaaaaccggggaaagaaaaggcgttttccaagccttcttcaaaagccatttggcggatgttattgccataatccactgtgggaatgccacgttctgaaaaagcaaccattgcttcgacttgtactttcattgaggcgcgggcctctcgttccacacgtttggggtcactttcgcggcgttccaaccattgcgacatcgtccagccttggggaaggtaaccgttgatcgggtcgtgtgcggaagtctgatccgtcacaaggtccggttttatcccacgccggactaactcagggaaaatgtcggcgcaattacccaaaagggcaacggatttggcttcccctgcggcagtccatttttcgattaaggcgagggcgtcatcaagactgtctgttttttcatcgacatagcgtgtacgtaggcggaaatcgatactgtcagggttacattcaaccgcaaggcagcaggcacccgccatgacggccgccaagggctgtgcgccgcccatgccacccaatccaccggttaaaatccatttgccctttagattgccgccgtaatgttggcgtccggcttcaacaaatgtttcataagtgccctgaacgatgccttgagaaccgatgtaaatccatgatccggcggtcatttggccatacatcatcaatccggctttatccagtttgttgaaatggtcccagttcgcccaatgggggacaaggtttgagtttgcaatcaggacccgtggcgcatcttcatgtgtggtgaagacaccaacgggtttaccggattgcaccaaaagggtttggttactttcgagtttgcgcagttcgtctgcgattatgtcgaaatctttccaagtgcgggcgcatcgaccaatgccgccataaacaaccagttcgttcgggttttcagcaacatctggatcaaggttgttcatcatcatgcgcaagggggcttctgtcagccatgatttcgcactgatttcagggccgcgcggggcgcgtacttcacggatattatgacgggggttcgacattcttaatctccagaataacttatgatttgatttttaaatgaggcagcacgtccatgcctgctgctgtgcacatggttccgttgccaagtaagatggccgctgtttcaaggtccggtgccaagtagcgatcttcaacaatggcgggaatttgcaagcgaattgtttcgataacagctttcagacgttggcttgtttccaagggggcacgaaattcaacgccttgggcggcgcatatggcttcgatccctaaaatatgttcgagattggttgtcatgggcagcagacgacgcgccccatgacaggccatagagacatgatcttcctgattggcagaggtcggcgtggaatcaacagatgcgggatgcgacatttgtttattttcagacattagggcggccgaggttacttctgcaatcatcaggcctgaattcaatcccggtttgggcgataaaaaggctggtaggccgaaactcaacgcgggatcaaccatcaaagcaatgcggcgctgggcaatggcaccgatttcggataccgcaatggcgatttgatcggcggcaaaggcaaccggttctgcatgaaaattaccgccggacacgatggagccgtcacttagggtaagggggttatcagtgacggcattggcttctatttctaaagtttgtgcggcttgtctgagaagatccagcaccgcacccatgacttgaggctggcaacggatgcaataagggtcctgtacacgtgtatcatcatcacgatgttcatcgcgaatttgcgacccactcataagattacgcaatgtttctcccgcatcaatttggccgcgatgtccacgcaacgtgtgaatgtccgggtgaaaaggggcggaagaccccattgccgcatcggtcgacaaggcacctgtgactaaagccgattgcgcacaattccatgctttaaacaggccaaccaaggccaaggcagtggatgtttgtgttccgttgatcaaggcaagcccttctttcgggcctagggtaatggggctaagatccgctttggcaagggcttctgcgccactcatgcgtacaccgtcatagaaggcttcgccttcgcccatcataacggctgccatatgtgccaagggagcaagatcgccggaagccccgacagaaccttgtgccggaataaggggaataacgcctttttcagacatattttccaattgttcaatcaattcccagcgaacaccggatgccccacgccccaaggagagcagttttaacgccatgataaggcgcactgtgccttcatccaaaggatcgctcacgccacagcaatgagataaaataaggtttcgttgtaatgttgcggtatcttcggccggaattttaatactggcaagtttgccaaagccggtattgacaccgtaaacggcttcgtccccgttcgcggctacttcaatccgcttggcgcttttttccaccgcttttttaaaagaacgatcaactttaatcggggtatgttcttttaaaatattttgcaactcgtttaaggacgcatgtcccggcataagggtaagcgacattttatgcatctccatagatacgtttgataagtgggttgtagccgatgcggtaggccaattcgttgggatgttcgacgttccagattgcgaggtccgcaatctttcccgt

SEQ ID NO: 436 - DNA, 10501 bp, synthetic construct
  source 1..10501: mol_type = other DNA
  misc_feature 1..10501: note = Synthetic
tcagggctgctcgggatttgctaggtaggcggaaacaggaatgtttgaccttggttggtccgagatcggcttggtggtagtgatcgctgtgatcattctaggcccaaaggaactcccccgtgcgatgcgcactgcggggcagtggatgcgcaagcttaggatgctggcgggggatttccagcagcacctagatagcatggtcgacgaggccgagttgtcagagctgcgtgaccaagccaagaagctgaaaaataccaatctcacccaagaacttggtcgctccattgatcccgatggagaggttaaaaaatcgctggacgaagcaaaggcgacaaccgaaaactcgcgttcggaaattcaacaggctgccaagacgggcgatcttgcaccggcagcggaaaatgtcgcaaaaagcaccgatgctttaccatcgcccccctctgatcctgccgcaggatcacgggtttaggtccggtgggctgtggtcctcgatctatgacaattttattttactcctaaacaagcgaacatgccgatggtcagcgcgcctcacgacgatcccgaagtgaacaagatgcctttgatggctcatctgctggaactccggcggcgtctgatgtattcggcgttgacctttgtggtggccttttttgcctgttattcggttgcatcgcatatttatgatattttggtgctgcctttggccagaatcatggccgaggtcggtggttcgcagcggatgatctataccgcgctgaccgaagccttttttacctatattaaaatcggtgcttttggggcgatggtggtgtcgttccccatttttgccagccaattgtggatgttcattgctccggggctgtataagcacgagaaaaaggcctttctaccgtttttatttgtttctccgttgctgttcgctgccggggcggcgctggtttatttctttgtgatcccgatggcttggagctttttgctcggttttcagaccactcaggctgaaacggtgctgcctattcagctcgaagccaaggtcggtgaataccttgatttggtgatgaagctgattctggcctttggggtatcgtttcagttgcctgtggtcctgaccttgatgggccgggtggggctggttagctcgcgcgggctggcggataagcgtaagtatgctgtggtagcggtgtttatttttgctgccgttgtcacgccgcctgacgtgattagccaagttggcttggcgattcccatgctgttgctgtacgaaatctctattatttctgtgcggatggtcgaaaagaagcgcggcgataacgacgatagcgaagacgatggtgatggcagcgatgacccagcgccgaaagacggcgccgttgcggcggccttacccgacaggggcggtgatcctaccggggaaaccgtatcaatcagcaagccaaccgtggcccgactgaacgataatgggctcgatggggttgaggaaactgatttcaacgcgtaaacctttctccggcatcccagatcagggttgccggagaccctttggcgcctttttgccctgcggccgctttttgtggtcgagcctggggcaaagggctgagacgacggcttttgacccgacggggatatcatgcacgacctgaaatggattcgcgagaatcccaccgcttttgatgcaggcttggcgcgccggggcttggccccgatggcggcggaccttcttagtcaggatgaacgccagcgcgcggtgaccacagaactgcaatccctgcaagcgcagcgtaacgaagtgtctaaggccgtcggcggcgccaagcgttcgggcgacgaacaacaggcccaggcgctgatgatcgaagttgcagcgatcaaagacaaaatgaccgctctggaagaaagtcagcgtcaaggggggcaagaaattgacgccctgctgatggctgttcccaacttgccagacgatagcacccccgacggtgccagcgaggacgacaaccaggaagttcgccgttggggcgaaccgcgcagtttcgcctttacccccaaagagcacgacgaattgggggccccgttggggatggattttgaaaccgcaaccaagttgtcgggatcgcggttttgcttgctgcgcggccagatggcgcgtctggaacgggcgctgggtcagttcatgcttgaccttcatacgcaagaacacggctataccgaggtcaacaccccggtgatggtgcgcgacgagccgctgcttggcactggccagttgcccaaatttgccgaagacctgttccgcaccaccgatgaccgttggttaatcccaactgccgaggtcactttgaccaatacggtggccgatcagatccttgatgcatcggcgctgccacagcgtttgacggcctttaccctgtgcttccgttccgaggccggtgcggcgggcaaggatacgcgcggtatgatccgccagcaccaatttgaaaaggtggaaatggtttccatcgtcgatcccgacgaaagcgaagccgaacaccaacggatgacggcctgtgctgaaacggtgttgcagcgcttggaattgccctatcgtgtattggccttgtgcaccggtgatattggcttttcggcgcgtaagacctatgacctggaagtttggctgccagggcaggggaaatatcgcgagatttcgtcttgctcgaacaccggcgaattccaggctcggcgtatgaaggcgcgcttccgccgcgagggggaaaagcaaacccgtttcgttcatacccttaatggttcaggggttgccgtcgggcgcgccttggtcgccgttttggaaaactatcagcaagaagatggctcggtgctggttccagcggccctcaagccctacatgggcggcctagaggttttgaccgccaatgtttgagcccattgctgatctgtcacaggcgcgcattctgatttccaacgatgacggcattcacggccccggcctggatgtcttgatcgccattgcgcgcagtgtgaccgatgatgtttgggtggtggctcctgaaaccgagcaaagcggggccgggcatagcctgaccctgcatcagcccttgcgctttcgccaggtgtcggaaaagttctatgcggtatcaggcacgccaaccgattgcgttttgctggccttggggcatctgatcaaggatcgtaagccggatttggttttgtctggggtcaaccggggggcaaacctgggcgatgacgtgacctattcggggacggttgctgcggcgatggaggggactcttttgggcgttccttcgattgcgctgagccaagtttttactgacccggacgcggtgccatgggacacggcagcgcagcatggggcagaggttatccgcaaggtgacgggccggggttgggggcgcaatgttctgttgaacgttaacttcccccctgttgctgccgatcaggtgaaggggattagcgcaaccagccagggtcgccgtaaaattggcgatggtctgattgaacggttagatccccgtggcaagccctatctgtggattggcccgcagcggaatggccctggtgcggcagagggcactgatctgtcggctattgaacaaggggaaatttcggtgaccccgttgtgtatcgacctgacggaccagggaactctggcgacgttacgggcacagggtctttagagcaaatacgtcgtcacagatggggtcatctgcggcgacgtatttgcttgtaaaataaagcattagaggattcttcgtgactgtagaagaacgaagaatacggtgggtttttgatttctccatagggcgtactgcgcttgtaaggttcctgttgctatgctgatcgacaaggcctctttccttcatcaccttcaggctgctggggtgactgacccgcaggtgctcgctgcgatgggggcgatcccgcgagaggcctttgttccgcctggacagcagcccgaagcctatagcgaccgtgctttgccgattgcctgtggtcaaaccatcagccagccggtggtggttggtctgatgactcaagcgctgagtgttgaaaaaacccataaggtgttagaggtcgggaccggatcgggctatcaggcggcgattttatcgcgcctttgccgccgcctttattccattgaacgccaccgcgagctgcatagctcggcctctcagcgtttcgaagccttgcgcttgcgcaatattaccaccttgctcggggatggctggaaagggtgggcagaacaaggcccctttgatcgtatcatcgtgaccgctgccgctgatgaaatcccgcaaacactggttgatcaactgagcatcggtggggtgatggtggccccgattggcgagcaatatcaggaccaagaggtcttgcgaatcgtccgtcaagaggacggggttttctatgatagcctgtttccggtgcgttttgtgccaatggtccgcggtcttgctgctggtgcgcgctggtaaagacgttcttttcattgaagcgtagccgtggagaaggcacactctcggccatgacatttcgcccgatacgccgcatcgttaccgtcgcatggtttcccttccgctcgctctggcagggaagggcactttttgtcctgctgctttttgccattgcgggcaccaccacaggctgcgagcaaacgacgccgccgtggttgcagaccaattcttctacacaaagcatttttcaaggctcactaccggctcgggtgacggtgcagcgcggcgataccgtttatgccctgtcgcggcgctatggggtgccagttaaggatattatcggcgcaaaccgtctctcgccgccctatattttacatgtgggagaaagtttgcttcttccccgtcctcaggtctacgtggtgcagcggggcgacacgctttatggtatcgcccgggtttatggggtcgatatgcatgaccttgccggccttaaccgcctggggccgccttataatatttgggttggccaaaggctggccttgccgtcgcaggcgacaggcggcacacaggcagcacctgtcgccagtgcggcacagccgagcttttcccccgcgccatcgtcggttcctgccgacaccagcacccacgctgcaccagtaaatccgccgcaaacttcatcggcggccccatcgtcaacggctcaggcaccggtaattccggcaccaaagcccgcgccgcagattgcgcaaacgcaaacccagccccccgccgcccagcccgaggcacgggcgaccaagccccctcagccgccgccgcgtgcagggcgaacctttgcttggccggtaactggtgatgtgattgggcgctatggtccctcggagggggggacgcgcaatgatgggattaatatcgccgtcgccaagggcaccgatgtgcgcgcggctgaaaatggcgtcattgtctatgctgggaatgaactaaaagggtttggcaatcttttgttgatcaagcattcagacggttggatgaccgcctatgcgcataacgacagctttattgccaagcgtggggagaccgtgaagcgcggccaagtgattgctcgggcagggcaaagcggcaacgttgatagcccgcaagtgcattttgaagtccgccgcaattccaaagccgtcgacccgctggaatatatggaacggacggttgcggcccgttagggcaacgtgaacccttggcgataattcaattatgagcaaaaaacaaaagcgggccggagcccgctttcgcatcttgtggcatcagccttgttaacagactgaccgcattttctaaacagcccaaggatgttgtcacagagtttaagacctgtaaagatgttttctcgctcatctaaaaggggaaaacgcgatgtggaaactcggtcttgatcttgggacaaattccattggctggtcggtatttgcctatgaaggaactgctgaaccagactgggcgtcctggagcctgatcgatagcggagtaagaattattcccgatggccgtgaacctgcggcgcaggggcgagtcggtgattctctggccgttcaacggcgcctcgcccggggtatgcggcggaatcgggatcgggggaaaaaccgggtgcaagcattggttaacgcattgcttgtgcgtggattactgcccaaagaggccgatagtcgcagcgctttgatcagcgcaggcagcccctatgccctgcgggcgcgggccgccgagcctgggcaggtgcttagcgctcacgaattaggccgcgctttgcttcatttgggtttgcgacgtggctttttatccaaccgcaaaagcgatggggccgaagagtctacggaatttaaaagaaagatcggggcgcttcaccatgccctcgctcatcacctcctcacgggtgacgccgttgctgccttggacgaggccgcagagccccaggggatcccttggacattggggcagtttctttatcaccgagaacagagcgctttgggtgttcggttccgtggtgaagagggagatttttacccagatcgtgccatgtaccgtgatgaatttgaaagaatacgaacagtccaaggcccaaaccacccgcaattaaccgccgatgattgggataggctgcgggatcagcatattttatttcagcatcccctgcgcccaggggaacgcggggcttgttcgttttaccccgaccagctccgcactttccgcgatacgccgattgcgcagcagtttcgcttatacaaagacgcgagcattttgcgttggttagaccatcagcaaaaatcccatcgtttggacgcagagcaatatcagggcgtgattgatgttttacagcgtcaagaaaaagcaacatttggcggattacgccgtttaaaacgcgctgacggatcgccactgtttgacaagaatagccgttttaatctcgaagatgaaaagcgcacccatttagatggtaatcgggtggcgacgatgatgcgccgcatgccgattttgaccaagctgtgggacagccgctcagcgggcgagttgaacgatatttttgaccgcctgcacgcacctgtcctcaacggggtgatgatggacgatgcggctttgattgcgtccttgatcaatgattttacgctcacgatcgccgatgcaaatgcccttgcggccttgccgctttcaagtatcaccacaagctattcccgtaaggcgatggaagatctgtttccgctgatgcgcgacagtggcttggatgaatatgatgctgccgttgaactgctgggcaaggacgaggcgaataggcgtcttgctggctttcaacaggcgcaggagcaactgcctgccttgccctattacggagaaatcttacgcggcagtaccctgggggccgatccgcgtaaatccgctgatacccatcccgaggggcattatggccgcattggcaatccaacggtccacattgccctaaaccaagtgcggaagctggttaacgaactgattggccgttttgacggtcctccggcgatgatccatgtggaactgtcccgtgatctaaagctgccaaaggtcaagcgcgaggcgcttaacagcgaaaatggcaagaacgaacgggccaataaaaagcgggccatctggtggaaagagatgaccaagggcgcagagcccacagcgcgcgatctgaaaaagatcaaactatgggaagagctggcccgtgacgaaacggcgcgccgctgcgtgttcacagggcgggttatttctgcggcgcatttggtgaacggcgaggtcgaaattgaacatctgctgccacggtcgcgcaccttggatgatagccttagcaacctgacccttagctttcgcaatgccaaccggctcaaggggaatagaactcccttcgaggcctttggccatgatcaacaggcgataaatgggattgtttgggctgatgttttagaacggattaagggccttccaccggcgaaagcggcgcgttttgccgccgatgcaatggactcttgggaggttggaacggattttgccgcacggcaaatgacagataacgcccatatcgcccgtgcggcccgtcggtatttgaccgccgtctgcccgcaggttttcccctcgccggggcgattaacggcgatgatccgcagccaatggcggttaaacgggttgctgtctgacgacaaccgaaagaaccgtaccgatcatcggcaccatgcgattgatgcctttatcattggcttggccacgcgatcaatgttgcagcgggtttccacggccatgagccacgaccgtgaacaggtgcgcttgcctgatttacccgagcccttacgggagtccctgcgccagcgcctagactgtatggtggtgtcctttaagcccgaccatagcggtcaggggggcatgtttaacgaaacagcctatggctttgtcgatcctgaaacgcatacccttgtcacccgtaagcgtattgatagcttgtcggaaaaagagcttgaggcgattcgcgatccacagtggaaagcaaaaatcgccgactttcttgcagctcaaggccccaaagcccatagcgacacaaaggaacgtcagcggtttttggctgaatttggccgccagaatggggtgaaaaccctgcgtattttggtgaaaaattcctcggttacgccaatcgccagtgccccgtacaagggatacgcccggggggcttatgtctgttgcgatgtctgggcgctccctgagggaaaaaaaggaaaatggaagcggggaaagtggaaatgggaaggtcagtttattgcctatgccgattgccaccaggggcagccgccacagtccagcgccagtaagcctcaccctgccgcgcggtttgttactcggttgtttaagaatgacctgattgccattgatgatggtggaaaaccacagattttgcgcgtggcgggttttagcaccaccgataacagacttgatctccggtcctgtgtcgcggcggaaagcgcgcaaaaatattttagtattaatgtgttaggggggcagggattgcgtaaggtcagtgtatcgccatccggggtggtgcaaatgccgatgcggggtcaagcatgattggcggcgtgttggaaattgcccagaatgatcgccatcttagtctttatcgcggttttatttgcataaaagatcatcaagatgaaatcgggcgggtggcgttggatgatttgacgatggtgatgctaacggcagatcaaatttctttcagtaaagccgtggtgaccgcgttgatggaacgtggaatccccttggtgtcttgtggtgggaattatcatcctgatggggtgatgctgccctatggcgctcattatcaacaagccggggttttggcgcagcaaattgccctgagcgaaccacggcggaaacgtttgtggcaacaggtggtgcaggccaaaattgctcaccagcgacaggtgttgctttggtacccggcaaacgataaggccgggggtgccgacgccctgcaacagttggtatcgcgggtgaagtccggcgatccagagaatactgaggcccaagccgcccgtttgtattggcctgctctttttggtgctgatttccgtcgtgaccatacggccagtgggcgcaatagctttttaaactatggttatgcggtggtccgggcggccaccgcccgcgcattggttggtgcgggccttaccccggctttgggcctgcatcatcatcaggccggaaatgcctttgccctggccgatgatcttatggaaccctttcgtccgatggttgatgctttggtcaaagagattgaatgcgattatcccggtgcgttccccgaaacgctttccgtcgccgacaaacggcggatcgtggcggtgttgcaatgggattgtgataccctggctgggcggtctccgttgattaacgttctgcattctatggcgcatacactggttctgtgtttgcatgatcacgacgcggctttgcttttaccgcctgcctttccattgcggggggcatcatgcgggtgagagatcatggcccctgggcaagtgggtatcgtctgatgtggatgattgtcatgtttgatttaccggtggtggaggatgaagatcgccaccatgccagccggtttcgccacgccttgcaagatctggggttttgtatggcgcaatactcggtctattaccgggtgttatcaggaaaagaggccgccaatgccatgaccagccgcataaccgctgttgcgccaagcaaaggccacgtacaaattttgtgcatcaccgataagcagtatgaatctatcatcagtctaagagtccgtccggagagatctctattttttacagagccttctaatcataagtcgaatggatgcgagtttgaggaaggcaagcgcctttctgctcaggcactcccaatccttggcgaggcgacggcatcttccgagccaagcgaatgtgcgctcgacgacccagcgcctgggtaacacgacaaaccccttgtttaaatcggagcgcttgacgatt

SEQ ID NO: 437 - DNA, 14270 bp, synthetic construct
  misc_feature 1..14270: note = Synthetic
  source 1..14270: mol_type = other DNA
gttccgtacgtgcattactacgagggcatgctcagcctggggccgtaccggctgcccgatgccggccgtgaaatgctcaggtacaagccgcccacgccggagtttctcaagttccaggtcggccacttctaccgcgcgccgctgtgggagctggtgtaccacgagtgcgtggtggccgagtggtattggggcgactacaacaacaaggcgcccgaggtgtgggaccgccgcgacctgttcaacaccctatacggcacgccgcccatgtacatgttcgacaaagcgggctgggagaaaatcaagccgcgcgtcgtcgagagctacaagaacatctgcccggtggtgcgtccgctgggctatgacgagatgctctcgcatgagtttgtgagtgaggatcacgcggtgcagcgcacgcgctgggcatcgggcgcggagatcgtcgtcaacttcggcgaggcggcataccggctgcgcgacggccgctcggttcctcccatgggccgcgtggtcaagtgagccgccgattccgcagatcgtgcgggttgtaccgcaggcgtccgttgtagcgctggcgtcccgccggccggccccgttgtagcactggcgtcaccgccggccggccccggctgccgattccccttcgcccgcctggttgtcacagatcggcaacggcgcccagggcgagcagcatgaagttttccgggccgggcagcgcgaagagcggtttgcgcagcagcgcaaccgccggcagtgcggtctgggccacggtagcggcacccgcacgaatgccaagcccgccgcggctcgacagctttatgcgcttgtcaggccccggacagagtgacatcgacctcagcgcttcaggtagtagatctgcgtgctgcccaccacgtcccaaatcggtcccagaatgttctcgattaccgccttggcgttcgcatagacgtcgtcgtacgtcatgatcttgagcttggggtgctcgttctccatggtggccagcttgcggcggttttcgggggtgagagcgcttgaccgtccgatcacgatgagacttcttgggttgctcgagatcgccgcaagaccgagctcgcgctgggcggttgcgaggttgtcctctagatacctcttccaatcggcgatttggccgcgagcttcgttcagctcgcctgagggatgaccgtcctggcgaaacaggccgtgactcgacttctccagttcgaccagtaggtagtcttggacagcgtcccggaaaacgaaatcggtcttcttggcgccgagagcgagcttcggccacattttagtatgggcgggacaaaggaggagggggtgctcttgcaggaagctctggagggcttcttcgcgatcgggctcagagtccaatagtcccttgaatgccttgagcagagcgccaaacagtcttctagcctccgcctgtggatctagggactggaagtgagcctcctgcagttgttgggcgaggacagaagctaggatgtcgttctccgcccaaattggcgcgtactcggttttccagtgctcaaggtcgaggtagggatagatctcgatgcaatcccagccgacaggaatccggagagcacttcgaagcacgaactgctgcccctcgcccaaaccctggtgccgccccacgacctcgccgaggagacaaaattcgaagacgctgcgaactgacaataggcagaggggcttctggggtggttgggggaggcgctccggtctttcaatgacggagtcgaacccgatcctggctgaaagcagctcccttgcctggttggaggttgggtcggtcgcggacaacttgaactgaaagccgcttgtcgcaacggttgatacaaactgccggccggtatggcaccgaatgacattctgcgacagccatgctgcaatctgcgagaggtcctcctccacccacgcggcgaggagcctgccgggaccaactcctttctcgtagcggatgaccgcgcccccggggcaacacgcgaccagggtggtgcctggggcggtgaggtggggcggtacgaggtgactgatgtgggcgtacttgctggccaccagctcccttgcagccctcagatatgcgcgaacggtcgcgcccatccgactgatgacgtctcgctgatcgttgctgagggccgagatgtcctgctcctccgcgtcgatgaactccatcgggttgtcaccagtgaaggacacccgggctctcttgatgatgctctccgacatggaccgacgcctcccgcgcggcctaaggagctaggtgctgaaagcgccccccgctctcggccagcccccgcagcggctggctgggcggcctcaaatcttcatggtgtatcctgcagctttgagttccttgattatggaaaatccaatcgcctcgatcgattcagtgatgggcttgtacaccagtccctcgatgtccgagggccgggccacatcgccctttatgaggcaacagaccctctccctgccgagcctgccaacaaaatacccgaactcgaagatcacgttggggcgcgctcgaacgtccttctttcggcgggcatcgggcaatgtttcctggtcggctgtgtaccctacatcgtcaggcgtcaagagaatgaacgcaaacccgacgtgcgaatgctgctcgaacttttcaatcaacgtgcgaccctgatcaggctgtctgtgtaaaactaccggctccatgccaaggctggtgagaaaaacctccaactccgtcttcgttgcatggtcatggccgtgcacaatgaagatacgatttgaaagcgcacctgaggaggcaacggccttcggtcgccttgattcgccgaacacatcgtcctgcacgatctggatggtctgttgaattgccgacagcatcaaggacttctgctgatcgaacttgtcgtgcccatctgcttcagtcgtgatttccatcgcacgcttcaagagtgcgacgggcgccgaagttggctctaggagtgcttggatggtgttacagacgcgggtcttccaagcgagccacgccggagcgtcttcgccaccgtagtcggatgagagtccaggaggccgaatcgaaaagttcgtaaaagtgaagtttgtgtcttctgctaggagccgcttcagttgcccgatgctgctgtccataggtggcctccaggtttccgccgcgtccaccgaactcctgtttacgcagacccggataaaaccggccccggtcagtctaacacgaaaccagccgcggcgagtcgaggtggcaactgcgttgtttctaacgacttcttccggggccaataactttgttcccagtttcaggccgccccgtcagtccggatcattccggggcgctcggtggaggcggcttcggcaaacgggaaaccaatgcagcccgctgaatcaggctttgagaacggcgcggatgtctttgagcaaacggaacaagtggtagggatcgctcggggaagccgtgaagccgaaccgttcgtagaatgccctggcctcctcgtccttggcatggactgcgaaagcccgtatgccggcaatctcggccgcttgcagtgtccggagcattgcgtctttcaggagaccggaaccaaggccctttccctgccagtgcgtagcaatcgcgagacgagccagcagcataatggggacgggatgccgggccagccctttcttgaggcgctccggcgcgccatcatattctacttgaccgacaaccagcgtgtagtaaccggccacctccgcatccgccaccgctacgtatgtctgagaggcgccggcctgctggttttggagcgcgtagcggatcagaaagcggttgagcgcttcacgtccgcagtcgaaaccttccagtgcgtgtccgcgctgaagcttctcaatgcggaggttcatctcttgcggcctcgctcgaagacgctcggctcgcgcagaagcttggccagtcgcggagccggccgcgcaggagcatcgagagcggcctggaaggcggcccactgctcggcattcaagccaaagcgccggcgatccggcagggtctcttcggcgcgcgcaagggcgctctccaaaacgaactcgctgaccgaccggcgggcggccagggcggcagtctgcagggtgcgctttgccgacggagtcaggcgcaagtcgagtttctcgttacgggtttcggcggtgggcatgtcgcagtcctcctgccacgaggtcaggatagcacatccgccagacaatgtcatgacagcggacgtgttcaggcagcgggcatgtcagcgcgtgcgtcctctgtgttcctctgtggttcagagtccccgcgcgtcggacaacggggccggccggcgggacgccggcgctacatcgcccgccctgttcatggtaatctgcgcaatctgcggctaaatgcagtctatgaatatccatcgacgacgctttctgatgagcagcggcgcggcagccggctccatgttgttcacggctgcggtcccagccgctgaaacaaagacggcaaacctgctggccggcacatggacgctcgaaaaactggcgcccgtgttgctgccgcgcgagaagtggaagccgtttccgccggcattcgagcgggccgcctgggagcgtctgccggctgacgatcgccgcgcgctgatcgaggcgggcgaggcgcggttgggcgcggcctggccgccattgccggccacgctctttctcgaataccggcgcatcggcaaccgctccaattacgagcgcgtgcgctacgcgcgccgcgaccagttgcgcgaactggtcgtggcggaatgcgtcgaaggcaagggccgctttctggatgagatcgccaacggcgtctggaccacctgcgaggagtcgttctggggcgtgccggcgcacctcggcgcgcaaaaggcgggcaccggcctgcccgacgttgccgagcccatcgtcgatctgttcgccgccgaaacctccagcctgctggcctggatcgactacctcgtcgggcctcggctcgacccggcgtcgccgctgctgcgcaagcgcatccgactggaagtggaccgccgcatcctgactccctgcctggagcgagacgatttcggctggatggggctggacggccgcgaccgcccggtcaacaactggaacccctggatcaactccaactggctggcttcggcgctgctgctggaggacgacggcaagcgccgcctggcggcggtacacaagatcttgcggagtctggaccgcttcctggcctcctaccacgacgacggcggctgcgacgagggccccggatactggttccgcgccggcggctcgctgttcgactgcctggagctgctgcactcggccagcggcggcgccatcgacttctaccgcgttccactggtccaggaaatcggccgctacatctaccgcgcccatatcttcggcgactgcttcatcaacttcgctgacgctgccgcccggttgcgcatcgcgggcgacctgctgttccgttacggccgccgcatcggcgacagccggttgcagtcgctgggcgcctgggccgcggcgcagccgagcggcgcgccggggcgcagcgagagcatgggccggcaactgcccgcgctgttcaacctcgaaaccattcgcgcggcgaaaggcgcgcagccgctggtgcgcgatacctggttgccgggcatccaggtgatggcggcccgcagaaaggaaggctcggccgaggggctttacctggcagcgcagggcgggcacaacgcggagagccacaaccacaacgacgtcggcaacttcattgtctatgccgacggccagccggccatcatcgacgtcggcgtcgaaacgtacacggccaaaacgttcagctcccgccgctacgagatctggaccatgcagtcggcctggcataacctgccgaccatcgacggcgtgatgcaggcagcgggacgggagtttcaggccaccgatgttgcctatcgcgccaacgaccgagccgccgagtacagcctggatatcgtgcgcgcctatccgccggacgccgggctggactcgtggaagcgaacgttccgttttgaccgggagaagaacgagatcgaggtggccgacagttgcatcctgaagaagcctgcccggcggattactcagacgctgatgacctcgtgcaaacccgagcaggcagcgcccggcaggctgaagttgcaggtgcccggtttccgttccggcccggtcgcgattctttacgacgcccgggttttcaccccttcggtcgaggaagtgaagatcgaagacgagcgtttgaagaactcctggggcgagcgcctgtaccgcatcctgctcacagccgccgatccgccacagcgcgcctcctggtccatcacgttttctcaacgctgaggcgttgtagcgctggcgtcccgccggccggccccaccaggttcacccaggcgtaccggggcgatatgcagggcctgccggcgggacgccagcggtacaagggttgcaaatttcgtgattaaattggcggtggaggtgggtgtgacggtgcgcattctaatcgcccttttgtttttggctgcgccgggctgggccgcccagaggtacgacctggtggtgtacggcggcacggcgggcggtgtcatcaccgccgtcagcggcgcccgcgaaggcctgaaagtcgcgctgctggagccgcgcgaccacctgggcggcatggtctccggcggcctgtcgcggaccgactatggccgcaaggaagtcatcggcggctattcgctcgaattcttctggcgcgccggccagcattaccgcatggcgcagtacgggcaggaactggcctggctggtggagcccaaggtcgccgagcagattttgcgccagatggtgaaagaggccggcgtgactgtgctctaccgtcaccgcctgcgcgagaaagacggcgtgcgcaaggaagggcggcgcatccgcgagattctcacggagaacgggtcgtcattcgaggccgccgtgttcgccgactgcacgtacgagggcgacctgatggcccaggccgccgtttcctacacttggggccgcgaaggcgtcgagcagtatggcgaatcgctcgccggggtgcgcgagaaaacgccgtatcatcagttcaaggttgatgtttcggcgtacgacgagacagggaagctgcttcccgagatttcaccccagccacccggccagcccggttcggccgacaaaaaagtgcaagcctacaacttccgcctgatcatctccagcgacccggccaaccaagtcccatttccaaagccgcggaactacgacccggcccgctacgagttgctggcacgcctgctgaaggtgacgacagaaaagaccggccgcacgctgaagttcggtgaagtttcttcgcctatcgccgtgcccaacaacaagttcgacgtgaacaacaacggcgcgttctcctccgactacatcggcaagaactacgagtatccggaggcgggctacaagcgccgcgaggagatttggcgcgaccacgccgactatgtggccggcttcttctatttcctggcgcacgacccgcgagttccttccgacctgcaaagcgagaccaaccgctacgggctggcaaaggacgaattcaccgataccaaccactggccgcaccagttgtacgtccgcgaggcgcgccgcatggtcggtgagtacgtcatgacccagaaggacatccagaccgagctgaccaagcccgacgccatcggcatgggctcctacaacagcgactcacacaacatccagcgggtggtgacgaaggaaggattcgtcatcaatgaaggagatatgcaggtgccggtcaagccctaccagattccctaccgtatcctgacgccgaaaaagggcgaggtggaaaacctgctggtgccggtctgcttctcggccagccacgtaacctacagcacgctgcggatggagccgcagtacatgatcctgggccacgcggcgggcgtggcggccaaaatggccattgccgccaagaagcccgtgcaggacatcgataccgccgcgctgacacgaacgctggtgaagcagggcgccgtgatggaatacgtgcccgatgcccacaacgccgcgtttggtttgttccgccgggccaaataagtcaatcaaggccgacataaaggaaaacgccccgcggacggggcgttttctcaggtcgctgaaacagcgttgccttacgacgaaagcttactaggatatagccgagcaatcgccgctcaggtatactcgtaaaatactgtatccccgggcggtccccttgtcaaggagtttgtcatgcagctcacggagcctcagtctaccgccgcttcctcctacaccttaggcctcgacctcggcactgcgtccctcggatgggccgtcgtggacggcctgagccagcgcgtcctcgacgctggtgtgcgaatcttcgagccggcagtcgatgccacgaagttcgagaggggacaggagggggcctcgaagaacgtcgcgcgtcgaacggcccgcctacagcgccggcagttccggcggcgtgcagcccgccaccacgatctttttctggaactgcaaggggccgggctgcttccccccacacccgacccgaagcctgccgatcgcggcgaggctcgccaggcagtgctcggacagctcgacgcgcagttgagggcgacgtggcgggagcggctggccgaactccagcctgcctgcccggcgcccgagcaaaccctgctctacgccttgcgggcccgcgcgcttgatgttcgcctggaaccgcacgagctcggccgcgcgctctaccacttggcccaacgccgcggcttcaagagcaaccgccgcgcctcgaaacgggaaccgggcaaggacggggaaaaggaagagagcgagttgaagcaggagatggccgcactcgagagggagatccaggaatcaggctcgcgcaccctgggcgagtttctttcccgccaggacccggcggcggcccgcattcgcggccgccatgcgcaacgcaggctgtacgaggaagagttcgacgggatctggaacagacaggctgagtggcacgcggtcttgacgcccgaactcagagagcgggttcataatctcatcttctttcagcggccgatcaaggcgccgccgcccggccgctgcgagctggaaaccggttgcttccgcgcccctatggccagcctccccgcccaacgcttccgcctgctgcagaaggtgaatgacctgaggattctcgatggccgcggggagcgcgcgctgactcccgagcagcgcaccacgctcctcgccgagctcgaaaagggcgatgtcacatttggcgcggcccgcaagctgctgggcctgcgcgggacacgcttcaacctggaaagcgagcgccaggacaagattgagggcaaccgcaccggcgcgaagatgctggccgcattcggggagcggtggatggccttcagcgaagccgagcgggaccgaatcgtcgagctgtggcgacagaccgaagacgaggcggaactgaaacaagtcggccagcaatatgggctcgaggccgaagccgccgaggcctgggcgaggccagaagccgggcccgaggacggttactgccgtctctcagtggaggcgctccgcaagctgctgcccaggatggaggccggcgcggcgttcaagacggccgagaccgaggtgtacggcgcccgtttctcgggcggcgctgttcgcgcccagctcgacccagtggccaaggtcctcgcgcacgtgcccaaccccgctgtcatgcgctcactgacggaactgcgcaaggtggtaaacgccgttgtacggcagttcggcaaaccgcacgagatccgcatcgagctggcgcgcgacctcaagcgcagcgcccgcgaccgggacgcgctttcgcgcgccatgtcccagcagcagaaggcgcgcggcgcggccaagggcgaaattgtcaaggagctgggcattcagcgcccttccggcgccgacatcgaaaaggcgctgttgtttgaggagtgcggcggcctctgtccctacagcggcgagccgatcgacttccgggcgctgttcgagaccggggagttcgaggtcgagcacatcctgccgaagaccaggtttttcgacgattcattcgccaacaagacgctctgccaccgctcgatgaacgcacagaagcgcgatcgcaccccgtttgaagccttcggacacgaccccgaacagtgggagcaaatcctggagcgcgtgcgcaaattcaagcgcttgggggcggtccaccggctggggaagaggaagggcaagagggccgaactcgagccgcgccatcccaagctcgggcggttcctgctgacgagcgcggacgagctcgaatcgttttccaaccgccagttgagcgatacccgctatgccagcaagctggccgcgcgctacctggagcaactgtacggcggacgcgacgtggagcaggcggatggcaggaagcgccaggcaatcttcgcctcagcgggccccgccactgccaccttgcggcgggcctggggcctggaagcgattctcaggcagccggaggcttccgccaacggccagagcaagggcaagccgcgcaccgaccatcgccatcacgccgtcgacgccgtggtcatcgccctgacgtcgcgcgccgccgtccagcaactggccgcctccgcggaggcctcgcagcggcagaccggggtagcgcgcgtctcctcacgcacgctggaagcgccctggcccgatttcgtcgagtcagttcggccggttatcgagcgcatcaacgtgtcgcatcgccccgagcgcaaactgagcggcgaaccccacgaccagaccctttatggacgcccccgccagagcggcgagcgggagtgggcgcatgtccgcaaatcggttcacacgctttccgagaagcagattcgcgccgcggacgtgatcgttgacccgcgggtgcgcgacgcggtccgggccaagctcgaggagctgggcgacccaaagaagctggaacaggacccggcttgccttgtgacgcggcggggcaagcgagtgaaaatcctcaacgtgcgcatacgggtgccctgcgaggtgcggaagatcggcgctccgccgcgggagcgctacgtttggctgaggagcaatcaccacatgggggtgtttgccggccgtgacgcaaaggggcgcgaggtctgggactacatcgtggtcagccgcctggatgccttcgagcgccggcgcagcggccaacccgtggtgcaaaaggacctgcccggccagcccgatttccagttcctgttctcgctgatgtccggcgatatggtcgagattgaggacaacgacgggcggcgcggcctcttcgtcgtgcgcagcatcagcaaaggcgacttcaacttcgctcgccatacctgcgccatgctcaaggaggacatggcgaagacgcgccattggctgcgcattcgcagcatcgaaaaactgcgccagcgcggctgccggaaggtctcggtagacccgctgggacgggtccgggaggccaatgactgaccgcatcatcgacatttccgaggccttcgccgaactgcgcgttcgccaccagcaactggtcatcaaggtgggcgagggcgatccggtaaccacgccgctggccgagctggccgccttggtggtgtcgaacccctcggtgatggtcagccaggcggtgttgtgcggaatcgccgaagcgggcggcagcgtggtgatctgcgaccggaaattcctgccggtggcaatgctgctgccgctgcaggcccacgggactcaggccgagcgcttcgcgcgccaggcccaggcgccgctgcccttacgcaagcgcctttggcagcagatcgtgcaggccaagatcggggcgcagggccgcctgctggtgcggttgcacggccaggacggcggactgggggctatggcggcccgtgtccgctcgggcgaccccgacaacctcgaggcccaggcctcccggcgctactggccgctgctattcggagacccgcatttccgccgcggctcgcccggccccgaccagaacgcctacctgaattacggctacgcggtgctgcgggcgctggtggcccgcgccctttgcggcgccggcctgcacccttcctttagcctgcaacaccacaaccggtacgacgctttccgcctggccgacgacctgatggagccgcttcgccctctggtcgatgccgccgtctatgagtggattcagaatcatgaccgcacgcaacccctggacaaggagtgcaaggcctggctgatcggggcgctgctggagcgccgggaggcggcaggagagtcgcgtacgctgttcgacctggtagcgcggtacgcctcaagcttggcgcactgtcttctgggcgaggctggctgtctggagatgcccgaaccatgagcctgctgccccgccccctctccgggttccgtgccatgtggcttttggctatgtttgatctgcccgttgaaaccgctgagaatcgccgcgactacgtgcgctttcggacctcgttactgaagcgcggattcatgatgctgcagtactccgtctacgcgcgctacctggccagcgaagacgcggcggatgcgcaccgcaggaccgttcgagcggcattgcccccgcttgggcaggtgcgcctgatggccgtcacagaccatcagtttgcgaagatggaggttttctatggcagaaaggctaagaaaaccgaggaaccgccagctcaaatgctgcttttttgagccggcctgggagcgtaaaccccgcgcagccaagcggctgcgcggggcggaagtatacctgagcggcgattctcggccaaccccagcttggtgacttcaagctcgggcggccagtggagtatacctgagcggcgattctcggccaaccccagcgtgactatcaacggccgcaaagtgtacttagtatacctgagcggcgattctcggccaaccccagcccatagctcgcggaccacggcgaaaatccgagtatacctgagcggcgattctcggccaaccccagccaggtgatctcgaagccctgggaccacctgagtatacctgagcggcgattctcggccaaccccagcaaatctgttcctggtccgaaagcgcgcaatagtatacctgagcggcgattctcggccaaccccagcattcctatgcaccaggccgaggccggctcagtatacctgagcggcgattctcggccaaccccagcgattttgcggatgcgtagatcataggggagagtatacctgagcggcgattctcggccaaccccagcctgggtttgcgcgcgcggaaggccgtcgaagtatacctgagcggcgattctcggccaaccccagcctcacgcgcacgctggcgatgctgacgggagtatacctgagcggcgattctcggccaaccccagccgctaggtagtattcggcgtaaccgccctcagtatacctgagcggcgattctcggccaaccccagcttaccgcattcaggccaatccaacaccatagtatacctgagcggcgattctcggccaaccccagccaatacgtcgagcgctactacgagcccaagagtatacctgagcggcgattctcggccaaccccagcgcgcggttcactaagggtgtcgaggactatagtatacctgagcggcgattctcggccaaccccagcgccaacactgttgtgggcactgacctcttcagtatacctgagcggcgattctcggccaaccccagccctggttccactgggccttgggtggcggatagtatacctgagcggcgattctcggccaaccccagcctcagggcgctcaggccgcttgggacgcttagtatacctgagcggcgattctcggccaaccccagctgggagattaaggggaacaagatctcatcaagtatacctgagcggcgattctcggccaaccccagcaacggcactatgagacagatcgcggaggtagtatacctgagcggcgattctcggccaaccccagcaccacgtacagcggtcaacgctgaggctgtagtatacctgagcggcgattctcggccaaccccagcgtccgtgttccagttgactggacgctggaaagtatacctgagcggcgattctcggccaaccccagccgcctcgatggtgagcatgtcgccctcgaagtatacctgagcggcgattctcggccaaccccagccgcctcgatggtgag

SEQ ID NO: 438 - DNA, 23012 bp, synthetic construct
  misc_feature 1..23012: note = Synthetic
  source 1..23012: mol_type = other DNA
tgttgcacgggacttaacaattttgcgcgaaagcagcgtcttattcttcagtcgttcgtcgaaaacagagtacttcagccgacctacaccgcgcataaaaaaacacggaccgcagtcgcctgcagtccgtcggatgcggcagccccgtagggctgcacgggttgagttgcggtcagtgttcttcgccgccgtgcttgaacattctcaagccgctcgtcattgagctgatggtggtggcaccgcccatgacgtcttcgcggaagctcatgtagatgtgagcaatcgagaagaggatgaagatgtacatgaacgcgtggtgcgtggtgcgaacggcctggctgtcgccaaagagcacgaacacccactcgaaccaggcgtaccagccggcgtcggcgccccaggcctgagcgtagagcgccagacccgtgatgatgatcacgatgctgcccagagtgaacatgaagaacatagcgcactgagcaagcgggttgtggccggcgtattccggagacgtctttctgagaaacaggtagtacttgacctgctcaaagagcatcttccaccacttcaggctccaaagcggcggcacgaggatcatgcgcgagtatttgttgccgacgatgccccagtacagtcgccagataaagatgaccgtaaagatcatgccggcagcaaagtgcgcaagccgaatgtatgcgaagtcatacgtcgcccaggtgtcgccgaggtttgctaccagaggagctccgatgagaaaacccgtgacgatcatcaccgccatgcacacggccatcgcccagtgccagattcgcacgggcgcttcccacacgtacagcgggtgcgttcctgccgaaacgtcaacttcataggtgacgggatcgattttcataaacgtaccttccatctgttggtccgggcgggcggcaaacagcgtctgccgctcgttcggacttgacacgacaacgttcgcgttaacgaaccttgacgctcacgagctcttcgcccttgttgtccaacacatgcgtggcgcacgcgaggcacgggtcaaacgagtggatcgtgcggatgatttcaagcggctcttcgggcttggcaagtttggtgccgataagcgaagcttcaaaggcgccgtggttgccttccgtatcgcgcgggctggcgttccacgtcgtcggaacgacagcctgccagttggcgatcttgccgttgtcgatgacgcagtagtgtgccagtgcgccacggggagcctcgcaggcgcccacgcccttgcactgtttgggccaagtcttgggttcccagaactccatgttggcggcagcttcgtcgccggcgcggatgttggcgatcagatcgtcaacgtacttcaccatcatgtcggccatgaagctcgcttcaagggcacgggcggcgtggcgaccgagcgtcgagaacatggcttcgagcggaaggttgagttctttcagggtggccagagccggatccttgtactgcggcatgttcttgacaacgcccatgacgacgcgggcaagcgggccgacttccatcatgtgtcctttccagcgcgggctctttacccacgtgtacttgccgttttgcgaaatccagttgtatttctggggcgtgccgtcggagtccggtgcaaagccgaaggcatggtcggtgacgccgtcccacggatgcaggcccttcttgtcgcccgggtacttgtaccacgagtgatcgacaaattcctgaatttcgtccgggttgcgcaggtcaaccggatgcacttcgtttaacttgccgtcaatgatggcgcccatgggcatcatcaggctcttttcgctccattcattcggaatttcagggaagtcgccgtagcagagcaggttcttggagctgatgccgccgccgatcttgaaccattccggatacatgctcgcaatcgccttgacgtcgggaatgtagacgttgttgacgatgtcaacgcaggccttggcgatgtcgcgcatgtaattcatgctgacttcgttgaccatgacacctgcggcacccgtgtcgtgcatgttgatcgggcaggctacgccgccgacgagatagttcggatgcgggttcttgccgccgaggatggtgtggatcttgatgatttccttgtggaagtcgagcacttcaaggtagtgcgcaacggcaaggaggttgacggcaggcggcagtttcatggccgggtggccccagtagccattcttgaaaatggagagctgaccactttcgacgaatttcttaagacgcgcctgcacgtcacggaagtagccggcggtcgccagatggtgatgcgggctgatcttctgttgaatttcgctcgtttctcgcggatcggccgacagggcgctgacgacgtcaacccagtccagggccgagagctgatagaagtgcaccagatggtcctgtacgtacagggtggcgttcatcaggttgcggatgatgttggcgttcttcgggatcttgatgccgatggcgtcttcgacggcgcgcacggctgcaagcgcgtgaatgccggtgcagacgccgcagatgcgttcgacgaacgcccaggcgtcgcgaggatcgcgccccttgagaatcacttcgagaccgcgccacatcgtgccggtgctcattgcgtcggtgatgacgccgttggcgtcgatttctgcctgcacgcgcagatgaccttcgatgcgggtgacggggtcaacgacaacgcggcgggtgttctggctgttgctcattctttacctccgatgtccttgttggtcttggcgcgggcttgggcaaccgcgctcatggctgcgtgcgctgcggcggccacgccgacgacggcaacggtggcgatgccgaccttgtcgaccgtggcttcgacgccaccccagcccggaggcaggatgtcgggttcgtggttgtagaagctgcccttgtcaaagaagttgttttccgagcagccgatgcagccgtggccggacttgacgggccaggacagaccttcattccattcgactgtcgagcaagcgttgtacgtggtcgggcccttgcagccgactttgtagaggcagtagccaagcttggcgccttcatcgtcgaatttttcaacgaactgaccggcgtcgaagtgagcacggcgatagcacttgtcgtgaatgcgctgaccgtagaacatcttcgggcgcccgaggcgatccagaggcggcagacggtcgtaggtgaggatgtaggtgatgacggcggtcatcacttcgggaatcggcgggcaacccggcacgaggacgacgggcttgtcggtgatcacctcggtgatcggtaccgacttggtgggattgggcttggcagcctgcacgcagccccaggcggcgcaggaaccccagccgatgacggctttggcgttgtggcagacgtgtttgatcttgttcaagaacgtctcgccgcccggaatgcagaacacgccgttctcgccaagcgggatgttgccttccacggcaacgatgtagttgcccttgtacttttcgatggtgtcggccagggcgctttctgcctggtggccggcggcggccatgatcgtgtcgtcgtagtcgagactgatcagatccatcaccatgttggcggcgatggggttatagctgcggatgaacgattccgtgcagcaggtgcattcaagaccgtgcagccaaacgaccggcgtgcggggtttggttttcatggcctgagcgatttcctgtgcgccggcgcttccgagcccgaggcttgcggccgtgagcgagcagaattgcaagaagcttctgcggctgatgccttggcgtcgcaacgcttcatattgcgtttcaaacataggctttctcctttcggtgaaggggcgattcaatttttattcgaatctgtaccgagagtcgcaaatggtttatgtgaacaaaaaaactcccttgcggctttgaaaagatgctatcgaggcactttgagaaaacctatacgccgaaagtactttttattatcccgcaggcttacttaccctccaaggacttggtttggtaacaggtcgaacgttggcggtctagtccgaaaggcggatagagaaatacaagacttgaagcaaacgactacgtctaaagacgtagaaaggccggtgttcgagcaatttgtagaatgtaaaaaaggcgcccgcatccgaagaagacaggcgcctgaggaaagattccttaagaagaaattattttccttttgctttcgtgtccgaaagatcgctgatcttggcgtttttgatcagatcatcgatataagtctgcacgcgctgctgattgagaagttgacgaagagcgtgactttcggcttgatagttgacgaagcgctgggcaggacgaacgccttcgagcttgacaatatgccagcccagttgcgtcttgatgggctttttggcgatttgtccgggcttgagatttttgaagctttcggcaaattccttatcaaacatgttgggcgaagtccagtcaatcaggccgcccatggcgcggttctgagccgtgtccttggagttttctcgggcgatgcggtcaaaatcgccgcccttcttaacgcgtgccaacagatccttggcggtcgtttcgtcttcaacgaggatgtgacgcaccgatacttcggttttgccccagcgcttctgttccttttcaaagagagctttgacttcttcttccttgacaggattcttggcgagccagtcgttgatgaccgtgctcatcagaatgtttttggtggcgttgtcaatcatgcggcgaacgtcatcacgctcggaaagcttggccttacgggcttcctgcaaaagcagcatatcgcgggtgagcagatgacgcacttgcgtctcgagctgtggcgtgcgttcctggccgcgggaggtatagacacggatgagttcttcctgctgagccttggtgattgtttggccgttgacagtaaagctggatgtggcggccatggcgccggcggcggccatgacggcggcgcatccgaaggcaatgtgtttgagagccataaaagaattttccttcacggagttagattcgaagaacgaaaaagtttcggtcattctggcatcgagggaacatgctttgcgatccagaaacccataccaattgtaaaaatcagtgtcaagcccatcagcccgaaaagcttaaagttgacccatgtgtcagtcgaacaggtgtaggccacagcgaggttgatgacgccgacggtcgcgaaaaaggcaatccatgccttttgaagtgtgttccaggcagtatccggcattttgatttcggcattcgagagcagttttcggatgtagttgcgcccggtgcactgagcaaaaagaagaatgccgccgaagatccaataaagaatgctcggcttccacttgatgaacatttcgttttgcagccagatggtgagcgaaccgaagacaacgatcacggcaagtgagatccatagcatcggttccggctttttgccgcgggcaaaaacgatggcgatttgcacgaaggtcgatacgatggccaccagcgtggcgagcatcactggagcgtgttccggactggtgcctccggtgatcaaggtgagaatatcggcggcagtctgcgggtcggattctccgaatttgaacgcaccgaaaaagagaatgatgggaaataggtcgaaaaataatttcacggcgatgtttttcttgagtcgtagaagatgcgacagggcttatgcttgccgcgttttgatacggcggccattataaagtcgatagaaggcggcttcgtaccgtggacatctcgggagggattgcgttacatttccgaactcttgcggcactctgacaggcttccacgtggtgcggggcgttatagatttacggctattgtgcaggattcggtgtgccatatggcccgaatctgcggactaccgcacgcttgtttgagtgctcagatgggatttcctgtatatgaatcaaggacttaaatacgtacttatgacttcagcagcagtcaccgccatgtcggcttctgccgcggcattaaagcccgtgcacacggtcgaaggcatcaaaagctatgaactcgacaatggtttgcaaattgttctttttgcagaccaaagcaaacccacggctacggtcaacacgacttatctcgtgggcagccgtatggaaaactacggcgaaacaggtatggcgcatttgcttgaacatctgatgttcaagggcagcaagaactaccctgatcccaccaaggagttcacacgccgcggctttcgcatgaacggcacaacgtggcttgatcgcacgaattacttcgtgagctttaccgcaagcgacgacaatatgaagtgggcgctgggctggagtgccgacgcgatgaccaattccttcattgccaagaaggatcttgataccgaaatgaccgttgtgcgtaacgagtatgaaatgggggaaaacaagcctatttccgtgatgctcaaacgcatgcagtcggtgctctatgattggcacgcatacgggcgcagcacaatcggtgcacgcagcgacattgaaaacgtgcccatcgaaaatctgcaggccttttaccgcaagtggtatcagcccgacaatgccgtgctgaccgtctcgggcaagttcgacgaagccaaggtgcttgaatggattcaggaaacgttcggcaagatcaagcgtccggagcgcgtattgcccaaggcttggacgattgagcccgttgccgacggtccgcgtaccttcgaaatccgccgaccgggcgaaacgcagcttgtcgcagtgggataccgcgtgccctcggctttggccgaagacaccaatgcggtggaaaccgccaccgacattctggccgactctccgcgcggacgtctttataaggcgcttgtggaaaccggcatggccacgcaggttttcggctggcctatgtccacgcgtgatccgggtttcgtgatgtttggcgcgatggttaagaagggtgacgacattgagtccgtaaagaacaagctcatcgaaaccatcgagctttcctttgccaagaagcctgctaccgacgaagaagtcggcacgagtcttgcggaagctgctgtggattacgatcgtgcgctttctgatcctgaaggctttgccgtggatctctcggactatatcgccttgggtgactggcgtttgttttttgccgatcgcgatgcgactgccaaggtgacgcctgatgccgtcaacacggctgcggctacctattttgttcgagacaaccgcgtggtcggtctctttattccggatgatcatcccaagcgtgcgccttatatgaccacgcccgacgtcaaagacgtgatcgccaaggcaactttcaaggaagagggagatcaggccgaagcctttgacgcgagtcaagacaacattgacgctcgtacagaacgtttgcgcatcggcggcgttgaagtggcgctgctgcccaaaaaaacgcgcggtcgcaccgtgaccgttctctcgaatttccagtggggtaatcttgaaagcaatcgcggtaaggcggcacttaattcgatggttctgccgatgctttcgcgcggtgccgaaggaatggatcgtaaggccattgccgacgcctgtaccgaactcaaggttcagggcgacgtaatgggatacaccacgacggccgacaaccttgtggcgaccattgaactcttcggtaagctttttgaaaagagcacgttcccgaccaaggaagtcaatcagctcgtcaagcaaatgacaaccatgatggaagccaagagtgatgatccggtctatatggctcgtgaagcgttgaagaaacacttccagacttacccggcgggtgatccgcgtaacacggtgctcaatgaagacctgattaagggactcaagtcgcttacccgtgaagaactctacgactggtacaagacggctgtgagtgctgaacacggtgcaattgccatcgttggtgaattcgatccggccgccgtcaaggccgctcttgaaaagctttacggcaacgctaagaaggttgacgcgaagtatgcctatgagcgttactttggtgaatacaagcctgtggctgcagaacgcatcgtgatcgacgctccgagcaaggaaaacgcagtgattgtggcacgcgttgattttgcagcaagtgtcaacgatgaggatgcagctgcgcttgtcgtggctgactggattctgggcggcggtacggggctttccaatcgcctcgttgatcgtcttcgtcagaaagaaggtttgtcatacggcgtcggctcgcacgtgaagctgccgcagttcggcaatcgctcgagctggatgatgtccgcaatcgtcgcgccgcagaatttgcccaaggcagaagcctgcgccaaggaagaaatcgagcgtgcggtcaaggaaggcttcactgaccaggaagtgaaggaagccatcaagggcattttggattctcgtgccgtcaaccgtgcacaggacgactaccttgctcagagctggctacagtttatggaagcgggcaagacgtttgctttcagcaagcagtttgaagaacgaatcgccgccgtgacggtcgactccgtcaatgccgctttgcgccgcatggtggtgccggaaaatgtgacctggattctttcgggtgatctggcaaaggccggaatcaagaagtaatccgctctaaaatctggctcaaccagaaggcagcgtcaactcatcggtagtaggcgctgcttttttctatcgctgttcgcgtagaaaaccttcgccttcaggcgtgagctcaatgccagcggccttgatgctcgcagcgatctctcgcgtacattcgaaaacagcaggatcgattcgtccggcagccttgggccagaagacatagaagggaatggtcagcggctctttgagatcgatcagtttgcagtcgttggaaacgctttttgctgccagtcggtcagtgaaatgcactccgacgttgcgcttgacgaaacgaagggccacctgcgtggacgatacttcggcagcaatgcgagcttgagttggcatgagacgtctggcgtgttcctgttcgagtgtgtctttggaaagaatcacgaattcggcatctcggcaatcttcctgaccgacggcgtcgagctgcgcgatcgggtgttgacggcttgccaccagacaaaaaggcaggtgagcaagcgccgttttttccagatcgtcgtgactgctcagaagcgtgccgaaaccgacgtcaaacgggtgagagtatttggagtagtggatgtcgcggctggcatgtacgtccattgtcactcgcaaggtttcctcatggcgcttcatgatggtgaccacggccggaatgatcacgtcggagcagtggcgagcgagtaccgcaatgcgaagtatcttttttcgatcacgctgtctggaatactcttccaatcgttgccaagctcgcatcgactccatggcaaccctgtaaaagtcggcaccttcttcggtaagggtcaatgctttacctgagcgatcaaacagcgcaaacccgagtcgttcttctagctgagaaatcacacggcttgcggcggaggccgagagcgcgattttgtctgcggccgcaagcaaacttcccgattcgacgacggcgcagaagaggcggacggatttcgatttgagttccatgtgggcgatatgaaaaaaggagcgggtctaagctgctttcagggcgaccgaaaacgagtcgtgtgcaattaggcgacacacgataaaactatcatccgataataggggatcgtctacgattgtcgaagataataccctgggacggttgacttgaggttggcaagccttcagaaagaagaaaggggcgcatatagcacccctcggatctgttgcattttgcaatgcttgttagtggcaaaagctcgtttcctaacgatattgcccggcaagtttagcctgctcctagcgtcacgtcaatgatcagagtagcaacaagcggagtttgatatgtcttcaaagatgcgttatcgccttgcactggatttaggaacaacatcgattggttgggccatgctcaggcttgaccaacaagaccggccgtgcgctgttatcagggctggtgtgcgaatttttaatgatggaagagttccgaagacgggggaggctctggcagtacaacgacgcttggcgcggcagcaacgccggacgcgtgatcgcagtcttaggcgcaagaacaaactgatcaatatgttggttcggtttggcttttttcctgaaaatctggcagagcggaaatcgcttgagagactgaatccgtatgaattgagagcaaaggggctggagcatcaactcaagccggaagaatttgccagagctttgtttcacctggcacagcgtcgtggatttaaatctaatcgaaaaacggacagaggcgatgctgagtccggtgttatgaaatcagcgattgtagaaaccaaacaagaaattgaaaccctgggttgtcgcacaatcggcgagtacctttacaagcgattgcaggccgggttaggaacaagggcgcgtcttcgagataagcccaaggtgaaaggaggtgcgacgaagtcatacgacctgtatctggaaagaagccaggtagagacggaatttgatgcactttgggatgttcagagtcgttttgctccagagctttttacgcaggaaaaacgtgaggccttaagggataccattttccatcaacgagatctgcgccctgtgaagccggggcgctgtactttgttccctgaggaagagcgagcacctctggctttaccctctcagcaaagattccggatttgccaggaggtaaataatctgcgcaaaatcgacgagcatttgtgttcgatcgaactcacccagacagaaaaagcaaagctggtacaggctttgagcggagcccgaaagaaaacattcgagcaactccgaaaggtcattggttatggaggtcaatttaatcttgaagaggcaggtgcaggtagggcggatcttaaaggaaatgaaacagctgtcgtcatcgggaagatcattgggaaggattggctgaaatattcgctatcagaacaagataagctggtactgatgctactcaatattgaatctgaatccgagcttatcggcatgcttcaagaagaattcgacttgtcggaagctgtagcgaagaaattatctggggccccattggttaacgggtacggatccctttcccgtaaggcaatagatttgatactgcccttccttgagcagggtatgacttacgataaagcggttgcggctgcagatattccttcgcacagcgatttgacatggcaggtgaagagtgatgaattgatggatcaacttccttactatggcgaagttctgcaacgtcacgttgggtttggcactggaaatcctgaagatgcgccggaggtgcgttttgggaaaattgctaatccgacggttcatatttgcttgaatcagcttcgccttattgtaaatttaattatcaagcgttacggaaatccggatggagttgtgatcgaggttgcccgagatctaaaactttctcgagaaaagaaaaacgagattgtaagaaagcaaaagaaaaatcaagaaaaaagagaacaggttagaaaagagatagcagctattcttgagtgcgatgaaactctggttacgagtgaggatattgaaaagtggttactttgggaagagcttaaccctggtaatgctttagatcgtcgttgtccctatacgggtagacaaataagcgcagtggatcttctctcaaaagccttcgagatcgaacatattctgccaagatcgcggacgcttgatgattccagggccaataaaacggtatcttattgggaggctaatcgcttgaagtcaaacctgacgccttgggaggcccgggagatttttgaggcccacgggtggaattatgaagatatattaaagcgagcagaaaatcttcctccaaataagcgttatcgttttggtgcagatggatacaaaacgtggctgagagaggactccgattttttagctcgagaactaacggatactcaatatatcagtcgtattgctagagaatatgtttctcttgtttgcccgaagaacacgtatgtgattcccggacgaatgacggcgatgctcagacattgtttggggcttaacacgattctcagtgatgatgacaaaaagaatcgaaacgatcatcgccatcatgctgtggatgcatgtgtcattggcataacagacagatcactgctgaacaagattgctgcattgagcgcaagaggtgaggaacagaacgaaaggaagtttcaaagatcggttgaagagccatggagaggcttccgtgagagcgtgtgtcgcgcagttgaacggattaatgtcagccatcgtcccgagcactcttacgaaggtcagatgcatgatcagacggcctacccaattgacaaaaatggccagggttggaaaaaggaagtcaagtccaacgggcaaactgaatggaagaaaatttctgttattccgattgtctcccaaaaggctactcaacgtcatggctacttgtcggatggtactttgagaccttataagggatattctggaaacagtaatttctgcattgaaattactgttaatgagaaaggaaaatggcaggcagagtttgtgacgacttacgatgcttaccagattgccagaaaattcggtaaagataagttatatggaaaggaaagtcaaagcgggcataaattagtcatgcgactgatgaagaaggatgtagtggcaatggaggatgtcgatgggtgcagaaggttgtatttgttgcataaatttagtacaaatggtgtgttatcttttgctccaataaacgaaagtaatgttagtgcaagagttactgaaggaagttttaagtatgtttcaaaaactgctggttcattgcaaagagcaaaagctagacaagtaatgttgagtcctcttggggatcgatcataattttaacggcataaatcaaacaagagaggtgtactatgatcggaagaattgtggaaatacaaaccgatggaagacacctctctctatttagaggttttcttagaattgaagcaaaaggggatcattggaaggaaataggaagaattccattagacgacatcgtagcggtagtctcaaatgcacatggaattacctacacaaacaacattatggttgaattggctagaagaggtattccatttgttttgacgtcagatgatcatgaacctgttggtgttttgtggtctgtttcttctaattcaacgcaatcgaaaagaattgaagctcagattcaagcatctttgcctttgaagaaaaatatctgggcagaaattgttagggcaaaaatacgttctcaagctcaaggttttgaatattttggaaagaaatcaaactatctcatccggttaatcaaagatgtaaccagtggtgatacaacgaatcgcgaggctgtagctgctaaatattatttcagagaattgtttggaaatcaatttgttcgagatcgcaaagagttaggtatcaatgcaagattgaattatggatatacaatacttagaactgcagtaacacaggcagtcttagcttctggtttgcatccaagtgtcggtttacaccataaaaatgatttcaactcatttagattggttgatgacttgattgagccgtttcgtgttctggttgacgttaaagtaaaaacgttatgtgacggttattcgccttatgtggaactggaaaatggcgtgaccgcagatgagaaggcggctttagtaggcgtgttgcatacgcaagttttgctcaaagatggaacagctactcctgcagtagtggcgatccaaagtttatctgtttcgattgctcaaaaatttatagacaaggaagccgagttgattttaccagataaatttatatatgaagaaacaataaaaggtttgttttaaagatgatttctgggtatcgtttaatgtggttgatggtgatgtttgatttgccggtacagacaaaaaaaagaccggaaattagccagtaaattccgaaatgatttgcttgatctcggatttttgcgttgtcaattcagcatctatgtcaagttttgcgtcggaacagagagaacaaaaaccatctttcgatacattaagaacctgttgccgcctaaggggcaggtaagcatcttgaccattactgacagtcagttcaagaagatccggacgtatgacagccgaaaaaatgcgctgacggcaaaacaaccgaaacagctggaactgttttagcagaagtggcaaaattttaatgcgaaagcttctaaaaatccttataaatcaacggggtagtgtgctcgtattttatatcgttaggaaacgagcttaagccagaactgctcaaaaccagcgcgttcgacgatctccattttatatcgttaggaaacgagcttaagccagaacgcaatgccggcaccggacacggtgtcggtcattttatatcgttaggaaacgagcttaagccagaacttatacaggtggatctcctgctacagttgcattttatatcgttaggaaacgagcttaagccagaactcggatgattttcttgtcgtgtgggaaccaattttatatcgttaggaaacgagcttaagccagaacataacctagacttccgaggcagagtctatcattttatatcgttaggaaacgagcttaagccagaaccacgctgtcctcctccataacttactcccaattttatatcgttaggaaacgagcttaagccagaactttttaattcctttatcaataaccgaacatattttatatcgttaggacacgagcttaagccagaacaagtcggtcgggttgcggaggtgttccatcattttatatcgttaggaaacgagcttaagccagaacttcatgtgcgaaggcgactcggtcaaggtgattttatatcgttaggaaacgagcttaagccagaacttgggcggaattttcgaaatggcgacgaaaattttatatcgttaggaaacgagcttaagccagaacaatggcaggacttgcggagcatccggctccattttatatcgttaggaaacgagcttaagccagaacaggaagcgtcgccttttgccccgtaaccggattttatatcgttaggaaacgagcttaagccagaacttggtttgagctttcattgccgcgggcaatattttatatcgttaggaaacgagcttaagccagaacgggctaacactgccatcaaaaacggcattgattttatatcgttaggaaacgagcttaagccagaacgcttctttatgtcattgcatggagataccaattttatatcgttaggaaacgagcttaagccagaacgcggggacaacatccccgttggggcacggtattttggaaatgagcttaagacagaacccccgcacctgcggagatttttccattgaattctatattgttaggaaataatccagaacatttcttgaacaagaacgcgaccttggcgtgctttatgttgttgtaagtgtcatttaatataaatatcgaaatgggtgagcaaaatggttcgaagcaatattttttatttaagtaaaaggaacgtcaattaagatggttttatcgaaaaatggtttacgatcttgagtgaacaataaaatgccacgacttgtattttgcagtgaatcacgtagaagtcaaggaggttaagtagatcaagtagattcttccttaaagaaacaagataaaacaaagttacaatgcaaaaatgacaatcaacgctgcaatatttgcactttacgaaagtgtaaaaatcgttcacaatgcgcatcaacacagacacgacgccggtctttcactcaagcaagagacggcttgcgaaagactcggacggcggatctcctgtatagagaaggtagggccggtcgggcaactgatcggccctgatttttgcggaagaccgtaagtctgttgtcgacgataagaagaaactgcacacgcttttcaggagtcacagccgtgagcatcccttacgatccgcgttcgacgcgcgcagaagagttcatcaacgacgaggaagttcttgcttctctggcctacggtgaagaaaacaagaataacgcagccttgatcgatcagctgctcgacaaagtgatgacctttaaggggctgacgcaccgcgaagcagcggtgttgctcgccaacgacgatccggaagtcaccaagcgcattttcgatgctgccatcaaggtgaaggaacatatttacggcaagcgaatcgttctttttgcgccgctgtatctttccaactactgcatcaacggctgcacctactgcccgtatcacgccaagaacaagcacatcgtgcgcaagaagctcacaatggaagaaattgagcgtgaggtgattgcgttgcaggacctcggccacaagcgtctgctactggaagctggcgaacacccgaagtacaacccgatcgaatacatccttgacgccatcaagacgatttattcgatcaagcacaagaacggcgccattcgtcgcgtcaacgttaacatcgcggcaacgactgttgaaaactacaagaagttgcatgacgctcagatcggtacctatcagctcttccaggaaacgtatcacaagccgacttacgaagagttgcatccgaagggaccgaagtcggactactgctaccacacggaagcgcatgaccgtgccatgcaggccggcattgacgacgtgggtctcggcgttctcttcggacttaatttgtatcgctacgatctcatcgcgctcctgatgcacgctgaacatttggaagccacatacggctgcggtccgcacacgatttctgtgcctcgcatctgcccggccgacgacatcgatccggcgacattctccaacgccgttcccgacgacgtgttcctcaaggttgtggccctgatccgtttgtctgttccttacaccggcatgatcatgtcgacgcgtgaaagcgcacgcattcgtaccgaagcgctcaagctcggcgtctctcagatttcggggggctcccgcacgtccgtgggcggctacacgatcaaggacatcaccaagatcgaaaacacggctcagttcgacacgagtgaccgccgcagccttgacgaagtggtgcattggcttctcgacaatcactacctgccgagcttctgcacggcgtgctatcgtgccggccgcacgggcgaccgcttcatggaatttgccaaggacggctccattgcacgctattgccaggccaacgccgtgatgacgatgaaggaatatctgtgtgattacgcaagccccgctacgaaggaagcgggcgaacgcgtgattgccaacgaaattccgaagatctgtcacgagaagatgcgcattgcctgcgaaaaacgcatcatccgcatcgaagaaggcgaacgcgatttccgcttctaaactgtcgccttccaagcaagaacgccgcccgaggaaaagttcttcaggcggcgtttgcgcgtcaagggggctgaccggattagatcaggatgccgagttcttttttgaagcgaaccacaatgggggccattttttcgggttcggccatcaaaagcggatcaacgagaacgttggcttgttctggcgtcatcagtttcagttcgatcacggcttgtttgacatcgcatcccttttctgcacaatagtgcgcgacgcgcacgtcttccggataaccgaaggtagcggcaaccacggtactcagagcaattgattcctgagcttcggtcttgcagcgggcgacattggccgtgatgccctcaacgcagtgttcaggcaaaatcggaatttcggctccaaggatctgcatgttttcaaacaggcacttgtagaaagttgcatcccagacattgaggtcaagctcgccctcgtcaacggccatggtgatggcaacgtcgtttccgcagatctgatgggcgatctgaatgaccatttcaggtactgtcggattgattttgcccggcatgatggggcttcccggagaaagtgcgggaagattgatttccatccagcccgcgcgcggaccagaactcatcaggcgcaaatccttgctgattttggacagtgttacggcacaggacttgactgcgcctgacacggcgaggaagaagtccggatttttggaaaccgtcgaagagtattcgactggcaaagatgccggaaacggcagagtcctgaactatatttcagccgacggaaagaaattcagcgtcgacggcttggtggggcgagtggagttttatgtctcgcatcagaaggacggagatggtttggtcaacagaacttataagttaaagatcgacgattccttgtttcaggcacacatggcaagtttgaaaaaaacagtgcgggtatccgaacgaaatcatcaaggctaaatcgtggcaaccattcgggtggcattggtccaaggatgcactgcagatcaagatgtatcgctatggatcggctaccgttgagtaaacctataaacactgatagtgcgtgattgcctacggttccaacataacctttcaacgtctgattgaaatctgctttcatgcggttgagcagcgcttgttgcttgctcccaagcttcatctgagtgaaagaatcttgccgccggcaagctctggtaattcttgaagacattcgagccgattttgttcccgactcttgacaaaacgtccgaaaagtcattgatgaagttaccttaaccgcattaagcttaacgatgttaagttttgtgaaacaagttggtacgaacaaaaaaatgcccgcagctttcaccgcaggcagtttgacaatcggttcggattaccgaattacttcttctcgaccttggtctcgcgcatctgcatgagcgtagcgtacgcgggctgcagatcggctttcactagcttagtcttcagatcaaagagcttgcggtagagcgtcgaattatcggcgttgggcgtgtactcggcgtccttgatgatcgttttttccagaagcggacgaacatcatcaatgtgacctgcagctttggcggcaaagacgcagtttgtgacgacggcaccgcctgcattgcggtagcgcacgaccgtggcgttgagcatatctgccttgatctgattccagagcgaatcgcggctgccgccttcggtaacggtgatgcggttaaggtcaacgccagcggcacggtacgtgtccgtgattaccatgtagtcgtacccaatagcttcaagtacggctcgccattgcacaaactgatcgtcatcgagcgtcatattgaggaacatgccgcttgcgcccttgaattcaccggtaccgccggtgagataggggagaaacacgacgccgttgctgcccgcgggcacttcttcggctttctccgacaggatgcggtagtagcttgaatcgtcagctttctggcagatgttgtctttgaaccagcgaagtgacaagccgcctgtacggatgaatccccaatagaaataagtgttttcaagcgtaccgctgttaaagatcagaccagagcccttcttggagagttctggaacaatgcctttggtggatacgcagaacatggcgcaggtgcctgccacgtcaacgccctggccggcttcgaatacgcccgatcccaacatcgactgcatggtgtcgccggcgcctgcgcagacaggggtacctgcaacaagaccggtgcgggcggccatttcttcacttacgccgcccacgatgtcccagggcttgagaatgcggggcatatactttttgtcgatgcccaggatgtcgagctgctcgtcggaccattcctttttctcgaccttgtagcccaagccccagccggacatggcaccccagtcgatgaaggcgtctttgcctttgagtccggcgaggttcatgaggatatagggagcgttgtgcacgaacttcacgcccttttggcggaagtcttcgctgttggcgaggaaccaacgggcaaacattgccgggaacatgcaattggcttccggattgcccgtttcgcgtccccagatgtcaaggtttttagcgttgatcgcgtcgacatcggcttgcgtgcggctgtcaaggtagttgatgtagggcgtcacggctttgccgttttcgtccacgccgcagatgccgcagatgatgccgtcgcccatgacggcggcgatgtcagacggactgtagcccttgcccttgatggcgtcgacggtctttctcatgcactcgacggtgatgttgagaaactcgtcgatgttcatctgcacccagcccggctgcgggtagtgcagagtggtgggaagcgaatgggaggcgaccgggttgaagttttcgtcgtagacggcaaccttaaccgactgcgtgccggcatcaaatcccatgtaaagctttgccatattcaatcatcctgtgaatcgttagccggaaatttttcgaggatgcattttacgcaggtttgctaggtgtttcttcttagatgatcggctcaaaaatgtttctgaacgtacgacgtccggaacacttccactgctgtcatatttagtaggcgttgcaggctgcaaaaaagtcgtgttttttcaggtctctctttggtataatccggcgcttacgggcatttttgggcccttttgtaccgaatttttaaccgactagctgcgctttgtgcccggtgatttgccgcggtttcgggcgctttgagaaagaaaaaacaatgaccgaaaatcaagaagctgtgaaggctgaagaaaccgttcaggaagaaaaggctgttgctgctacccaggaagctgccgccgaacagaaggaagaagccgtcaacccgaatctgcgcactctcgaagtaacgatcgacggcaaagaattccaggacggcgtgaccaaggaactgcgtcgcctttccaagaaggccaagatgccgggcttccgtccgggccatgtgccgtttgccatggttgaagccatgtacggtcagcaggcttctgccgaagtcatcaataagctgctcgaacgcgaagctaacaaggcaatgcgcgaaggccaatatcgtgtggttggtcagttcgacgccaagccgctcgccccggccgaaggcagctccgatctgcgctttgaagtgagcttcgaggtttatcccgatatcgttctgccggacttctcttccgttgaactcaagcgctacctctgcacggttgacgacgaagccgtcaacaagacgatcgacacgatcgtcaagcagcgcgtcaccttcacgaaggaagagggccgccaggccgccgctgaagaccgtctgacggtcaacttcaccggcacgatcaacggcgaagaattccagggcggcaaggccgaaggtttcagcttcgtgctgggccagggccgtatgcttcccgagtttgaagacgccgctaccggaatggctgccggcgaaaagaagacctttaagctcaccttcccggaaaactacggcaacaaggaacttgccggcaaggaagctcagtttgacctcgaatgcgtgagcgttgaagctccgcactatcccgaagtcaacgatgatttcgctaagaccctggcagtcgaatcggttgaagttctcaagaccgaaatccgcagcaacatcgaacgcgaagtgcaggaacgtctctatgaccgcaatcgcaccgaagctttcaatgctgccgttgaagttttcgactatcaggctcccgccgccatcgttcactccgaacaggaacgtttgcgcgacaacttccagcagatgctctacggcatgaccggtcagaagaacaaggaaggcgctccgctggatctcttccttgaacccgccaagaagcaggctcgcatcggcatgatggtcaccgcgatcatcgatcagaacaagcttgaagcgacggacgacgacatcaaggcccgtgcttctttgcttgccgccgcttacgaacagcctgaagaagtggtcgaagacctcatcaagacgcagcgcaacaaccttgccagccgcgttcttgaagaaaaggccctcgaattcctcttcagcaaggccaagaccaccgaagaaacgctcaccttcgagcagctctccggcatgggtcgcgaataattcggttcttagcgaactgatctgcgccgacaggctcggacaagtgtggcgaaaaagccgcgctttgggtctgtcaggcgaacgaaagcgggaaaaagcaacgggaggcgcaagcttccatgggcttttttccgtttttgtttctatgtccgcacttctttcggtgcgcagaaagcgaaacgatttttgtgtacggctctgtcctcaggcagaaccccaatgagcgaaatttctaacatcatgcatgacattcataacgcattgattccgatggtgattgaacagagcggccgcggcgagcgcagcttcgatatttattcgcgtctgttgcgcgaccgcatcgtgttcctgtcgggcgaagtcaacgacgaatcggccaatctcgtgattgcccagctgttgttccttgaaagtgaaaatcccgacaaggatatttcgctctacattaatagcccgggtggatccgtctatgccggcttggggatctacgacacgatgcagttcatcaagcccgatgtgcagaccatctgtgtgggcatggccgcttccatgggagcgtttctgttggctgccggtgccaaggggaagcgttattcgcttcccaattcccgcattatgattcatcagccttcgggcggtagccgcggcatggccagcgacatccagattcaggctcgcgagattcaggacttgaagggacttttgaacggcattctttccgaacgcaccggcaagtctctcgatatcgttacgcgcgacaccgaccgcgactactacatgagtccgaccgaagccctcgaatacggcatcattgatcgcatttatacccgccgcggcgagtaaccccgac

SEQ ID NO: 439 - DNA, 15652 bp, synthetic construct
  misc_feature 1..15652: note = Synthetic
  source 1..15652: mol_type = other DNA
taccggcatccaactcggatcgacacgcagaaataacggacttttgcctttgcttagaagttctgtttttgcgcgggcgtaaaaccgtgcatcgacacccgtaaaaagatgggtaagccggcagaaaataggttgctctccgccctgagaattgaagattttgcaggaaaacacaaacttttccggcttcatgacgaaattgggccgagaatatttgcaaaattcctcataggaaataggacggccaagaggaagatcgtcaatgtgctgcctcaggtattcctgacagtccgggttgtacatcgctgttttgtggtcaagcttcgggcatttcatattcatttgaagaaccgcagggaacgaaatcagttgtcgttcgcgtaaatcacttcgcccggcgtgccttcgggcggcttgtattctgtgcacagaacccagacgagaggacagggcacttcactttcttcgggataagccgtatagccgtcggtaaaagtaatgcacacatccggctcaatttgcttcttttcgatccaggccatgatggccggcatatgggtgccgccgcaccagaggtttttgcggggcttgatgtcttcgcccttttcaaattcatcgacggcttcgaccctggtcgtgcagtagacgacgtagacctttttgggatgacagagctcgaaaatggcttgacagtgaccgatgaaagcggctacttccgagtcggaaattgaaccggagacatcgatgccgagcacgacttcacccatgctcggtacgcgttcgcgtcggggaagataggcgatgttgaggcgccgtttgtccggacggcaccatgtataccgttggtcggccttgttcaaaagatagcgctcaagcaactgatgccagggcattttggattccaaggcctgatcgacgaagcggccaagcatgccgctcatcaggccgcgggcacgggcgagggatgccgcttgcccgagattgattttgcccatcgaaatctgctcgttgatctgctcttgagtcatgggcggcacgctttcgggcagatctttgatggacagcgtcccggaataggactgctcgtttttgtcgctatttttgttgttgccgccgttgttactaccgcctttgccgttaccgtcgttatctgcgctgcaagttccggatgcgagatcgagtccggccaagccgggagcagttgcttttttcggttttttgattcgtccggctagttcctcgtagatactttccgaggttcttgcttcggctcctttcattcggataccgccgtcgatgaatttgccgacgccttcggcaatgaggatttcgttgatgacggcgtcgcaggcaatgttgtaaagctcatgatcccgatggccgcgacgcaaggcgtgtgcaaagacaacgtgcatgacctcgtgcgcaacgagaaacatgagttcttcccggctgcaggtctcgacaaagtcgggattaaagagcatcagcccgtcgggcgtgactccggctgtcggcacttcttggctgacaagatagtcgtgctggtagacaaggcttccgaaaaaaggatggcggagcaacagctgaacgcaagccttgccgattttcttttttatttcctgcatgatgtgtcgagcgtgtttcgttgcaatcaaagcaaaaggccgccggcgagcagaaacttcgcaaccgtcgtgccgtataggttcctgccgtcggacgtcttggccgtcgtgaaaactgttttgtttgccgagaggtacatcttggctgccgccacggccatttcaggattcagtctttgcgtgaacttccagacagcttcgcagttggcaagcgtgagctcggaactcaactttgcaatcgtggcccactgtatgtctttgtcctcgggcacgggaacgccttcgggatcggccagaatgtttctgatgctcggaagctttttcatgacgcgcagaaagccgacgtattcggcagcggcccctttgccgacggaacctgcaacgtgctcggaaaaaacgtaggatcgtttttcgatttcttcgggaatgcgagcaaccgactcccacgagcgcggcgtcgggttacggcttcgtttgggatcgaagtcactcaaaaggttcggacggaaccgaatgaacgcctgcagcttcgtcggtataccgtgcgtttcggcccatgcaagccagtcttcgagatcttccgagaactcaagttcgcgcatgcggtttgcgagcttcgtgctcagacgattggcgcccgacttgtcttccgttcgattgccggtcgcaatgatgtagaggtcttttgaaagtcgcaattgcccggcgcagcgatcgagtatcacgcggcatagcgggttttgcatcgacatgtcggcgtccgacaattcttcgatgatcaacacgcacggtcctacaccttctcgcaacgcccagaattcttcgggaggaagccacttcgtgtagtcgccgttaaattgaggcagtccaagaatgtcgctgggctctcgcagcgacgggttgaattcgacgatgcgctcgggcggaatgtcgtgttttttagcgagtgcctgcgcaatttcgcgcgcacacgaactttttccgcccccgggtttgccggtaatgaacggcacgacttcgttggtggcttcaaattgcgccaggatggacgatttcagattcgaaaatttcatgatttttttcagggcttcggttgggtgtcgacggaatcggttttctgcgttatgcgttcgatccagtctccgaccgtttgcagaacagcgggaaccagcgacgttgcattgcctcgcaaaaatttcgtgaagtcaccgatgcagtcctcggcggttgcaagtcccagaaaactctcggagagagcatccttggcaatcaaaatgcggtcgtggcagccgtgcttgagagccagcgtcacaaagcccgctgccggatagacaacgccggaagtgccgatcgctagaaaaatgtcggctcgtttgatgacttcaggaatccagtccataccgagcggcatttcttcgaaaagaacaacatcggggcgcacggaaaagccggcggctttgcaagcgggacagatgttgccttcccgataaaaacccagacggggaaaaacggctccgcactgcgtgcagcgacttgtcaagaacgagccgtgcaggtgaaaaacgcccgcgtcgccggcgtcttcacagagcgtgtcgatgttttgcgtgatatgcacgatgtcggcggcgtgccgccaggttttgcgaaactcggcgatcgctacgtgtgccgaattgggttttgcttgggtataagcattaatgcgccggttcatcgaatcgaagacgatttgcggcgcattccgcatatgtcccgcgttgagactgtcggaacggctccaactgttgtcgggattgcggtaggtgggaattccgctttcggcggaaaggccggcacccgagagaataacgatgaccgggcgatcggctttgggcatctgcgttctgagctgcagcaggctctttgggccgtagtccatggtgtatctccaaaaatccttatctcgtttgaatgattcgataacggaattttcggaatacatgcgtcaatgattgacgtatgcgagagcgacttttgtgcgacgaaaatcgacgcattttcgacgaggatgccgcttatgaagaacagatgggagagtgttgcgcttgctgtttcgtcgggaaaagagtgacgcactcccggtttcagacggaaagttcgcgtgcgacaagtaacgacgcatgcccgattaggatgcgaaaacaaaggctgtgccttgcttttttagttctcgagaggagattttttatgaaagatattcgatcaaacgttggcgtggagcagcctgtttttccggttttttgcaagttggctatggctcgagaaaaaggcggtgtaacgacatctagcgggattgcgttggtgtgcggaaggcgaacgaagggcaatgcccccagagaggaccgttgggaagacgttctcacagtgccggtatcgacggaatttgtcgttgaccttgtaaggtggggcggactggatgcctccatgccggaagaatcccaacgtcgagccgagtttatgagtcttttggctttgcatccggatgctcgtttgcgcgcggcggcggcttgtgaaaaggggcttgccgattcttcgctcatgtcacttcttaaagattcgtcgcacgaagtgcgctgtaatttatcgcttaacttggacgctgtcgggcgcttgtcgccgcagcaggcaattgccttggccgatgaggacggacagattctggaaaacgtgatggattcgatggttgatgcgctttatcagtcttcaactgaactgttaaagtggaaaaagatttgtccgaaaaacgaacaggaacttaattttgtgaacgctttgccaaagacgattgcgtgtcttcaagagaaggttcgagtgttgcttagcgcctgttgggagcatccggatttgagtgtgcgccagcagacaagacttctggatcatcggctcaagcagctcgaagaagtttgtccccaacgagtcaagcggccgccatttgttcgaaaaagtgcttcggccttcggtctcaacctctacgggcgatcgcaggattatgtctatgcactgtcttttatgaaatccgatgaaagcaccggcgaactaattcctgaccggcagctatccatgctgatgattccgatcgacggtctggacacggtagcgaagtctcttccggtcggattggaaacggacgccgtcatgatccgcttggcacagcacccatcccgcgaggtgaggacggcagtggccggacgcgacgggttgccatcggcagcgattgattgtctaaaacacgacaaatcgttcgatgtgcgagaagcattgctcggaaacgaggccgtactgacagaacttgcggacaaagatattttgcgtttgcttgccgatgaccccggtttgcttgaaagtgcctttgcctacggatgtccgagcgagcgaatcggccgccttcttacggatcatttttccgactcgccggacccatacgtagccgagacgttggcgacgataagcgattagagaagagtagtcgaatccaataacagctcatttgtgactgattatacgagtttggtgctcaccagtgcggcgaatctgcgagcagtacgaacggcgtctgtgtcgctttctgctagatcgaccatcagctgaggcagtttcgggtggtcatggaaaatgacgccgctgcgcaacagaacgaggcctgcggcattgagagccgtacgcttattgccgtcggcaaacgcgtgtgctctggcaatgcagacggcatgcaatgttgccagagcaaacggatcatttcggttgaaatcgtcgctgtattcgagtgtgctgcggattcgcccgacaactgcctctgccttggcgagttgatcgatctgagtcgtagtcggtgatctcaaacctccaaaacgactgacgactgcatcgtgtatgacgatgatttcattgggaagaagtatcggaactgaatgggtcatagcgacttcaaggcagagttgctctcggcaaagatggacaggacggtgttgatctcgttcctgaggtggttgtgagagttgttagtcgtcgaatctgcactcttgatgtgtcgatgagagttcgatttagtacaacgctctgtttttgcaattgcatccatctgttctttatcttttctcattttcttttatctctacgtaattcggattaaaaataaattgattccgagagaaaagaataggagagagtgcgtcaattattgacgcaaatgataaggattgattttgagtgctgctgcgtcggaaattgacgcacctgctcttacgattcgaggtgttgcagaggtgtgaatgtgagagcaagacttttaaaaggaagaattatcggtatggctcgcagaacaacgatcaaaaagtccggcatggttgaacagcagaccgtcgatttatggcttctgcgtctgctttgcaatgccggcgtttgggaagacctcagcgtttgcgagatgggcaactcggactcttattcgggctacttctggtttaaggcttttcgcagccagctcaactgggctctggccattaatcgcaatgaggactttatgaaatacggtcgagttgcgagaggacgttttaaggtgggacgagggacgcttatcggtccgcaggacaaatcttttgacgacgatgaagagggcgacaacaaaacaatcgtcccggtcgacaagcgccttgcctttctgcaggatcgtctgcaggcgattgtcgaagatgccgacagcttgttcgatctcgatgatgaacgctccaaccccgatacgctgggtgagttctggcgccgtgtctcgcgtggaggtgctgtcaagcgctggctgggacttgaacgaccggaatccgttttcgaggctttaagaaagctcgaagagtctggtttcgatgaattaaccggattttccggtccttttgccgagaacatttctgaaattcgggaagcattcggcttttcggcactggatacgcggatttttgcttttttattggttgccagcgcgcgaagcagtgcgtttgctccgatcatgcgctgctttgatttttcaaagaatgccacggatctgatcatcgacatcactgctgcagcattgaaggaggaccgagagcggatcaaggaatccttgcgcttcgattcgccgttgatgcgctcgggattgttcgtcttttccgacagcgacgacgatgaactgagtaatcgcatcgattttcttgacgaatcgcgctttcacagtctgctttcgatgcgtgttccgttgcagaagcttctcgcggcagttgtgaatcctgctcctgagggagagttgtcgcttgaggattacgaccatttgcctgtggttaatcgggtgcttctgccctacatgaagaaagcacttgaggaacatcgcaagggtgccaacgttttgctgtacggaatgccgggcaccggcaagacgcagcttgcgcgtacggtatgcaaaattttgtcggctaatctttttgaagttgcaaccgaagaggaaaacaacagtcgcggatcgaaatcgcgccttcagcgttggaagactgcttcggcctttttgggaagttcggaaaatacggttcttgctatcgatgaagccgaagacgtctttaacgacggcgccaatcctttggctcttttcagtttgttcgggccgaagatcatgcggtcaaataagggacagatcaatcagctgttggaaagcaatcctttgccgaccttctggataacgaactccatcggttctatcgatcctgcaatgatccgccgcttcgatctggtgattgaagtgccgacacccgacgcaaaaggccgccgcaagattgtggatcaggcattttcgggaaaactatcggatacggctgccgagcgtctcacgcaggctgatcagttggctcctgctgtcctttgtcgtgccgctgaagtggcctcaatggtggggttcgagaagggggctgtaaccgaagaagaggtcgttggacttgtaagcgaaacactgcgtgcgcagggcttcggcactgtgccgggaactgcggccgtgcttcctgcctactacgacccgcatttcgtcaatgccgacatggatttggtggagcttgcgcatggcttgaaggaagccggcggcggacggatttgcctctacggtcctcccggcaccggcaaatcggcttatgtggcttggcttgcaaaggaactcggccgtccgctcgtgcgaaagacggttgccgaacttacgagctgctgggtcggtgaaacggaaaaactgattgcagaggcttttcgacaggctcagcgcgaaaacgccgtacttttgcttgacgaagccgactctttcctgcgcgaccgcacgctctcacgcgcgtcttgggaaacaacgcaggtaaacgaaatgctggcgcaaatggaggcctattcgggttattttgttgcaaccacgaatctcttggattcgctcgatgcggcttcgctcaggcgctttgacctaaaagctaagttcgactttttaaagcccgaacaggccgtagcattggcgcaaaaacagctagccgccgtcggtattgcgcttgacgatcagtctgcatcccggcttctcggctggcgcgcattgacgcccggcgactatgctgccgtcgctcgtcagagtcgcttccgtccgctgcagtctgctgccgactttgtggctcgtttgggagaggaaatcaaggttaaggggcagtcctcggctcagaaaatcggcttttattgacgcaacagcgagatcacggggccgtcgccttcgagcgggcgcttttcggctcgagtgatctttgcttccgttttccaggatgcaacccagccgtccaaaaggacggtgtcgtccatgacggcctgcaggcgccacttgccgtccgccgtctcaatgagctcctgtgtgcggttaaagggtgtttcctcaagaatgagcttggttttcgggctttcgaattccacgacgaagaggaccttaccgccgttgctgtagttgacgtgacgagcgttgatgtagtccttgagcgcaaagtttttcgggcgttcggcagggaagtcgagcacatttgccgtcttcatgcggtgcagagccaaatgtcggacattgtcgtagccgtcaaatttgcagatcagatacaggcgctgatcctgttggatcaaccctaacggcgaaactgtgtgctctttttccagaccttctgcgtttgtgtatttcagatcgagtttgctgtctcgataaagtgcctcgcttaccgcatcaaaaatacgaggcaggattctcggaggcatcagggcgatggagtccggtacgaaggcgaccttctgcagccacgctttctgtcgggctgtagagcccgattccttgagcgattcgcgagcaagttcaaaaaggttctgcagcggcttcatgaccggagcggggatttggtttttgaggtattcctcggccagacgcacaaggaggctttcctgaggcctgagatttttctgcgaaaggttggaatcgggcagactgcggcgatacccgtaaggttttcctttgtcgcggcactcgacgccgagctccggacatcctgcgatgctcttgagaagacgctgaatgcggcgtgtttccagaggaaagccgctttcgttcagactctgctgcaggtcctgagtggagatccaactgttgcgtggaatatgctcaagaattttgatgattagcagtgcttcgcgttcgacgcttccgactgtagccatggcgcaggcctcctgaggtttgtataggaggcgagtgtagcgcagaaggctggcttgcgacgtttgctgtcggaatattgagtttgaggtagacaacagaacttacattaaaagcttgtgagtaacctgtacagctgtgacgaaaaggcaccgcaaccgtagcgtcgacagaatttttgtctctttgccaatcggttatgttcacatgagtcggaaattgacgcatgttttggcacaatcaaaagaattgtgttttataggcgacaaagctgattgctgagaaaactttctgccttatgaagaattgaattggttgtcagaataaaacttctgatcaatttgttttctttaggatccaaaaaaggttatgctcttggcattagtttctacttttaccgggattgtgacgatgcgagaaaaatgcagacttaagacgaaaaaagaggccgcctatagcgacctctcatctgttgcatttttcagcttgttaatggaaaaagcccatttcctaacctgatttcggttcgattgtagctgttgttgacgcttccgtcaaattctcctagcttagtgagtgagagaacggataacttcacgttgaaaggaatgaagaaatgtctgaaaacaagatggtctatcgcttgggacttgatattggcagtacgtcaatcggttgggcgatgttgcggcttaatgcccagggagatccttgtgctgtcattaaagccggcgtacgtattttttcagacagtcgtaaccccaagaacgggcagtcgttggcatctgtcagacgtcaagcacgtcagcaacgtcgaacgcaggatagaacgaagcgacgcaagaatagattgattaatgatctggttcaatttggtttctttcctcaagatccgcaagcgcgccgcaaactagaaattcttaacccttatgaaatccgccgaaaggctctggatgaaaaactgactccttacgaattcggacgtgcaatttttcatttggctcaaaggcgtggttttaagtcaaaccgccgaacagaccagaagagtagcgaaaccggattgctgaaggatgcaattaagcagacaaaagctattctagaaaagaaagggtaccgaaccgttggtgagatgttcgcggatcggcaactgcgtcgcctacctgtgcgctctcgaattcgtcaggttgaggtgcaacaaaacggcaggacaaagaacaccaagcaatacgatttttatttggatcgagagctgatccagaatgaattctgcttgatttgggaaaaacagtcctctcttaacccaacactcttttccgatgataaaaaagagcggctttacgacacgatctttttccagcgcgatctgcgacctgttaagcccggacgttgcacgttgttgcccgatgaagaacgcgcgccactagcgctaccgagccaacaggaatttcggatttaccaagagctcaataatctgaaaaaacttgatgtcaatcttcgaagtatcccgctttctcttgaagaacgaaatgttttagctgaagacttaaataagtctaagaagcgcacctttgagcaaatgcgcagcaaaatcggatatgaagggcagtttaatcttgaggatgcgggaagaactgaactcaaaggtaacgaaactgcagcgatattaggttcgaaaaaattaatcggttcggagtggttcaagtacgacctcgaaaagcaggacgagattgttgacctgttgttgaccgtggagtcggagagcgatctgattaaccagttgcatcagaaatatggcttctcttgtgaattggctaccaggttgtcgcaagttactttaccttccggctatggaagtctttcccgcaaggcgttggcccaaattgttcctgtcctcaagagcgaagttattgtctacagtgatgccgtacagaaggcaggatttgaatcgcacagctcacttgatcttttgcatcaaactggtgaagtcatgtatgagctcccctactacggagaggctttgactcggcatgtcgggttcggtaccaacgatccgtcggatcctgatgaaattcgttacggcaaaattgccaatcccacagtgcacgtggggctcaatgaactccgcaaagttgtcaatgagttgatcaggacttatgggaaacccgcggaaattgtggttgaactcgcccgtgaactgaaaatgtctcgcgatcagaaacttgaggttcagcgcaagcaaaaccaaaacaaggagaaaaacgcggcagcaactcatgcggttgcggaaatcctgggatgtaacgaagccttggtcagtcgggaggatattgaaaagtggcttttgtgggaagagcttggcgacaacgctctcgacagacgttgcccgtacaccggcaagcagatcagtgctgcgagtctcttttcggaagagatagaaattgagcacattctgccgtactcgcgaacgcttgacgattccatgagcaacaagacggtgtcctatcgctttgccaatcgcatcaaaggaaatcgtacgccttgggaggctagggatatcttcgaaaagaacggcttaagttacgacgatattctggctagagcggaacacttgccaacatcgaaacgcttccgctttgccgaggatggctacgaagtctggctacgcgatttcaaggacttcacagctcgaatgcttactgatacacagtatttgtgccgcatttccaaggagtaccttgagttgatttgtccccagaagacaatggttattccggggcggctgacttcgatgttaagagcaaagtatggccttaatcgcatcttgaatgatacgaacgcaaaaaatcgtgatgatcacagacatcatgctatcgacgcctgcgtaattgctgtgacggaccgtagcctgttgcagaagattgccactagagccgcgcagaacaacgaggaaggacagcgtttgcttcaggatatacctctgccttgggcaacctaccgactttcggtgcagcgtgcaattgagcgaattgtggttagccacaagcctgatcattcgtacgaagggcagatgcatgacgctactgcgtacggtatcagaaaagacggaaacgttgtttataggaaggatggggtcagaactgttcaaaaactacaggttattccgattgcctgcgcaaaagccacctggcgtcatggtattaatgaggatggtacgcctagagcctataaaggcttcaaagggaacagcaactactgtgtagaaattgtcctgaacgataaaggagcatgggttgccgatgtcatttcgacctttgacgcttatcggatagtacgaacgaaggggaaggactttctaagagaaaagttgtctagaactggcaagcccttaattatgaggttgctcaaaggtgatgttttgcgattgaaactagatgatggctatcgaaattatattgttcagaagttcagatcagacggcatggttgagcttgctgggataaatgaagctaacgttagtgcccgcgttagagaaacagattcgaaagacacaatagattatctgagaaagacagtttctggtctccagaagttgcatgcccaacgggttacggtaagtccagcaggccaggtaagaattcaccgattggggtattagtcgtatgttggggcgtatcgtcgaagtagggaacgacaatcgacatctgtcggtttacagaggctttttgctgattcaaagcaagggcccgggaccgtggcaggagattggtcgtatcccgctcgacgatatcttggcggtgatcgtcaacgctcatggggtgtcctataccaacaacatcctggaagctttggctgatcggggagtgcctttcgttttatcttcagatcgacatgtacctgtagcttttctttggcccttagaagggcaccatttgcaggccaagcggatggagtgtcagctcaacgcctcgttaccgagaaagaaaaacgtttgggctgcaattgttcgtagcaagatcttgatgcaggcacaggtattacggatgtttggcaaacctcatggggcaatggaaaactacgcacgcgacgtacgtagcggagaccctgataatcgtgaagctcttgccgctcgattttattggtcggcattatttggcgatgactttaggcgagataggctcgcagcaggggcaaacgtttttttgaactacggatacacgatcctgcgctcagccatggctcgtggagttattgctgctggactacacccgagtgtgggcgttcaccactgcaatgatgggaatagtcagaggttggttgatgatctaatggaaccgtttcgtccactagtggatgcaaaggttgcactactcaaacctgaggtcgactctgagctcacgcctgaaggtaaaaaggctttggtatcggtgttacacgtcgatatgagatgcccaacagggcgaacgccggtgtcggttgcgatgcaacaattggcggcttccttggcgcagattttcacagaagagcgaacaaaattagacttgcctgaaggttttatttttgatgatcttcgagagaaaaactcgtgatttccggttataggcttatgtggctgatagtgatgtttgacctgcctgtcagaaccaaagaacaaaggaaaaaggccaacaacttccgtctgtatttgttggacctcggtttcttgaaatgtcaattgagcgtttacgctaaattttgcaccagccaggaaaaaagtagcacgatctttcggcgagtcagagcagcactgccggctcagggacaagtgagcattcttaaaatcacagacgctcaatttaagcgcatcacaacttttcagaatcgcatcaacatggcgctgaaaaacgtgccaaaccagcttgaattgttctgaaattatggaaaaaatcgatcgtgtttgtcttgttttctcatttaatatcaaggtattgcggttctgtctgaaattctaggttaggaaatgggctttagccagaacgcagatcatgactggcattgaagcccgcatgaaattctaggttaggaaatgggctttagccagaaccgttccagacacttgtgccggtgggcagtggaaattctaggttaggaaatgggctttagccagaactcaaaaggtcacgatttcacaaatgttaaggaaattctaggttaggaaatgggctttagccagaactggctttcttttgatgaggcaattgatgatgaaattctaggttaggaaatgggctttagccagaactgaactccaccaacattcatgccagagccagaaattctaggttaggaaatgggctttagccagaacactactattctgcttgtccgaacgcgcatagaaattctaggttaggaaatgggctttagccagaacaagccggttcacttcttcactggcacggaagaaattctaggttaggaaatgggctttagccagaacttcatggataatttgtacattcgcacgttcgaaattctaggttaggaaatgggctttagccagaacgcgtgttgtaggccttgataatctcctcaagaaattctaggttaggaaatgggctttagccagaacagaatatccatgtaagaggcgcgcttgcatgaaattctaggttaggaaatgggctttagccagaactagtttgcagcaatcgcgcacaaggtcatagaaattctaggttaggaaatgggctttagccagaactagtcggtacgacactaaacaccgctcgttgaaattctaggttaggaaatgggctttagccagaactggccgttgatgccgccccagagcgtcactgaaattctaggttaggaaatgggctttagccagaactcgctcggctatggccagccaagcgctgatgaaattctaggttaggaaatgggctttagccagaacaagtgagtgctatcagtcacaaaggcaccagaaattctaggttaggaaatgggctttagccagaactggagagcagccatcccgactgccgatgtggaaattctaggttaggaaatgggctttagccagaacattaccagtccaatccttcggtcttgagccgaaattctaggttaggaaatgggctttagccagaacaatgaccaccggtttgccttcaaagctcgcgaaattctaggttaggaaatgggctttagccagaactgtggctccatgtgttagcgcaacgctattctgacactccataagtgaggattctgacatcgtcag

SEQ ID NO: 440 - DNA, 10237 bp, synthetic construct
  misc_feature 1..10237: note = Synthetic
  source 1..10237: mol_type = other DNA
gaactggctttcgacgcgcagggaaacctgacctcgcgcatgtgaagccggggcgctgtactttgttccctgaggaagagcgagcacctctggctttaccctctcagcaaagattccggatctgccaggaggtaaataatctgcgcaaaatcgacgagcatttgtgttcgatcgaactcacccagacagaaaaagcaaagctggtacaggctttgagctgagcccgaaagaaaacattcgagcaactccgaaaggtcattggttatgaaggtcaatttaatcttgaagaggcaggtgcaggtagggcggatcttaaaggaaatgaaacagctgtcgtcatcgggaagatcattgggaaggattggctgaaatattcgctatcagaacaagataagctggtactgatgctactcaatattgaatctgaatccgagcttatcggcacgcttcaagaagaattcgacttgtcggaagctgtagcgaagaaattatctggggccccattggttaacgggtacggatccctttcccgtaaggcaatagatttgatactgcccttccttgagcagggtatgacttacgataaagcggttgcggctgcagatattccttcgcacagcgatttgacatggcaggtgaagagtgacgaattgatggatcaacttccttactatggcgaagttctgcaacgtcacgttgggtttggcactggaaatcctgaagatgcgccggaggtgcggtttggaaaaattgctaatccgacggttcatatttgcttgaatcagcttcgccttattgtaaatttaattatcaagcgttacggaaatccggatggagttgtgatcgaggttgcccgagatctaaaactttctcgagaaaagaaaaacgagattgtaagaaagcaaaagaaaaatcaagaaaaaagagaacaggttagaaaagagatagcagctattcttgagtgcgatgagactttggttacgagtgaggatattgaaaagtggttgctttgggaagagcttaaccctggaaatgctttagatcgtcgttgtccctatacgggtagacaaataagcgcagtggatcttctctcaaaagccttcgagatcgaacatattctgccaagatcgcggacgcttgatgattccagggccaataaaacggtatcttattgggaggctaatcgcttgaagtcaaacctgacgccttgggaggctcgggagatttttgaggcccatgggtggaattatgaagatatattaaagcgagcagaaaatcttcctccaaataagcgttatcgttttggtgcggatggatacaaaacgtggctgagagaggactccgattttttagctcgagaactaacggatactcaatatatcagtcgtattgctagagaatatgtttctcttgtttgcccgaagaacacgtatgtgattcccggacgaatgacggcgatgctcagacattgtttggggcttaacacgattctcagtgatgatgacaaaaagaatcgaaacgatcatcgccatcatgctgtggatgcatgtgtcattggcataacagacagatcactgctgaacaagattgctgcattgagcgcaagaggtgaggaacagaacgataggaagtttcaaagatcggttgaagagccatggagaggcttccgtgagagcgtgtgtcgcgcagttgaacggattaatgtcagccatcgtcccgagcactcttacgaaggtcagatgcatgatcagacggcctacccgattgacaaaaatggccagggttggaaaaaggaagtcaagtccaacgggcaaactgaatggaagaaaatttctgttattccgatggtctcccaaaaggctgctcaacgtcatggctacttgtcggatggtactttgagaccttataagggatattctggaaacagtaatttctgcattgaaattactgttaatgagaaaggaaaatggcaggcagagtttgtgacgacttacgatgcttaccagattgccagaaaattcggcaaagataagttatatggaaaggaaagtcaaagcgggcataagttagtcatgcgactgatgaagaaggatgtagtggcaatggaggatgtcgatgggtgcagaaggttgtatttgttgcataaatttagtacaaatggcgtgttatcttttgctccaataaacgaaagtaatgttagtgcaagagttactgaaggaagttttaagtatgtttcaaaaactgctggttcattgcaaagagcaaaagctagacaagtaatgttgagtcctcttggggatcgatcataattttaacggcataaatcaaacaagagaggtgcactatgatcggaagaattgtggaaatacaaaccgatggaagacacctctctctatttagaggttttcttagaattgaagcaaaaggggatcattggaaggaaataggaagaattccattagatgacatcgtagcggtagtctcaaatgcacatggaattacctacacaaacaacattatggttgaattggctagaagaggtattccatttgttttgacgtcagatgatcatgaacctgttggtgttttgtggtctgtttcttctaattcaacgcaatcgaaaagaattgaagctcagattcaagcatctttgcctttgaagaaaaatatctgggcagaaattgttagggcaaaaatacgttctcaagctcaaggtcttgaatattttggaaagaaatcaaactatctcatccggttaatcaaagatgtaaccagtggtgatacaacgaatcgcgaggctgtagctgctaaatattatttcagagaattgtttggaaaccaatttgttcgagatcgcaaagagttaggtatcaatgcaagattgaattatggatatacaatacttagaactgcagtaacacaggcagtcttagcttctggattgcatccaagtgtcggtttacaccataaaaatgagttcaactcatttagattggttgatgacttgattgagacgtttcgtgttctggttgacgttaaagtaaaaacgttatgtgacggttattcgccttatatggaactggaaaatggcgtgaccgcagatgagaaggcggctttagtaggcgtgttgcatacgccagttttgctcaaagatggaacagctactcctgcagtagtggcgatccaaagtttatctgtttcgattgctcaaaaatttatagacaaggaagccgagttgattttaccagataaatttatatatgaagaaacaataaaaggtttgttttaaagatgatttctgggtatcgtttaatgtggttgatggtgatgtttgatttgccggtacagacaaaaaaagaccggaaattagccagtaaattccgaaatgatttgcttgacctcggatttttgcgttgtcaattcagcatctatgtcaagttttgcgtcggaacagagagaacaaaaaccatctttcgatacattaagaacctgttgccgcctaaggggcaggtaagcatcttgaccattactgacagtcagttcaagaagatccggacgtatgacagccgaaaaaatgcgctgacggcaaaacaaccgaaacaactggaactgttttagcagaagtggcaaaattttaatgcgaaagcttctaaaaatccttataaatcaacggggtagtgtgctcggattttatatcgttaggaaacgagcttaagccagaactgcaatggcggcatcgtctgagattgtggaattttatatcgttaggaaacgagcttaagccagaacagacggcatcgactcgcgccgcatcctcgaattttatatcgttaggaaacgagcttaagccagaaccttgtacttggggtcgttggccttgatgtagtcgaggttctgcgtaatggcgtcggccgtgcccgcataccaggcgccaccggtctgcgtctcgtacggcggcaggatcgacacgccgccgtcgcggctgtccagatcccacgcctcgccagagcccacgtaggcatgcaacaggtagggacggtactgcgtcagaacgcccaccgtgtcgatgcccgagttggagcagttggagagcgaaaagtcgataatgcggaacttgccaccaaagctaaccgccggcttggcgatcttttgggtgagtgcccccaatcggctaccctgtcctcctgcgaggagcatcgcgatgcattctttcttactcatcgatttctccttctgtcatcgatgttcctaaacccattagcgacggacgcggcgcaacgtcgcgcccgtcgagtaatgccgtgcggcaaagggagctcgcgcgcctttacgcgtgccagatctcgtcgcggtactcgcgaatggtgcggtcgctcgagaaccagccgctcgaggcggtgttgagcagggccttgcggttccaggtctcctggtcaccgtagctgttcgtgagcttctcccaagcgtcgacgtagctgcggaagtccgccatgaccaggtcggggtcgttgttgttcatgagctcgttgtagatgctctcgaagttgcccgaaagacccgcaaaggtgttgtccttgagctcgtccatcacgcggcccagacgctcgcgatcgctgttgagggtatcccacgcaaagtagctgttggatgcccagagctgctcgacctcgggagcagtcaggccaaagatggcctcgttctcgcggccggccaggtcggcgatctcgatgttggcgccgtcgagggtgcccaacgtaatggcgccgttcatcatgagcttcatgttggacgtgcccgaggcctccttgccggccgtggagatctgctccgagatctcggcggcggggtagatgagctgggcgttgctcacgcggaagttggggataaagcagaccttcatgacctcgttgacgcgggcatcgttgttgatgacgtcggcgacagagttaatgaggcggatagtctccttggcaaaggtgtagctcgaggcagccttgccgctaaagatgaaggtcgtcggcgtcacgtggaagttgggatcggcgatgcgacggttgtaaatgtccatcaccttcatgatattcatgagctggcgcttgtaggcgtggaagcgcttcacctgaacatcgaagacggtgttggggtcgatgaccagaccggtctcggccttgacgtaggcggccagacgctccttgttggcgcgcttggaggcaccaacggccttcaggaactcggtgtcgttctggaactctttgagcttctccagctcaaaggcgtccttgagccagccgtcgccaatggcctcggtcacgagcctggcgtaggtggggttggcttcggcaaagaagcgacggtgcgagatgccattggtcttgttgttgaacttctcgggcgtgagggcatagaagtccttgagcacgatgttcttgatgatgtcggagtggatctttgccacgccgttgacactgtggctgcagatcacagacaggttggccatgcgaatctcgccgtcccacaggatggcggtctggcgcagacgctcctgccagccctcctgcgaggtgtcgaacgactcgtgccaacgacggctgatctcgtcgatgatctggtacacgcgggggaggagcttggagaacgtgccgataggccacttctccagagcctcgggcaggatggtgtggttggtgtagctcacgacctgcgtcacgatgttccaggcgtcattccactcgagcttcttctcgtcgatgaggatacgcatgagctcggggccgcacatggcggggtgggtatcgttggtgtggatggccacaaactgcggcagcagctcccagttagcgccgtgctccttctcaaaggtgtcgagcaggctgtagatgccggccgagacaaacaggtactcctgcttcaggcgtagcagacggccgtgctcgccggcgtcattggggtagaggatggcgctgatggcctcggcctcggcgcgctcggcgtctgccagggcatagtcgccgcggttgaaggcctccagatcaaagtgctcctcgaccggctcggcagcccagacgcgcagcttgttgacggtctcgccggcatagcccacgacggggatgtcataaggaacggccaggatgtcctgcgtgtccaccgtgcgatagaacgtgcggccgttctcctcaaagccctctacatggccaccaaacttgatggtcacggccttatcctgacgacggacctcccagggatagccgtgggtgagccactcgtcggtggcctcgacctggctgccgttgacaatctcctgtttaaacaggccgtaacggtagcgcatgccgttgccgtagccggcaatgccctcggctgccatggaatccaagaagcatgcggccagacgacccaggccgccgttgcccagggccggatcgggctcctggttctcgatgacggacaggtcgaagcccatgtcgtcgagcgcctcggcgaccatgtcgcgcacaccaaagttgagcaggtagttgtcgagcaggcggccgatcaaaaactcgatcgagaagtagtaaacgcgcttcttgccctcggcggtggcgcgggcgtcactcttggtggcaacggtgcgcgccttctcggccacgagcttggccagggcgttaaagcggtcgaggtcgctggcagcctcgacgctcttgccgctaatgctcatgacggcatcgcgatagagctcagtaaactcctgcttgttgtcgaagatcttattcatacgttcctttcccccggggatgtttctcccggaacggttatgacatgtatcctacgcctcgtcggggcggttatttacagtggtaacgcctttgttacgctttcttagcaggagccttaacggcagctgccttagccttgggagcggcctttttggtggctgcctttttggccgtggtggacttggccgaagccttggcagcgggcttggtagccttcgccttagctggagccttcttagcagccgcggccttgggctttaccgaggacgagcgcttacgcgtcgccttcttgggctcctcaaccacgggcggcttgtagctgctggggccgcggcgcttaagcactacgcctgccaggccgggcaccttaatctcaatggagtccatctgcccgttccagggatagggctcgctcgagcaggtgtagggctcttcgccggcataaccgctgccgccaaactcgggacggtcagaatcgaagatgacctcccagtcgccctcgcgcggcacgcccacgcggaagctctcgtagctcgccgggtcaaagttaatcaggatcaccaggtcgtcgtcgatgtcctcgccctggcgcacaaagctcacgatggactgcttggagttgtccgcgtcgatccaggtaaagccgtcatcggtgtagccgcgctcgtacagggcgggctcggcggtgtacaggcggttgagcgccttaataaacgcctgatgatgacggtgggtctcgtactcctcggtcaggaaccactggatggactcgtagtagcgccactcaataaactgtccgatctcgttgcccataaagttgagctttgcgccagggtgcgtcatctggtagaaggctagcgtgcgcaggccggcaaactgacgccaccagtcgcccggcatgcggccgatcagcgagcacttaccgtggacgacctcatcgtggctgagcgggcaaatgaagttctcggtaaaggcgtacatgatggagaacgtgagcaggccgtggttgccggggcgccacggaaaatcggtctgcatgtagtgcagggtgtcgttcatccagcccatgtcccacttgtagtggaagcccaggccgccgtcctgcggcgggtaggtcacgagcggccacgcggtggactcctcggccatcatcatcacgtcggggtagtgtgcctccacggcgcagttgacctggcggataaacgcgctggcgtccaagtcctcctcggtaccgtacttattgaacttcttttggccgggatcgtcgatgccaaagttgaggtacagcatgctggacacgccgtccatgcgaatgccgtcaacgtggaagttctcgagccaatacagcacgttggagaccaggaaggagcggacctcgccgcgggcgaagtcaaacttgtgcgttccccagttggggtgaatctcgtgctcaaacagcatgtggccgttaaaggtggcaaggccgtgggcgtcggcgcaaaaaccgccgggtacccagtccatgatcacgccaatgcctgcctcgtggcacgcatcgataaagtgcatgagctgctgcgggttgccgtagcgcgacgtggcggcatagtagccggtcgtctgatagccccaggagccatcgaagggatgctccatgagcggcatgacctcgatatgcgtgtagcccatgtcgcgcacgtagtccacgagctctaccgacagatcgtcgtaggtgtaaaactcgccgcgctgtgcggggaagggatccatggggcctgggtagttgccgtactcgtccggctcgccctgcggcgtatcgccgtggcgcttccacgatccgatatgtacctcgtagatgttgagcggctgcgacatgtggttgtggccagcgcggcgcttgagccacgcggcatcgttccacttatagccatcgagggtccacagcacgctggcggtacccggagggcactcagccttaaaggcgtatggatcggccttgtagagcttttcgccctcgttggtttcgatgaggtacttatagagctggccctgctcggcgccaggaataaagccttcccaaatagcgctcgtatgcacgggcaccagagggttggcttcttcatcccagtcgttaaattcgccaatgacatgcacgctctttacatcgggcgcccaaacgcaaaagcgccagccgcgcgtacggttctgcgtgtcggggtgcgcgcccatcttttcccagctgcgctcccacgtgccgatgccaaatagatagacatcgtccttggtgagctccggtgcgtgcggggcggctttacgggttgcgggctttttagccgttggctttagctttgtatcgctcacgtttgatcccatcatgacgcggcagcgtgttgccttggtgactagatgcgaaaggtccaaggctgcacgaatcgaagggacggcgatagttctatgattcgttccacctcgcgtgctcggtggaactttcggcacgaaatacgataacacctgttcgttacttttatggagaaaagtggatttgcggcggtgtttaatcggcgagcgccatgtttagaccactagcagaattgcgatggtaaaactcttgacagttttaccaattagggtttcaagattgttagtctgacgtttggtaaaacgtttttaacaggatgtttaccatttgacatcgaaaggttcgtttatgtcccagaccgctgctcccaatgtcgcttttattttcgattgcgacggaacactggttaatagcacccccgtttgggcctatgcccagcccgagttattgcgccgccacggagttgacgtaacagtcgacgattttgcccagtttgagcatttgtcgctcgaggatgagtgccaggcataccacgacacgtggggcattggcacgaatggcgaggagctctatcgcgagttgagcgacatcttgatcgatgggtactccaaggtgccgccgcgcgaggggctcttggcatttttggagcaggcaaaggcggccggctttgccatgtgcgtcgccacgtccacgccggccgagctggtgcagtccgcgctcgctggtgccggactcgacgcatacatggagtttgttaccacgacgggcgaggcggggcgctccaagcagttccccgatgtgtacgagttggcgctgcgccgcctggaggagcgtcatgggtgcaggtttgagcgcgcctgggtgtttgaggacgccgtttttggcctaaagagctctggggtcgctggctttaagcgcgtgggcatctatgacccgcacggtcgcatgaagcgcgacgaagtgcgtggcaactgcgatatctttatcgacagctacgaggagctggatctggcccgcgtgctttcgtttgagggctaggcgagggccgtggcttgcaaagtattagtggtctgcggctcgcccgtgcctcttcaatacccaagtgtctgaaggtgacggtttcggactccagtccccggttact

SEQ ID NO: 441 - DNA, 15036 bp, synthetic construct
  source 1..15036: mol_type = other DNA
  misc_feature 1..15036: note = Synthetic
aaatcacaaaaacaatgacaattggaaaagtgctttctatcgacgaaaaccttgcaacaattttaatgggatttggacttcactgttttggttgtccaatgagccaagcagaaacccttgaagaggctgccgaagttcatggtgttgatgttgatttgatggttgaaaaactcaacgaagcactcaaataaaaaaataaaatccagttttcgctggatttttttatgcacctttttaagtttgcgccaaatgttttgtttacgacacaacaagtcaaaaattgataatgttttgaaaataaaaagtgtaaagcaaatgtataacatgattttttgcgagggaacggataagcgtcgctttgattattttttgcgaaagaataagtgatgtaatgattttattgattaaaacatctgcactaaatattgattttatggaaaatgccactataatatattctttaatataacataatatttgtggaaattgcaaaaaggttgacttgaacgggcaactgttttataatttaacacataaaggagaggcaatggaatttttcacgcttatcactggcgcaactggcggtcttggtggcgcgtttgcaaaacaatgtgcatcgcgcggtgacaatttggttttgacgggttcaaaccctgtgaaacttgaaaaaattgtcggcgaaatcaagtctgattttccaagcattaaagttgtttcaaaaacttgcgatttgtcaagtgaaagccaaagaaaagagtttttcgaatttcttgaaaaagaaaatgtaaaaatcaattttcttgtgaataatgcgggttatattgccgaaggcgactttctttcattttcagacgaagaggttttgaaaatcattcgtgtgaactgcgaaggaactgttgattttactcaaaaggtgataaaggctcgtgatgaccgaatgccactgtccatcattacagtttcaagcatggctggcgactatccaatgccacacatgtcaatgtattcggcaacaaaggcaatgcttacaaatttaatggtggcgctttcagaagaatttaaagggcaaaatgtgtttttcacaacagtttgtccatctgggattccaacaacaaccgcaatgaaagatgcaatcaaagcacagggctttggcggaaaagttactgcttgcagtcctgaaaaagttgcagaaattgcgcttaaagcatcaaaaaagcacaaagtgcttatccgtccaaaatgcataaacgcatttttggcaataatgagccgtccgctttcagaaaagtgcaaggcaaaaattgtcggcaagcgttggaagaaatctcaggcaaaacgaaatttcgacaaagaaggaaaataaaatgagaaaaaagagaaatgtaacaatttgcgtatcttggccatatgcaaacaataatcttcatttgggctatattgcaagttcactttcaggtgacattcttgcaagatatcacagaatggttggtgatgatgtcttaatggtttcgggaaccgactgtcacggaacaaagcctgaaatcaaagcaaagcaagagggcgtaaccccaaaagatattgtagaccgctatgacgcaaatttcagaaaagcgttgaaagttttcaacttttcatatgatatttttgcaaaaacctatgacgatttccacaaagaaaaatgcatggaaatgttcaaacgcctttatgacaatggctatctttatgaaaaggttgtaaagcgtccttattgtgaacactgcggaaaatttgtgaacgacacagaaattgaaattacatgtccagtttgcggaaagcgcacaaaagcagacaactgcgactgtggatatgttccagtagaggcagaccttgaaggtgcaacttgccttatttgcaaaaacaaaaccgttcaaaaagatgacaaggttcttgtttttaaacttactgcattcaaagattttcttgaaaatttggttgaaacaaataagaacacttggcgacttaatgccatcaacgaaacaaagaaatatcttgatgaccttcgcgaccgtgacttttcgcgtgaacttaattggggtgttaaaattccaattgaaggatatgaaggaaaagttgtttgggtttggtgggaagcccttcttggctatgtaaccgacacaatgcaacttgcagaggaacgcggatttgattggcgaaagttctggaaaaaagatgttgaaccagacaccgagaaacttatttatatgtgtcacgcaaaagacaacattgttttccattcaatgttccttcctgcaatgctcgaaggcttaaaagacaattttgtgacacaaaacatcatggtttccgctgaatatttaatgtgtaacaacgcaaaaatcagcaaaagttctggaacatgcttcgaggctttggtttggggtgaaacctataatccagattcacttcgtttccattttgcagaaaatggcccagaaaagaaagatgcaaacttcacatttgaactttatcaaacaacacacaacagcgaggttgtgaataagtttggaaaccttatcaaccgtacattaaagttcaaaggtcttgaaactttgcctgttggtgaaattgcaccagaaatcaagcaaaaagttcttgaaacctatgacgaagttgcgaaatatattgaaacaatagagtttaaaaaggcagcagaaactgcaatgaaccttgtgtcagaagcaaaccgtttctatgacgagcaaaaaccttgggttcaagcaaaagaagatcaaaaagcattcaacaacacaatttattcttgtgcatatgtaattgcaaacctttcaaacattttcgaaccattcatgccaaatgccgctgcatctattcgtgaatttttgaatcttgacaaaacaccttcttggaaagaaattattccagaaagcgtttctcttgaaaaagttgttccacttttttcaagaatctaataaaaatttaatattcaaataaaataataaaaaatgtcagttgcaattttaagaaaaacaaaaaagccaattgacatttttttgttattattatataataaatttataggagatgagcatcatgaaaatggattcaagtttcgcaaaaagcataatcgaacttaaacttgcatcagaccgcattgcagaaggcaagggcaaaggcgccggagttttcacagtgcgctatcaaattttatatttgattgcttcaaaagataaaatatctccacaagaacttatctatgaacttaaaatggcaaaaagcaaccttgctcttatcacaaaaaagatgattaaagatggcgtgatttcaagtttcaaagaagatggaaatcgcaaacaaatttattatagcatcacagaccaaggcaaaaaagaacttcaaaccaaaatggatgcaatcaacaacatgcaaacaaaagaaagcaaagaaatgcttatgcatctgatgaaaactgttgaaagtttgaaaaatgtgaaataaaaaataaatccaccaaatttggtggatttttattttgcgttttatcaaatataataaacattgattggaaattattgcgtttttttagagtatgtttattgataaataatctctttaataattttagttttcattataaaacgcgaaattatgagtgaatgcgctggcacataaacaacgcatataattttatgtttttacgccttattttgcacttttacagcgaaggtcttcgccttgaatttgaataagcatgctttcgcgtttgttcacaagacggctaaaaattcgctcgttatatcggtctaaaatttcgcttgaaccaagattggttgtcacaactgtaagatgtccaagtcttgacctttcgcttaaaacaacatagagatattcaagtgtaacatttttcaaaactggttcggttccgaggtcgtcaataatcaaaacatctgggtcgattagtgcgtcgagataagattgtttgttttggtcaaagcaggtgtgataggaaagcataagtttgttcattccaaaagcagaaacaaacgaaacaataaaacctttgtcaataagtttcgatgcaaggcattcggtcatgaaagtttttccaacaccagtttttccagaaacgacaataaaggtctgatttatcaaaggatatttatctgcaactttttcgaaaatgtctttcactttcaaaagttgagatttttgtttttcgtcggttgcaagatcgggtttaaattctttgaaagagcagagttttttgttttcaactccacaatctttcaaaatcttttcacgaactttgttttgcaaacatttgcaaaatgtgccgttcacatagccagtgtcttggcatttcatgcatgaatatttcgcagaaagcgagtctggtgaaatgttgtttttaagcaaaatgtgctctttcttttctttgataagttgaaggtttttgttttgctctgttgcgcttttgttttctgcgcgaagttttccaatttcgaaagtaagggcgcgttcttctttgtcaagttgattgaactctggaatttcgcgtgctttcataagaaacgaaactgccttgttttgcgcatttattcttgatgcagaaagttctgcaaggcatgaagcgataagttgttttctgtccatattatacctctatgtcatcaagagaatcaaagagcgcgtcaagttgttcttttgaatattctctttgctcaaagtttggtttgtttttgttttcgacttttgcaaaaatgaatgaagagcaaagtttttcggcttcttcaaccgaagaaatgttcttcaaatgaatctcgctcaaaattcggttcatatatctcattgggcttgcggttccttttgctttttcagcaacaagcataataatgtcgaaggaaaggttccagtcggtgctccaagtgttataaaggtcacggtcggcagagttcactttgcgaaggcttccaattgtttcaagaatctttttaattgcgtcatcttttgcaacaacgtcgccaagatattgtgaaattgcatcagaggaaacaagcccttttttgaaaaatttcaacactgcttcgttcataagcgaaaggcttcgaatatcttgtttatagcaataaacggcaagaagtgaaattgtgtttttgtcaaatcctttttgaacccaatctttaatgtaaacctcaactgtgctgtcaaggttttgataataaagcccaagcgtagaagtaactttctttgcaatgtcataaagttcttctttttcttttgaatagttttcaatgtcctcaatggtgaacaatttttgctcataatattttgaaagggtttcgtcaagcttgctcattcctccttttttgtttaaagaagaggcaacaagcaaaaccacattttttgtaaaaccaaaattgtttgtccatttcaaataaagatttctttcgtcaaggtctgcatcacgcgaaagccccaaagccttcaaaacgtctttaacatcgccacttgctttttcttgttccaaaaacttttcttcaagagcagtgacacttttgattccttcattttcaaaactttttgcaaccgccaaaatatatggatagttgatagatgtgcttttaatttttgtgcaatatttaatgatcattatcacagcatctggttcgaagtggtgaagttcaataaggttataatattcgttatattcaagaggggtgatcattcttccgcttaaaattgattgtacttggtcgttgaaatctttatattttgcttttgagcgcattttagaattgcccgaaaacttttttgcagaaagaaatttcacttcaagtggggttttatttaaaatttgaacaagtccaagttcttgccaatatgaaaaatattcaaaaatttggtcagcagaaagggacaacactgtgctcatggcagaaatgtcgttgtcgtcactttgtggatttgagcaaagataaagtccataaagataaactttaacagcgccgtctggtgcgcctggcaaaaactcattgataaactcattatcaataattgtgcttgaactgtttcgaagtgttgttgaaaaactgcaaagacccatttttgtccacctttatattatatataatataataacacctaaaataaaaaatttcaacacttttaaaacacaaaaagttttttggcaattttgcatgttttttgaaactttttgccactttaaaaagtattgaaattgatgtctaaaaaatttgataaaataataaaattgtttatttttgaaattttatttgtaaaaaatgcatcaaaaatgttcttttttatacatttgctttttaattttaaaaatttcaaaaatcaataatgtttctgtcaaagtctggaatcatttctgttgtggcactgcaaatgtcttgaacaagtgcgttgtcaagtccaagtttcagagcgtgggcaacaactgctttatattcaagattggtcagttgtcggtttatttctggatatttttcgcattcaccatatggtgtgaactgactcatgattgaaacaagagcgtcttttccaagaatgtcacaaactgtgtccaaaaccttgaaactgtcttttgcacatgtcggcaaaacaaggtggcgaacaacaatgcctttttcaagtttgccaccagcaaaaatgttttcaggaatttgtcttttcatttcttttaaacatgcaattgcattttctttataatttggtgctttgctatatttttcagcaagactgttgtcataatatttaaagtcgacaagaaaaatatcaacaagtccttcaagtttagcaatggtttctgggctttcataaccgccactgttccaaacaacaggaacttttggtttatagattttcaaagcgtcaataatatgtaaagaatagtgcgttggggtgacaaggtcaatgtttccggcacctttttcttcaagcattttaaaaatgtttgcaagttcttttggtgaaacttgttttccagaaatttcgtgactgattttataattttggcaataaacacagcgaaggttgcatccagcaaagaaaattgcgcctgaacctttgtcatttttgcatgtcaaaaaaggctcttcgccttggtgaagcatgatttttgaaatggtcattttgtttggcgccaaacaaaaaccatgaccattgtcacggcttgcattgcattttcttgggcatatgttgcatttttccatgcagatagtatgaaatatgaaaaacaaaatgtcaagaacaatttgatttgatatcaattttagtgtaaaatagagtcatggaaataaaaacaaaagcagactatgatgcatttttgcgaacacttgaagaactttgttcgggcgaagatttcataaagtttcaaacaaaaatagtaaacactaaaaaacaaataattggcgttaaaagtccacaaatcagacaacttgcaaaagatattttcaaaagcaatcatgttgggcttttcaaatatggaaacaataacgtttttgaagaagttcttgtgaaaggccttgtaattggaatgacaaaagaagttgattttgcgcttgaccaactaaacaggcttgttttgtgttttgacacttgggcagaaactgatatgatttgtgcaaactttgcattttttaaaggaaatgaggaaaggttgtttgaatatttttctgaacttttgaaaagtgaaaaagagtttgtttgcaggttcggtgttgtctgtttgatgaaatattttcttaatgaaaacaatattgaacgcacttttaaagcgcttgatagcgtaaattgcgataaatattatgtaaacatggcaatttcgtggctggtttgcgaagctcttgcaaaagatccgcaaaatgcagtaaaaaatatgcaaaaaattataaaaaatcatcattttaattcatttataataaataaatccattcaaaaatgctgtgatagttatcgttttagtgcagaaataaaaaataatcttaaagagttgaaaataaaatgttagaaaaaaatcaagaactagaagttgaaatttgcgcatatgcaagtgaaggacagggcattgctcgtgttgatggctttgttgtgtttgtcccatttgcaattgtcggtgaaaaagtaaaaattcacattatcaaagttacaaaatcctttgcagttggaaaaattttggaagttgttgaaccttcaaaagaaagagttaagccaaagtgcaaacacttttataaatgtgggggatgttcgcttcaacacatgtcatatgcttgtcaactagaatttaaaaagcaaattgttcaagatgcattgcaaaaacttggcggatttgaaaatgtgaatgttgaagatgttgtttcttctgataaaatgtttaaatatcgaaacaaatctgcgtttccactttgcgttgacgaaaacggaaaacttcgtgtttgcatgtataaaggaatgagccacaatgcaatctatattgatgaatgtccaattacgaatgatacaaacatgaaaattgcttttgagtttcaaaagattgcaaatgagtttttcaatagtttgaaaaaagatttcgttcaccttgtaattcgaacaattgagaacaaaagtcttgttaccgttgtaacgagaaagcatataaaaaacgcaaaagtaatgtttgaagcgttgaaaaatcaactttctttgtcagaaaacgactttggattgtttgagtgcataaaaaagactgacaacaacgtgattcttgatggtgaaatttcgcatctgtttgggcttgaaagcattgattttgatattctcggaatcaaagccagcgtttcgccaatgagtttctttcaggttaaccttgacattatgaaaaaaatatataagcaggtaaaccaacttgtttcgggagaaattgttgttgatgcatacagtggtgcagggcttatgtctgcaattcttgcaaaaagtgcaaaaatggtatatggcattgaaattgtgaaagaggcaacggttgatgcaaaccgtcttgcgaaactgaatggaatcaaaaatcttgtgaacatcaatggagacacaagcgctgtgcttccaaaccttcaaaaagaaattggaaaatatgctcttgttttggatcctccaagaaagggtatagacgaaagtgttgcaaaaacaatttgcgaaaataaaccaacttcaattgtatatgtgtcttgcaatcctgcaactcttgcaagagacttgaaaatgatttgttctggtggctatgaaatttgcaatgttcagccatatgacatgtttccacaaactacacatatcgaaaccgttgtaagtttgaaaagagtttaatacgatattttgcctaaaatttattaaatatgcgtcaattcttacattataaaacataattttgcactttttacataaaaaaaatatttataaatttgattttgaaaaataaaatcaatatgatataataagttcaggagaaaaataatatgaaagttttaacaatttgcgggagcatgaaatttgaaaatcaaatgcacgagatttcaagcaaacttgaagccgaacaaggcatttgtgttttaagcccaatcaaatatgaaaagaaacataaagatgacatcaccgaacttgaaaacatttttgcgtgccacatgaaaaagattgaactttcagatggtatctatgttttgaatattgatggctatgttggagaatcaacaaaaagccaaatttcctatgctaaaaaacttagaaaagaaatcatctatcatgttccacttgaaggcaaaaccaaagtgagcaaaaaaatcaaaaaagtgaaataaacaaaaagacagttttcctgtcttttttttatgcataaaaaatatcaattgatataatcacataagttgaacgattttgtaaaatttttaaaattatcaaaattggttggtgaaaataaaacaagtgtgatatgatatattaaacaaaagagaaggagaacaccatgcaatatagaattggtcttgacattggaattggaagcgtcggctatgcggttttggaaaatgacccggtaaccgaagagccagtaagaattgtgaaacttggggttagaacttttaacccaaatgaagttccaaaaacaggtgaaagcgttgcaaagaaccgaagagaaaaaagaggaatcagaagaagacaaagaagaaaacatttcagaatgaaaagggtgaaatctttaatttcacgttttcttggcgttgattttgaaaaagcaaatcaaaacttgctgaacgaagatgtatattttcttcgtgcaaaggctcttgatgagaaaatttcaaacgaggaactttcaaaagttattcttcacattttgaaacgtcgtggatttagaagcaatcgcattcattctactgacaaagaagaaggaaaacttaaaactgcaatttcagaaaatgaagaaagaatgaacaagggcggatatcgcacaatcggtgaaatgctttataaagatgaggcatataaagttgagtgttgtggaaaacttgtttataatgttcgaaatcatggtggagattatcgaaattgtttttcacgcgcaacgcttgcaaatgaacttcaaatcatccttgaaaaacaaaaagaacttggaaacgaaaaaataacagatgagtttattgaaaaagttgtttatatttttgaaaagcaaagaaattttgatgagggtccaggcgcgcaaagtccatatcattttgatgaatatgaggttggaaattgcacatttattccaacagaaaaacgtgcaccaaaagcaagttacacatttgaacttttcaatgctttgtcaaaaataaacaatctcaaaattggtgcagaatttttgacacaagagcaaagaaaagaactttatgatgtggtgcaaacaaagccagaactaaaatttaaacaaataagaaaaatgtttagtgttccaaatgacaaactttttaacctttgcaactataaacgaagcaaaaaagaacaagacatttcagatgatgaacttattgagaaatgcgaaaacaaagtttttgtttcaatgaaaagaagttatgacattcgaaaagcgcttggagatgttgaaaattttgatgctgattttgttgacgcaattgcccttatgtgctcaatgtgtaaaagtgatgaaaaggttgacaaatatattgcagaaaagaatttcgctttgtctgccgaccaaattgataagattaaagccctttcaggaattgaaaaatttggctcactttcaatcaaagcaatgaaaaagattattccttttttatatgatggggaaagatatgatattgcttgcaaacatgcgggatttgatgacgcaagttttgagcacgaaaaaacaaaatatcttaaaggaaaatgtgttgaagaagccctttcagatgtaacaaacaatgttgtaaaaagagcggtgaatcaatcgcttcgtgttttgaataagattatcgaaatttatggttcgcctcaatttgtaaatattgaacttgcaagagacattgcaaaaaattcacaagatagaagaacaattgaacaaaaccaaatgggcaatgctgaaaataatcaacgcatatatgacacaatcaaaagtgaatttggtgttaaaagcccaagtggccaagacattttgaaatatagattatatcaagagcaaaacagcaaatgtatgtattctggaaaagaaattgagttcgcaagattgtttgaaccaaactatgtgcaaattgaccatattttgcctatcagccgaagcatgaatgacagtttcagcaataaagttcttgtgctttcaaaagaaaaccaagacaagggaaatcgtactcctttcgaatattttggaaaggatgaaaaaagatggaatgagttcaaagcaagagtttcacttttgaaaaatgttgataaaaagcgtttccttttaaaagaaaagttcaccgaagaagaatcggcagagtttatctcgcgaaatcttaatgacacaagatacatgtcaaaattgcttttaaatatgatgcaaaaaaatcttttaatggcaccatcaaaaataaatgaaggcacaaaatctagaaagaatattaaaagcgtgagtggttcaattacaagttatctcagaaaatgttggggaatcaacaaaatccgtgaagatggcgacattcaccatgcaattgatgcaacaataattgcgtgtgctggtgattcagaagttcaaaaaattacaaagttcaacaaaagaaaagaattgtttgtttctcgtgatgacaagtttataaatgttgttactggcgaagttatgtctgcttcggagcgagaagaatatgaaaaccaaaaactcgatgtgttgaaagatcgcttgccacaaccatatgaatggttcaaaaaagagttggaaattcgcgcaaaggtttgctatacaaattttgagttttctgatgaagaaaaaatgcaacttgcaaaaatgaactattcagaagaagaaattgcgcaagcaaaaccagtattcatcagccgaatgaaaacggtgaaagaaactggcgcaatccacaaagacacaataatgagcacaagagagttcaaagaaaccggaaatcttataaaatctgtatcggttcaaaaactcaaactttgtaacattccagaggagtttgaacttgctggcgataaatatccagaatgctcaatcgagaattattatagaccaactgatgacaggctgttatatctcaaactgaaaaattatctgaaagaagatggaaaaattccagatgtggtatataagccaagaaaagatggttcaaatggccctattgttcgaaaggttaaagcctatgaaaaggcatcaagttatatcccagtttcaaggggcggagccgcaaacgatgcaatgtatcgcgttgatgtttttgaaaagaataacaaatattatttgtgtccaatttattatgccgatgtctatgctcataaattgccaaacaaagtaattgtaagagatagaccttgggaaacaattgataattcgttcaagtttaaatttagtttgtatcaaaacgatttggtgagagtggaaagcagcagtaaagatattgttttgaaaaagaaaaacaaaaatgaaaattcaaataaacccgatgaaatagaaaatagtgaatatatgctctattataattccacaggtatatcaacagcaagtatcacgcttttaactcatgacaattgctatattataaacagttgcggtgtaaaaacattgaaaaagtttgaaaaactttatgttgatattcttggaaatgtatacaatgcaccaaaagaaaaaaggaaaccgatttaatgggatatataaacattttcgtttcgaaggatgcatatttgtttgttaaaaacgaacaactttttcttaaaaataaagataaacagattgattatccacttgaagacattaacagtatcatgattgaaaatttagaaacaacaatttcaacatatgctttgtctaaatttgcgcaaaacggcatattgacatttgtttgcaacaaaaatcatttgccatgtggagttattttgccatattgcgagcattatcaaacattaagtgttcataactttcagactgcggtttcaaagcctttaaacaaacaactttggcaatcaataataaaaaacaaaatcaaaaaccaaaatgaagttttaaatatttgtggaaaatatgacaaacttttagatttttatcaaacagttacaagtggtgatggaaccaacaatgaggcaaaagccagtcttcgctattttaaagaattgtttggaaagaattttgttcgtcgagacgactcaaatgatataaacgcttttttaaactatggatattcaatagttcgaggctttgttgcaaggagtgttgttgttcatggtttaacaccatttctgggaatattccattcaaatggattcaatcagtttaatttggctgatgatttgatagaagtttttcgtcctgttgttgatttgtttgtaaaaatatatttatctgacgaaaaaacgctttcaagcgacgtgaaagcaaaaatatataaccttgtaaatgttgatgttttaatagatggccaaaaacaacccttgtcatatgcaattgatatgcttgttcagagttatgtaagaagtatcaaagaaaacaaaaatgttttgaaaaatatagatatatgtggtttagaaattcacgaatatgagtagatttatgagaattttagtgttttttgatttgcctgtcaaaagcaaaaaggaaagaagagaagcaactcaatttcgaaactttcttataaaagatgggttctatatgattcagtttagtttatatggaagaatttgcaatacgcttgaatctgcaagacttcatgaagaccgagtttctgtcaaagttcctgtgaaaggtgctgttcgttctttgattgtaactgaaaaacaatattcatccatgcgaattttgattagtgacattaaacataaagagaaaaagataaattctcaacaactttcatttttctaaaaaaataaatactataatagttttttaataatttatataaaaaattttgcaaaaaagaaaacccaaagaactagataaaatctagcctttgggctctttttttagtaacctattataccataccaaaaataaatagggaactaaaacatttattgtatagtaacaatctacaatactattataccataccaaaaataaatagggaactaaaacgtcaagtgtaataggcaatgcaacaaacatattataccataccaaaaataaatagggaactaaaaccatttcaattagtgcttcgggcttgttgaaattataccataccaaaaataaatagggaactaaaactttgttttagtttcatcgaatattctcataattataccataccaaaaataaatagggaactaaaactggtgagctcttcaagggcggtaccttcacattataccataccaaaa

SEQ ID NO: 442 - DNA, 9336 bp, synthetic construct
  misc_feature 1..9336: note = Synthetic
  source 1..9336: mol_type = other DNA
tgcaagcacaaagtccactttctctcgttccttaatataataacgatatttaaaaattaaaaggtaaattatgaaaagaaaaaagaaaagtatctttattgcagttttattgctttgtgctgtcacttgcatcgcagttttgtcttggcttttgataaaaaagaataacgaatccggtggcggacaagaagtaagccttacctttgacacaaaagatgttggcgaaattggtatatatcacgaaactgtaagtacagttccaaggaaaataccaacacaaacccaaaacgaaggcttatgtgtaagatatccggcttatggtacaaatcttgccgacataaccgatgaagaaaaggatagtattttaaaagaagactctctcttaagagtatccgcttcaacatataccgaaattgaccaagatggaaacttgcttttaaacggtgaaacaactggtagaaaattatataaacacactgcaagtgttggaatgtattatggtgatgtaagcgataatgaaaaagcagttgtagaaaaaatcacactaaaaccaaaggaatggagaaactacattacaggtctatatgcacccgctggtgaagtagtaaagatagaaatttcagaagaagacttagcaaaagctggttcgctagaagttagtgttggacaaataagtttaatcaataaaaacaacaacatttggaaagaaaaaaatttcgtaagaatgccaaaccttggcaatatatttaaaataaataaaacaactgcctacgttggcaactttttaggcggaccaatatatgtaaaagcaagcaaaatcaatattgagtatactgtcacaatatcaggtgcagttaaatatccatattacatacatggcttaacaaccaagcaagagtttgaagaaatgaaaaatctttctgctccgtattacgattttgaagtgtgggatacaagtgtacgccattccggacctaaaagttatgcaaattttgattatgacaatttagttaaagttggtgacttgtgggaaaatgtaagtagaacatcaagactagtcccagcaacatcaaatccaggtatgagtataggttttttatatgatgtttttgttgccgcaggagcagcttgtgcttttcaaggtgcaaactgggtaaatgcaccttgcaattggatgaagggggcattagactatcaagtaatgacatcttcagggttttgggggcatatacacgagtttaatcatcattttcaaaattatggcatagcgccaaatggtgaggtaaccaataatgctactagtttgttgtcttatgtattatacaccaatatatccgcagatcgtagtgagaatgataacgatctcccaagttggaatagatatacagatgctacaagagggctaagagaaactctagcaaatgcaggttcagaacaaactagtttgaatatttatgccgatatacttcacaattttggtgtagacacattcattcaagcaacaagactacaaccaacaagaacacatacagccgatgcatggtatgaaggtttgagcaaagccacaggctataatatgacctattattttgaaaacctaataggacaaactctaagcaatagtgtaaaagagttgtatgattctccggacaaaaatgtttttgtgccagttgcaatgctttatcaaactggcagaaactatttttatgaaggcgaagaaaaatttatagaaacagttaaaccttatcaaattataaaagggcaagaatatacactagattttgaaaaaaatacttatttgcctagcgatttcacttggacaatcaaaaaaataacaatgccaaaaaacggaacattaacaaaaatatccgataaaaagtatagttatatcaataacgaaaaaggtgaaagtggaacgttttatgtaacaatatcactaaataaagaaggtgttacaacccccgatgtgactttttctattaatcttaaaaccgtagacccaaaaccaacaaaaacactctatatttatgatacacgcaagtatgagcaaaccgatgaagcactaaatgcaaattttgaaggttatacaaacaaaaccatatcatatgcatcaacaacctttatgaaccatattgcgaacaaacaaataggtgtggtagaaggtaagatatatattgaaaaagatggcgaatatacaatttgtctacgcgcaggtagaggaaatcacgcactatatacatcattaacagggcaagattacaccaaagatatagcattttccggtgatagtggtggcttcgattttaaagaaaatcacataaaaaaatacaccttgaaaaaaggacaatatttgtattataaacaaataaccatttcaaacggacatagcgatgcttttaccgaactaggcataacatctaacgaagatgcacctaaaactgtaccggcaagtgtgttatataacaaagatggcgatggttatgtcccatataactttacattcaagcccatatttgcaagagaatatcttgaaataacaaacttaataacaagtacagcaactaaacaaagagtaatatcatctaattttgaaagttgggacaataacaccaaaattgaaaacatatgcgatggcaacgaaaacacatactttcataacaagcaaaatcaatttgtaagcgaagataatccctatgaattagttatggatttaggtgaagaaatatattgcaataaaatcactctaataggaagaaaaacaaatcaagcaaaccttccttgcacctttaaactatatgctggcataaaccaagacaatatgacacttataggtgactacacagatttagatttagtaaatagaacaacatcagcagagtttgatgcacaaaaaataagatattataaactagtggtaaccgacaccaaatcagatggcacagggtataggaaatatgttagcattgctcaaatcaattttggaattagtattaatggtaaaaagtataacgcaagcaaattaaactatagcaaaatagacaacagaacctttgaagaaataaaaacaccaagcacttttgggaacgtaattaaaggcgatggaaatattacatattcttttgtcggttctcgattcggtttgtttgtaaaacaaaattcaaatgcaaaaattaaagttatagttgatggacaaagcgaaacaataaatttaatagcaagtaataaacaagaactggcatttttgagtcaaaaattaaataacggaaatcataatataaaaatatctgttatagaaggcaaaatatcagtagattcttttgttatatgttgacaaaaaatttatattagtaattaagtgcaaaaaacaagacatatttgtgtatatatcaaatttaatatacacaaaaataaagtcttgtttttttgttgtagcaatcttaaaaaagttattaattctagcacatttttctattttttcgcatataagaccataagatggaatcatcttttctagaactaaggtgtaaagaagttataaatgtgaccgatggcaaaaaactcggtcgcattattgacattgtgtttgatttgccaagcggaagaataaaaggctttgttgtgccatcaaataatggttttagtttatttaaacctagccaacaattatttatcccatataatcaaatttgtaaaataggcacagacacaatcttggttgaactattttttgatacgcccaacgcaaacgcctatgtactaaatgctccgaaaccaaataaaaaataaaaattgcttttaatattaaaatctataatgacaactaaatttatgcatttttcaaaaaaacaaaaaaatatgaaaaaagttttgacaaataattgtgtttatattaatatatatatgtaacttataccataccaaagtttagtaggttactaaaataacggtaacgaaagttaccaacgatagatttattctattcggtaagtgtccgctttatagcggacttttttttatattttgttaaaaaatagcaatgaaaaaatgttttccaaaaataagaatgtaaaaattatttggaaataattctattatatgatatattcaatatatacttatgatgaagggagatattaaatgttttatagaatcggtttagatgtgggcattggaagcgttggttatgcggtgctagaaaatgactcaaagacaggagaaccaataaggattgagcgagttggagtaagaacgttcaatccaaatgaagtcgcaaaaactggtgaaagtacagcaaaggacagaagagaaaaacgaggcattagaagaagaaaaagaagaagagagttcagaatgcaaagagttaggaacttaataaagagaactttgggtgaagatgccgtaacaaatttacaaaagttaaataatgaagatatatataagttaagatataatgctttagacaatttagttaaagatgaagaagttgccaaaattattttaaacattttaaaaagaaggggatttaaaagttcaagattatctccatctaaagaagatggggttttagtaaaagcaatttcagataatgaaaataaattacggaaaaacggatatagaacagttggagaaatgattttcaaagactcatcttttaagactgaaatatgcggacatataacatataatgttagaaatcattataaagattatcgcaactcattttctagaaatcttttaaaagatgaactaaatactatattaaaaactcaacaacaattaggcaataaaaaaataacagatgagtttattgaaagagtaatatatatatttgaaaaacaaagaaattttgatgaaggtccgggagtacaaagtccatatcacaaagaatcatttgaggttggtaattgtacttttattccaagcgaaaaaagagcaccaaaggcaagttatacttttgaatactttacagcattatcaaaaattaacaatttaaagtgcgatgatgaaccattaacccaatctcaaaaagagcaattatataacgaattaaaaactaggtccgaaattacctacaaacaagtaaggtctttgtttaatgtagatgccgataaattatttaatctatgtaattatagagtaaaaaagaaagagcataaaacagaagaagaagtcaaagaacaagcagaaaaaacagtgtttgtttctatgaaaaatagttatgctatcagaaagagtttaaatattttaaacgatgaaaagacagatattgaattaatagataacattgccttaatgctttcgctatgtaaaagcaatgaaaaaattgataattttatagaagaatataaaataaacttaaatgaagaacagataaataatattaaacaattaaattttgataaatttggatcattatcttttgttgcaatgaaaaagattacaccatttttactacaaggagaaaggtatgataaagcctgcaaattagctggctttgatgatgaaagttttgagcatccaaaaacaaaatatctaaaaggtgaaagtgttacagaagctttaaaagatgtaacaaacaatgttgtaaaaagagcagttaatcaaacaatcagaatagttaatgaaattatcaaagaatatggttcgccacaatatatcagtatagaactagcaagagatattgccaaaaatcctaaagaacgtaaagacataaaaacaatgcaagataaaaatgcggcaaccaatcaagaactatatgaaaaaatacaaaaagaacataacattacaaaaccatcaggacaagatattctaaaatataagctatatatagaacaagaagcaaaatgtatgtatagcggtaaaacaatagatataaaccgactttttgaaccaaattacactcaaattgaccatatattgccaatcagtagaagtatgaacgatagctataataataaggtgttagttttgtcatacgaaaaccaaaataaagggaatagaactccttatgaattttttggtaatgatgaaaagaagtggcacgaatttgttatgcgtgtttctctcttaaaaaataccgaaaaacaaaagcttttgttaaaaaagaatttcagcgaagaggagtctaaagactttatatcaagaaacttaaatgatactagatatatctcaaaattactattaaatctatttcaaaaaaatctacaaatggcagactattctaataaagataaaaacagaaaaactgtaagaagcatcaatggcgtaattacaagttatttgcgtaaatgttggggaataaataaattgcgtgatgatggcgatattcatcatgcaatagatgctacaataattgcttgtgcaagcgattctcaagttcaaaaaattaccaaatttaataagtttaaagaaatttttaaaaacaaagatgatgtctttgtaaactgtgaaacgggcgagcaaatgactttgcaagaaaagcaagaatatgaagcacaaaatctgaatcttttggcaagaatattacctttaccatatgaaacatttttaaaggaattaaaaataagaacaaaatcttgttatgaaaatttctattttacagaagaagaaaaagatgaacttcaaaaaataggttatacacaagaacaaatatcaaaaattaagccaatttttgttagtaaaatgaaaaacgttaaaacaacgggtgctattcacgaagaaacaataatgagcgccagagaatacgaagaaacaggctatttaatcaaatctaaaaaagttcaagaaataaagcttgtagatgtaagagaaaaaattgctttaaaagatgataaatatccggattgctctattgaaagttattacagaccacaagatgatagactactatatttaagattaaaaaattatttaaaagaagaaggcaaaataccaaacattgtctataaacctcggaaagatggaacagatggtcctaaagtcaatactgtaaaagtttatgaaaaatgtcaaaacatcgtaaaaacttcaaatggtgctgcaaaaaatgatactatgtttagagttgatgtctttgaaaaagacaaacaatattacttatgcccagtttatatggctgatgtttatgcgaaaaaattaccaaacaaattaattgctataaataaaccttggataaccatagataattcgtttaaatttaagtttagcctatataaaaatgatttagtaaaaattacaagtgctaaaggtatatcattaaagaaaaatattaaaaatgacaagtccttaaaagcagatgtaataacaaacaatgaattcttgttatactataatagtacaggtatttctgttgcatcaataaaactaaatactcacgataattgctatggggtagatagttgtggtgttaaaaacctattatctattgaaaaatattatgtagatattatgggtaatatttataaagcaaataaggaagaaaggaaaccattataaatggcatttattaatatttttgttacaaaaaatgcatatgtaagtgtaaaaaataaccaactgtttttagagagtaatggcttaaaagttgattatccgttagaagatattaatagcataatgatagagaacttagaaacgacaatatctacatacactttatctcagtttgctcaaaaaggaatattgacatttatatgcgacaaagaacataccccttgtggaattgttttaccgtattgccaacattaccaaactttaaatcaatataatttacaagtgaatgcctcaaaaccacttatcaagcaaatttggcagtcaattataaaaaataaaattcataatcaaaatattgtcctaaatattttcggtggaaaagataaactattagacttaaaacaaagtgtattaagtggagatacaactaataatgaggcatcggcaagtttaatatatttcaaagagttattcggtaaaaattttattaggcgagaagataatgcaataaattcgtttttaaactatggatattctataattagaggttttgtttgccgaagtatagtatgccatggactaatgccttttatggggatttttcatagcaatgggttaaatcagtttaatttggctgatgatttaatagaaatttttagacctgtagtagattactatgttaaacaaaatttatcaaatgaagaaagtttaaccacaaaaataaaagggcaattatataatttgataaatatagatgtaaaaattgatggtcagaaacaaccagtgtcttatgcaatagatttattagttcaaatgtatgttaaatgtttaagagaaaataaaaatgttttaaaacaaatagaaataattgggttacaaacgcatagttatgagtaaatttatgagagtattagtgttttttgatttgcctgtcaaaacgaaagttcaaagaagagaggcaacgcagtttagaaacttcttaataaaagatggtttttatatgattcaatttagtttatatggtagaatttgtaatacaatagaatctgcaagaattcacgaagatagggtatcagtaaaagtacctaaaaatggagcggtaaggtctttaattgttaccgaaaaacagtacgcatctatgcgaattattataggagatataaaacacaaagagaaaaaaaacaattctcagcaattatcatttttttaaaatttttaaaaatttcaaccatattaattaaaaatatgtgattttttaccgtaaaaaagaatggaaaagtcttggaaaataagacttttccactctttttttagtaacctattataccataccaaaatttaatagggaactaaaacatatatgatagttaattgtgtgctgatacaattataccataccaaaatttaatagggaactaaaactgatgttatatatgccattttaatgtctttattataccataccaaaatttaatagggaactaaaacaatatcgtcacttttaaccgcgttatttttattataccataccaaaatttaatagggaactaaaacatccacgaaccgttacagctagaactgccaattataccataccaaaatttaatagggaactaaaacgttaaacaacatcccgactttaaacacttaattataccataccaaaatttaatagggaactaaaacaataatagcactttgtccactttctttttgattataccataccaaaatttaatagggaactaaaacttcacaaatagatggcgcaaatgctacgctattataccataccaaaatttaatagggaactaaaaccgaataaggctattcgtgttatgcaac

SEQ ID NO: 443 - DNA, 23684 bp, synthetic construct
  source 1..23684: mol_type = other DNA
  misc_feature 1..23684: note = Synthetic
cgccatgctcaacgtcacaaacgcgcttgactggaaggcgacgttcgcgctcgacgcggcgccggcgtcggacgacgccttcaggctgaaggtgcgctacgccgacggcttcacggcgaaggtcaacggcacggtcgtcacgaacgtcctggtcgaagaggcgcgcgtgcttgcggacgcgctgacgcccgtcgtgatccccattccgtcggaacttctcactgtgggcgacaaccttcttgagatcaccgccgtcaacgacgccgtgaacgatccggacttcctgctctcggcggaggtctcggtcacgaagtccgccgaggagctcgtgttcttccgcgagcccacgccgggcgcgaagaacacgacggccggctacggccccgcgtccccgaaggtgcagttcagcgtgccgcacggctacaagacggcggcgttcgacctgacgctctcctgcgcggacgatcccacggcgacgatctactacacgctcgacggcacgtcgcccaccacgtcctccacgccctacacggggccgatccacatcaccggcaccacgtgcatccgcgcggcggttccgcaggaggggagcgtgatccagcaggacgccgcggcgacgtacctcttcctcgacgacatcctccagcagacgagcggtgtcgtcccggcgggcttcccctcgaccacgatcaacagccaggtcatgcgctacggcatgaaccagagcattgtgaacggcgcagaccgcgacaggctcttgcgcggcttcacgaactccgtttccacgatctcgctcgtcatcgatccgcacaatctcttcgatcccgtcgagggcatctacgtgaacgccaaggcgtgcgacggacgcgaatgggagcgcaccacgatggtggagcagatcgacccgacgaacgacgccaacggcttctccacggcgggcggcatccgcatccgcggcgcgttcagccgcaacccgcagtacccgaagcactcgctccgtctcttcttccgcaacgactacggcgacgggccgctcgagttcccgctcttcggcgacgagggcgcgggcaagttcaagaaggtcgacctgcgcacgtcgcagaactacgcctgggcaaacgggacgggcagcacctacaagaaggacaccttcatccacgaggtgttcgcgcgggacacgcagcgcgacatgggcgagctctacacgcggagccgctactacaacctgttcatcaacggacactactggggcctctaccagacgcaggagcgcggcgacgaggacttcgcagaaacgtacaacggcggcgacgccgacctctacgatgtcatcaagacctcgcagcccggctatgtgaccggcgcctccgagggcacgatcgacgcctgggaggcgctctggaacatggcggtgaacgaaggcttctccggcgcctactccaacaactaccgcaaggcgatgggacagaacccggacggctcgcgcaatcccgagtacccggtgtacctcaacccgaccaacctgatggactacgtcatcaacttccactacatggttgactacgactcgcccgccgccgcgagcatggcgaacaacctctacgccgtgcgcgaccgcgacgacgacgacgacggtctcaagtcgcagggcttctacttcctgcgccacgacgcggagcacaccatgggccggcacgcaaattccgaggcaaaagacgacccgactctgtacggcaccgagcagagccacgccaacttcaagaagctcaacgcgttcaaccctggagagctccattacaagctttgcgccaacccggaatacaagatggcgttcgcggacaggttctacaagcactgcctcgcgcagggcggcgcgctcaccgtccccgaggcgaccaggcgcttccagagccgcatggcggagatcgacgacgtgatcgtgtgcgagtccgcacgctgggcgacggacgggcagacgcgccagacgtggctgagcgcctgcggcgactgcttcaccttcatcacgaaccgcatgccgtacatgctctcgcagtaccgcaaccgcggttggtacccgtccattgacgcgggtgtcgtgctcaacggcacaggcgcgacggtcgttgacggcatggttgtcgcatcgaccgacaagatctacctctccggcgccggcaccgtttactatacgctcgacggcagcgatccgcgcatcgagggcggtgcggtcgccgatggcgcagtccagtattccggtgcctcacccgcaccaatcgacgtcccggtcatcgcgaagggcgatgtctggaagtattccgacgcaggtgcgaagccggccgagaactggaccgctcccgactacgacgattcgtcgtggagctccggcgccagccgccttggcttcgcgagctcgggcacgttcggcacggcgctgaaccgctatgtcggcggcggctcgtccggaacgcaggtgacgacctactacttccgcaagacgttcacgatgcccgccggcgcagagttgatgaccgagttgaaggcggcgcttgactgcgacgacggctacgtcgcctacatcaacggagtcgaggtcaagcgcgaccaggtcgcctcgacggaatacagcgcgttctccacggcgacgaacatgggcgagaagaacgacacgttcacgttccccgccggcacgctcgtcgagggcgaaaacgtcatcgccgtcgaggtgcaccagtgcaacgcgagttcgaccgacgcctggtggaacctcgcgctttcgtacgcgcaggccgtggaagtggagggcggaatcgccgtgcctcccacggggctcacgctcacgatgcgcgtcctctcgccgtccggcgaatggagcgcgctttcgacggtcaatgtcaggggcgagctgccgcaggcgtctgtcgcggacggcctgcgtctcgccgaggcgctcacgtcggctgagggcgacgatacgctcgactacctggtcgtcacgaacgtggctgcgggcgagatccatctcgacggcgtgaagatcgtcgcgtggaacgcgaagaagaagagcgaggcggatccgtcgctcacctacttcttccccgccggcacgagccttggttccggcgagtcgctgcggatcgatgccgcctcgttccctacgggtggcaagctcacgaacagccaggtgggcctgcgcatctacgctgcgggcggggcgctcgtgcaggacgtctatcttgatgctgactggtggagcggcgcgtgcgacggaacgggcgaatacttcgtggcgaagacgttcggcgcggaggcgaagacggtttcggactggaagccgtccgtgagctgggtcgagaagaacctgcgcttcttcgagttcgacggtgttccggctgatggcaacggcggtgacacgggcgagtatttcgtgttgacgaacctctccgactcggtcacgctggacctcacaggcgtcgtggtcaacatctgcaagtcgggcgatctcgagacctccgcgaagtgcattgtcacggttcccgagatgaccctcgcgccgggcgcaaccgtccgcttcgaccaggccacgtactggaacggctcgaagcagaagatcaccaatggcgcgttggtcatgaagatctacgacgccgaaggcgcgacggtccaggtctccacgcccgaccagaacaatgcggcattcgccaattacaaagcgaaggcttcctcgacgaatggcggacccgtcctgcgcgcaacctcgttcacacgcgagacgacgactgcggactgggtggaatacacgcctgcgccggccgactggccggacgatccggacacggagatcacgtcgacgacgacggcggcggacctcgccatcaccaccggcgcgttcacgaacgcgacgccggaagtcctgcggaagctctccaagtgggcgaaggcgaacggcgtgccgtatggcggcgaagcggtcaacggcgtcgtgttcgcggagtctggctacacgctcttcgaggaggcctacctcctgaactgcgcgccgacggccgaggcggtggcggcgaagaaggcgctgttccgcttcaacgagatcattccgggcaccgtcccgtcgatcgacgcaacgctctacaacggaagggtgaggatactcggctcccagacgctcgaaggtggcgggacatggtccgatgcctccgaagatctggcgacggcgcacttcttcaaggccgtgctgacattctgacggtgtctttatcaacaggagaaataagatgaacataaataaactaatgacgctcgctgtaataggcgtagcggtggcctcgttatcgtcgtatgccgcgccggaccctgaaacggtattccgcaacccgccgcaaagcgctaagacgggcgtgtggtggcactggatggggtgcaacgtctcgaaagaaggaatcgtcaaggacctcgactggttcaaggagaccggcatcggcgcggcgacgatcttcggcatggcggacgtctgctcgccgtgggcgacgaagatcaagaacagccccaacgagggcctgattgcgttcactcccgactggtggaagctcgtgcgcttcgcgtgcgaggaggcggagaagcgcggcatcgagatcggcgtacacaactgtcccggctacacctcgacgggcggcccgtggattccccctcgtctttcgatgcgcgagctcgtgttcaacgtcacgaacgccgaggcgcagatatcgctcaccgcgcacgccgcattccccgtgcaggtgggcgaaggcgggccgttcaagaagccggacatcccaagccgccggacggaccttcaggagatcgcggtcgtggagggcgtgcgcgtgcagcacatcccgatgggctccttcacgcagcccaaccagtgggagacgtttggtgtcgagtgcgacaagatgaacccggaggccgtcgcgttccacatggacaaggtgatcggcgacatgaagaagtacgtcggcgaccagatcggacgcggactcaagttcgtcctgctcgacagctacgaggccggatggccgtcatggaccccgaacatgcgcgcggagttcaaggcgcggcgcgggtacgatccgctgccgtacctgccgattctcggcgggttcaaggtgtccgtcgcgaaggacaaggcggcggaaaagaagttccgcgacgactacaagctcaccatcagggagctctaccgcgacgtgttcttcaagatcatccacgaaaagctttcagcagtcggactcgagatggcctgcgagccgtacggcgggccgatcgacacgcgcatgtgcgcgggttacgtggaccggctgatgaccgagttctggtacaggccgaacctcaaccgcaagctccccaaacgcctcgaatggaaccagtggaccggtcccgccgggaagcgccacaacgtcgtcgaggcggaggcgttcacgggcagccccggcgcctgcaactggatcgagacgccgtatctcctgaaggcggcgggcgacacgcagttctaccgcggcatcaaccgcatgacgctgcatacgtgtccgctccaaccgtggccggacgaattcctgcccggcaaggtgatgggacgctggggcacgcacttcggccgcacgcagacgtgggcgaagagcggcaagggcttctacacgtacctcaaccgctgccaggcgcttctccagtggggcgagccgagcaagatccgcatcatcggacacgacatcacgcccaagggcacgccgctcaccgcccacgcccgcgaggcggacggcacggtcgttttcttcgtgatgaaccattcggaccatcccgcgtccatgaacatgggccttccgaacatcggcaaggcgccggagtggttcgatcccgtcacgggtacggttgcgccgctcgctctcgtcaacggcaaggcgcccatccagctcccgccctgcggcacgggtttcctcgtgctgcgtaagccggccggctcgcttacggccaacgcggacagcgactactaccagaagctcgacaagccgttcacgggtggcgacgcgcaacccgtcgcgggaccatggcgcgtgaccttcggcggaaaaacaatcgatatgcctacgctttccgactggactgccaacgccgatcccgacgtcaagtatttcagcggcactgcaaagtactgcacgcgccttgttgtcgctcgtctgccgtcgaatgtcgggtcaatccttactctcggcaactgcaacaaccaggtggcgaaggtgatcctcaacggcaaggcgtacgcgccggtatggtgcgcgccctacgaggtgcgtttcgcgccgggcgacctgaaggaaggggagaacacgctcgaggtcgagttcaccaacgtgtgggcgaaccggctcatcggcgacgagcaggagccgccggactgcaaattcgtgaaggcggtctatcctggcggatggtatcttgaatccttccccgactggttcaaaaagggaatcgcggcgcgtccgtcgaagggccgcaagtgcttcacggactggaactacttcacgaaggactccaagctcgcgccgtctggcctcatcggtcctgtcacgttgcgatgatgaaaatatcttattgccttgcggtgtccgtttgcggggtggtaatgtccgccagcgccgcgacgttccatgtcaatcccgtggccgcgccgggcggcgatggttcgtcctcgaagccgttcgccacgctagagacggcgcgcgacagcgtgcgcgcggcgcgtaaggcgggaaaagtcgcctctggcgaagcggtggagatcgtgctcgcgccgggcgactacgtgccgatggaaggtttcgcgctcaaaccatgtgacggcggtgcgtacgaatcggcgctggtcgtctggaaggcggccaaggccggcacggcgcgcatcgtgggtggcgtgcgtgtgccgatgcgtgcgttcagtcccgttacggacgagtccgttcttgcgcgtctccccgaagaggcacgcggtaaggtgctgcaggccgatatctccgcgatccttcccggcaaggtgccgtccatggccgccgcgttcggtggcacgcccaccgcgccgctgctgttcctgaaccaccgcttcggtacgctcgcgcgctggccgaactcggactacacctcgttctcgaagtgcgtggaccacggtgcccggatcaagatgacttccggcggcggcagcgtgaacaagcccggtgcctttatctactccaatccgcgcgcgaagcggtggaacttcgcagagggcgtgtggatgaacgggtactggacgcacgactggagcaaccactccgtgaaggccgcgtcctacggcgcggagaacggcacgagcgacgtgatccgccttgccgactcaatcccgtacggcgtgctgggtggcacctggggacgcaaggaccgcaggttctacgtgttcaacctgcttgatgaactggatacgcctggcgaatggtacctcgaccgcgcgcgcaagacgctttacatctgtccgccagagggcgggttgaaggattcggacgaagtgttcgtggcggtgtccggtgcaccgctcgtttcggcgaaagacatcgcgcacgtccgcttcgagggaataacctttgaatacgcctacggggatgggctctcgattgccggtacggatgttcaagtcgtcggctgccgcgtggcgtgctgtggcgggtcgggcgtattgctgcacggtgaccgcaacgtgatgcgcggctgcgaggtggtacaggtcgggcgcgtgggcgtgtcggcgaacggcggcgaccgcaagacgctccgccgcgcggactccgtctttgaggataaccacatgcatgacttcggcgtgttccaacgcacctacgcaccgggtttcggcgtcaatggctgcggcatcacgttgcgcgcgaacgtggtgcacgacgcaccgcactccgccgtcctctacggtggcaacgagcacctcttcgagtacaacaacgtctatcgcgtgctgctggagacgggcgacgcgggcgcgtactacacgggacgcgactggaccacgcagggcaacgtgctgcgtttcaactacacgcacgacctcggcgcgggaggagagattgccaacacgatgggcttctacttcgacgactgcgactgcggcgacgaggtgtacggcaacgtgttccacaacgtgtcgcgcggcatcatggtcggcggcggacgtgagcacccgattcgcaacaacgtcttctcgcgctgcctgatcgggatgtctatcgactgccgcggaatgacgtggaagcactggaacagcgccgagcatggtggcccgtcgtggttgctggaggacaaggcgaaggcgttcgactacacgaacggcgtatgggcgatgcgctatccgcgccttgcgaacatcatgaacgaccatccgcgcgagccgctgtacaatcccgtggagaacaacgtcttcatcgactgccagaaggagattctcgtccttgaccgcatcgcgccgcttgcgcggatggcgccgattgcgggcaacgtggtcgtcaacacgcaaggtacgaacggcgtgaagtgcgcatctatcgatgcgcgaatcgcgtccggcttcacggtactcaacggtacgaccaacgcaccgtgcgcatttggcttcgcggatgcggcgaacggcgacttccgcctcctccccgacgcggcgatcttgaaggcctgccccgctttccgtcccctgcccattgctcgtatcccgaactgggacaatgggaaccattcccgttaaatccacagggacagaaaaactaccacacgtttccaacgtcgtatgcaacggaagcacgaaaatgcaacagcaagagaccatacatgccgtcatggcgccactggatgacgaattcataaggtcacgcatttatacaattcgcggcatacaagttatgttggatcgcgatttggcgattctgtacggcgttgacgcgaaacgaatcaacgagcaagtaaagcgcaatgcggagcgcttccctgaagacttcatgtttcgtcttgcaaaggacgagtgtttaaggtcgcaaattgcgaccttaaacatggagcgcgggaagcatctgaaatatatgccgcatgcctttacggaaagcggcgttgccatgctgagcggagtgttgcgttctactgttgccattgacgtcaatgtgaggataatgcgtgcatttgtttccatgcgaagagcattgtcctcgatagcgcctgtcttggcaagagtggcagagaccgagagactgcaactcgaggaaaaggcagcccgacttgcggaccaggcgaagaacgaggagcgttttgacacgatcttcaaggcgatggacgggggcgatttcccgccgcagaaggtgtttttcgacggcaagcattacgacgcatattcatttgcgaggaagctggtccgcaaggcgaagaagaacatcgtcctcgtggacaactattgcgacgatgtcacgctcgacatcctttcgcaaaaatgcggcggtgcggatgtgctgattgccaccacgcacaaatctgccaccaagttcatatcgccgaccgccgtcgccaagttcaacaagcagaatccgacgctcacgatcaagaccgttggttcattccacgatagatttctcattctcgacggcaccgaactctaccacttcggcgcgtccatgaaagacctgggacgtcaatattgcgccatcaccaagatggacgccatgttcatcccgtcgatcatgcagcgaatcccgtagccaccgatttatgctatactatccccgttcctcaaaccaaaggaagaatgatgatgtattcgcttgatgagcataaaaaaagcccggcgaaccgggccgcagtctcaaaacgacttcggcatatagccttgttgtgataagatgcgtgcacatagtacctcatttgctgcaccaagtcaagaaggaaaggacaaaaaatgaaaaaaacattaggtctcgatttagggtcgaattcgcttggatgggcgattctagatgacattacgggggacatcttggacaagggggtgatcgtgttcccagagggcgttgaccttgacgcgaaatcttcggcagataccccggcagccattcgccgtgcagcgaggatggcgcgtcgcatgaagttcagaaggaaacttcgcaagtggcatcttctcaatatcctcattgatgtcgggatgtgtccactgacgcacgccgaactggacgagtggaaaaagactggccggtatccgcttggcaacaaggcttttcttgaatggctcaaggccactgacacctctaacccatactgtgaccgcgcagcagcggcatcggggaaagtgccgcccctgacattgggaagggcgctttaccacatcgcccagaggcgcgggttcaagagttcgcgaaaagacgaggccgatcttgcggacgaaacagcagggcaggagaagcaactcgacaaggaactgggtgcggtcaagacggacatcgagaccttgacgaaagagattgaggcggcgggatgcaaaacacttgggcagtatttcttcaaactgctccagaacgaaaagggaaaactcgacaagacgcgcatccgctgcagatacaccggacggatcgaacactacgaaaaggaatttgccgtcataatggatgttcaggggtactcttccggcgacgaattgcggacgaaattatacaaagccatattcagccagcgccctttacgatctcaagctcatttggttgggccgtgtccgcttgaaccgcgtaatccccgcgtccagattggtcatccagcgtttgaagagttccgcatgttggcatttgtcaacaatctatccctcgaggacgcagacgggaactgccgagacgaacagggcaatattctatacccgctttctgcaaaagactgcgaagtcatttgctcggcgttcatgaaggctgcaccatccatcaagtttggtgatatcatcaagttgttcaagaaagacccgcgcttcaagtcacaggggctcaggttccattactatcgtgcggatgattcagtggcgacatgccagacgcgccacaagatcaggtccgcgttcggaagtgtaccctacgatgagcagaaggtgtttgacgctcttacgttcttcgacgacaacgacaagctcagctcttggtttcgaaagcatttcccggctcttgatgatgcggcggttaagaagctcgtctccatacaccccaaggaaggtaatgccagttactctctgaaagccatcaacaagatgcttccattcctgcgaaaggggtttgaactctcgcaggctcgctttctggcgaaacttcctgatgtcattccggatttcgccgcaaacgagcaggctatcttgcaaggcttggaggaaaagcgttgggcatttcgcgaagaacgccgccgatatggagagatggactccgcagaacgccgcaaagcccaagctccgcagctcttcgatttttatcagagatacctcctcgacaattggaatgtgacggacgagaagtggaagcggctctatcttcatggcgaaggtacttatgtaaaagagaccgagtataaatgcaatggaacgaaagtccagttggcacgccctcgtcttcctcctgtgaaacttggaatgatccgtaacccgcttgtgcaacgcgcgatgaccacgcttcgccgactcgttaactacctcggcgaccacggcaagctcgaagaaacggatacaattcggattgaacttgcccgcaccgtcaacgacttcgccacccgcaaggcgtggcaggaatggcagaagtcgcatcagcgtatgcgcgccgaggcagctgcggagatcgccaagttgggtatctccgtcacggaggacgccgtcgaccgctatgtcctctggaaggagcaggacggtatctgcctctacacccataggacgattaacgtggccgatctatttgccggaaacaagttcgacatcgagcacacgattcctcgttcgctttccggtgatgattcgcttgccaacaagaccatctgtgaggctgcctacaatcgccagacgaaacaggggcgcataccgcgcgaatgtccaaactgggaagagatcgatacgatgctccgcccgtggcgtgagaaggtggaacagctagagaagacctaccgcagccaaacgcgaagcgcacgagtgaagacggatccgtcccagcggagtcaggcacgagtgaagtcactcactacgaagtttgagttggcatactggcgcgacaagctccggcgtttcgagataacctctgacaaactgcagtcgccggaatctgggttgggcgggttcaagaagcgccagctcgtggatacgggcatcatgtgttcgcatgccgtcgagctgctccgcagcgtctatcccgctacgttctcggtcaatggcgctgcaacagcatttgcccgcaaggcatggggcatacagggtgacgaggcgaaggaccgcacggaacatacgcaccatgcaaaggacgccatggtcattgcggcgcttaccccagcacgcttcacggccatttgtacggcgctgaaggatgacggtgcggagcggcgccgtgaatgtgacgtttgcccgccgccatacgaaggttttgcggacaaagtgcgccatgcgtgtgaagagatacttgtaaagcatgtcatgcggcagacaacgcttcgtcagagttccaaacgtaacgtgttggcgaaggcgcatccccccaagggaaatcccgaggggcctctcgtcaaggccgtactctcacgcggcgacacggtgcgcggcgcgttgcacaaggaaacattctacgggtgcatacagacgccaggccaaaaggacaggcagttcgttgtcagaaagcctcttttggggccggtcaaggacgcgcaggccatcgtcagcaagatcattgaccccgccatacgtgatattgtagatcggcggctaaaggaaatggtggcgagtggtgtgaagaatgtttcagcaggtgacattcggatgccgtcgggagtgccaatcaacaaggttaggattgccgccaagacgactaatccctccacattgcgcgatcatgtgatgccatccgttcaagcctacaaaacgccctattacgtgacatccgccgaagggagcaatttccggttggggcttttcagtgaagcaggacgaatgttcgctattcccgacaattcacttgattgggcacagaaccacaaacgttcggactaccgcccgttggacctacgtccaggatttattggatatgttaagccaggaactatggcattggcttatcatgaaggtcatttggaagaactggaagcaatgtcgagcgctgatctgcgtaagcgtctttataaggttgtgaaatttgaaagcagtggacgcattactttacgattccattgtgaggctcgtaccagtacggtacttgagggggaactcgccgccgctggattcaacaagaaaggagaatcaaggataaattatgacgttccgaatcgtctgctcttgttaagtccaggtacatacaccaagcaggtgcttttcgagggtatccacttccgcatgatgttggacggctccatccagttcatcaagaagtgacatttgatgattgcccgaacactttcattcggttctcccgggaaactctccattgctcatagacagcttgtctatgatggcgatggagggattcaccgaaccttccccgtggaggatatcggctttgtcataattgaaactggacagatggttgtcacgacatcgtgcctgcaggcattggcagaccagaacgtagccgtagtcatttgcgacgacaagcatgtgccgtccgcccagctgttgccgtttgccgctcattctacggcacaggaaacagtagaggctcaactcgccgctacgcctgcggtacaaggtaggttgtggcgacagattgtccgggccaaactccttaaccagtcagagttgcttgttcggttaggtcgcccaaatgcgcttcgactaaagacattggcggacgaagtgaagaatggcgatccgtcaaactgtgaagcgcagggggcacgtatctatttccagacaatcaggacggatgcagattttctgcgtgaccaggaaggcgacggattgaatgccgcactcaattacggttacgccgttttgcgtgcggcggtcgcacgggcgttggtcggatcaggactcgtctgtttcaggggtgtacatcatcataaccgttacaatcccttctgtttggcggatgatgtgatggagccgtatcgacctttcgtcgatcaatacgtgtttggagataccgatggcgtgtttgaaaacattgacgacggcctgacccgccccatgaaagccaggcttcttcagatgctgacatgcgacgtccggattgggtcggtgaaacgtccgttgatgttgggcgtgacatctactacagcatccatcgccaagtattatctcggcaagacgaaggaactcgccttgccctcattcgtatgacgctttgttcgcaaacagcactgaacggatacgccatcatgtggctctacgtcatgtttgacctgccaacggagacgaagcgacaacgacatgacgcgactaagttccggaaggatttacttgaggacggcttttcgatgcaccagtactcggtttacattcggcactgcgcgtcgttggagtccgcaagtgtccacatagggcgaatcaagcgttttattccagaagagggtttcgtgtcaattctcaaagtgaccgacaagcaattcggcgacacgattaacttactcggccggaagcgcaagccccgccctccggtgccggttcagcttgaattcttctgaaaaaaaaggcgcagtaccgaaaacggcactgcgcatcctcttttttctcgcaacataaccttggactatgtgctgtcaataaaggccgaaagtggtccaatattgaaagcgatagccaaagagcatcaaatcacaacaactgataagccattgcgcaaggctgatagattgaaagcgatagccaaagagcatcaaatcacaacgttatcctcgccgttttgggcattgtggtattgaaagcgatagccaaagagcatcaaatcacaacggcacccggaacatcagatagggggaacgcattgaaagcgatagccaaagagcatcaaatcacaacacggaaggtaaaagggaagttgaagaggaaattgaaagcgatagccaaagagcatcaaatcacaacatacgcgcacgcgcgtagcggaccttcgccattgaaagcgatagccaaagagcatcaaatcacaaccggacgagatcattggtctttcggaagtttattgaaagcgatagccaaagagcatcaaatcacaactgtttggaagggagcctttagcattaagctattgaaagcgatagccaaagagcatcaaatcacaacagtcaaatctacagtctgttgagacaaatattgaaagcgatagccaaagagcatcaaatcacaacaccaataaaccttctcctgtttcctctccattgaaagcgatagccaaagagcatcaaatcacaacacaaattcaccttctcctgtttcctctcccattgaaagcgatagccaaagagcatcaaatcacaaccctgcggcaaacatgctcgatgctgcttacattgaaagcgatagccaaagagcatcaaatcacaaccccactggtacacagcgccgcgagggtctaattgaaagcgatagccaaagagcatcaaatcacaacaacgttgtcacgcatgccacgacatctatattgaaagcgatagccaaagagcatcaaatcacaacctcggatcgcaaacgaaagatttatggtttattgaaagcgatagccaaagagcatcaaatcacaaccctgtaggccctgtgtcacccgtcggcccattgaaagcgatagccaaagagcatcaaatcacaacagttgaaccgcgcatcgcgcttttccgtcattgaaagcgatagccaaagagcatcaaatcacaactagcatggtagcatagatagtgaattgcgcattgaaagcgatagccaaagagcatcaaatcacaacatgctttgtttgtttctaatattgtcacgcattgaaagcgatagccaaagagcatcaaatcacaactcgaacgccttataggttgggcgggcattgattgaaagcgatagccaaagagcatcaaatcacaaccgcatggtcgcaaaggtagtgtattgcgcattgaaagcgatagccaaagagcatcaaatcacactgccgctcgattgaaagcgatagccaaagagcatcaaatcacaactcggggcttgcggggaagaagtccctgcggattgaaagcgatagccaaagagcatcaaatcacaacctattctgtcgccgtcccgcttgcaagcctattgaaagcgatagccaaagagcatcaaatcacaaccgcatggtcgcaaaggtagtgtattgcgcattgaaagcgatagccaaagagcatcaaatcacatcaaatcacaacaaatactatgaggattacaactccgctgaattgaaagcgatagccaaagagcatcaaatcacaacatccagacccttttggacaatattggttcattgaaagcgatagccaaagagcatcaaatcacaactatgggcgcgatacgttcgcggtctcctctattgaaagcgatagccaaagagcatcaaatcacaaccgtgtccttggaacgtcttttgatttgttcattgaaagcgatagccaaagagcatcaaatcacaacctccgatcgcaaacaaaagatttatggtttattgaaagcgatagccaaagagcatcaaatcacaacagccactgcacgaaagcatcacgagggcaattgaaagcgatagccaaagagcatcaaatcacaaccggcgcggcgaccatgtgtttgcaacgcgcattgaaagcgatagccaaagagcatcaaatcacaactcctccggcttgatgcggttcaccgcgcgattgaaagcgatagccaaagagcatcaaatcacaacgtggtagatagtgtgtagtattgcagtcgcattgaaagcgatagccaaagagcatcaaatcacaacaatgcctctgtcggtcagtttaagcagtccattgaaagcgatagccaaagagcatcaaatcacaacgtggatgtcgtggcggtggtggcggtggctattgaaagcgatagccaaagagcatcaaatcacaacatggacgtgccattggtcaacggatttactattgaaagcgatagccaaagagcatcaaatcacaactgtggcttgcccttctctctatatcttcctattgaaagcgatagccaaagagcatcaaatcacaactcgagcaagatttgttcgcgcttgaggacattgaaagcgatagccaaagagcatcaaatcacaacctcatcgtcgcgtggcggctgtttaagcgcattgaaagcgatagccaaagagcatcaaatcacaaccttctcgtaatcttcgccagtcgcgctttattgaaagcgatagccaaagagcatcaaatcacaacccagttgaaaagcggggcaaggttcggaaaattgaaagcgatagccaaagagcatcaaatcacaactatgtctcccgtgatactgtcttgcattggcattgaaagcgatagccaaagagcatcaaatcacaaccgctcatgtataaggcggttttcgattcgcattgaaagcgatagccaaagagcatcaaatcacaacgcggtgacacagagggcggcggtgatgatattgaaagcgatagccaaagagcatcaaatcacaaccgcacatacgcgaacgcgtatcaacctcgcattgaaagcgatagccaaagagcatcaaatcacaacgcggttgcgccgcgcatttcttcgcccttattgaaagcgatagccaaagagcatcaaatcacaacatatgcggacatataaccaagggacgccacattgaaagcgatagccaaagagcatcaaatcacaatgcagagtggacatacggataggattccgaaagtcttctctaacacagaattgtgctctggctaaatggtcttgagtttagattgtcaaagatctgcagaaaacaatcccattataccataaatgctggtgaaaagatagggggtgttacgtcgttgggtgtttgcggcggcgcggttctcgagtatgccctgccacctcaggcgcatagtgacgctggagtggtgagcggtcagtgtcgccgcctagaagggtgctttccatgcggcggcggctcgttgagacgactcgccccaccggtgggtgttcacagtcgtacaccacggagggtttataccccagtatgaggggctcgtacaccccagtatgagagcctcttacaccccagtataagatgctcgtacaccccagtataagtgcctcttacaccccagtataaggggctcgtacactccagtgtaacagggctttgcaccccagtccgcgtaagcagcgtacctcaggtagattcaaggacggcattgaggcgtgacgtgacgtagcgtggcatgtggttgatgccgtcaagctcgccttggcgctgctcgctttcgagggtaatgatgacttccatcgaacgccccgggtgcttatcatcaatcttgttaattacgctggaaaagatgcggacgttgtcgaggtacttcgggtcgtctggtgtaagattacagaggcgaagcgccctgcgtaagggagatgcttcaatgtccttctgcgttgtttgcacggcgcgttttgcagtatagccgctgcccagattattggcaagattatctaaatccgatgcggtgtcgggcgtctttaccgcatcgtctttattattgtttatattattattgtctttggtgcccagctgctgggcactggtgtgatcagctgctgggcactggtgtgccttgctgctgggcactggtgtgatcagctgctggtcactcggtgtaccttgctgctggtcactcggttggctctttcctgcctttttcacggcagtttccggtggcaatgtaaaagtgtaggcgtttgagagtgttttgccgtttttccctttcttgttcgcgaggcctccgcttacccatgtgagtaatccgtttctccttaatctgttcaacgcatcccccaccgcccctttgcttaggtgcgtcatttgcattagcgtttcccgtttgggataacagaggtttttatcatcgcgcaacttgaaggccagagccacaagtacggcctggtcgctgggcttggtgagtttttttccgagcctgtacacccgttgtaacattttgatgctcatggtggattaggcctttctcttgcggcgtggtttggttgccttgaacttcgggaggcttgcgatggtggcatccagccagagaaggtcgtaggcggccttttcgagcttcaccaggcgcagggccttctcgggcaaggacgaaccataggcatctggtgtcccaatctcctttgcgaggcgccaggccatgagataggggcgcacggctgcggagccgattgacttggcgaaggttgccgcagcgtaaaggtattcttcatagtattcgatgaaggctgtgcgatcatgttcctcttcggcgtccatggtcaatacaagtttactggcaccatcctgccatttgtcgatcttcgcaacgtcgatgtctatgttgatgtcgtagccgtcaacgattaggagcgtgctggtggagaagacacgtgcgatttcgtcgtggtcgtacgcgccgaaggcgcggggtagttcgccacgtttgatggcggcgatgcgtttttttgcctttctcgtgaggacgtcgcaagaatcggacagttccctgcctgtttcttcggtgaaattcctgcgcgcaacgtcctcgttgtattcgttggctgcttcgatttcctcttcaagttgttctattgtcatgatggcctcctttttgtttgctggaaagtgtaggagtaaattataccacaaatctgccgtggtgtgttccagtacgccgccaagatggtggattttgcagttggcttggcgaattgaattaggatgatgtgcggacggggcgaaaatatgttatactgtgtgcctacccgttatggaacagacattagacaacattcgcaatttttgcatcatcgcgcacgtggaccacggcaagaccacgctgtcggaccgcatcctcgagcttacgcacgccatcagcgcgcgcgagctgaaggagcagaccctcgacgccatggacctcgagcgcgagcgcggcatcacgatcaagagccacccggtctcgatggagtaccacgcgcaggatggtaagacctacctcttcaatctcctcgacactcccggccacgtggacttcgcctacgaggtgagccgttcgatgggtgcgtgcgagggtgcgctcctcgtggtggacgccgcgcagggcgtggaggcccagaccgtcgcgaacacctacttcgcacaggacgcgcagcttgagatcgtacccgtcctcaacaaggtggacctccccggcgccgacgtgaaggaggtgagccgcgagatcgaggacatcctcgcgatcccgatggacgacccgctcctcgtgagcgcgaagacgggcgtggggtgtcccgacgtccttgaggcgatcgtgaagcgcattccgccgccgaagacgcgcggcgcggacgcgcccctgcgcgcgcttgtgttcgacagcgtgttcgacgagttccgcggcgtgatcacatacgtgcgcgtggtggatggcagcgtgaaggccggccagggcgtcacgttcatgggctcgcacgtctcgaccacgatccacgaggtgggcatcttctcgcccggcaagaaacctgtcgattgcctttccgccgggcaggtcggctacctcgtgggcacggtgaaggacccgagcgagatcaagatcggcgataccgtgaccacctcgaagttcggcgcggacgaaccgcttcccggttttcacgacatccaccccacggtgttctgcggcatctacccgatgtccacggacgagttcccgaaggtggcgcaggggcttgagaagctccacctcaacgacagcgcgttcaccttccaccacgaaagctccatcgccctcggcttcggtttccggtgtgggttcctcggcctcctccacatggagatcgtgcaggaacggttgcggcgcgagttcaatctcgacatcatctccacaacgcccggcgtagtttacaagctcaagatgaagggcggtgaggaacgcgacctcgacaatccgctccaaatgccggacccctccacgcttgaatccatttccgagccagtcctcaaggcccgtatcatcacgcccagcgaatcgatcggcgacgtgatgcgcatcgtgatggacagacgtggcacggtggagggtacggagtcgatggacgcgaagcgagtgatgctccactgtcgtctgccgctgaacgaaatcctcattgacttccacgacacgctcaagagcgtctcgcacggctacgcctcgatggactacgagccggacggctaccaggagagcgacatcgtgcgcatggacgtgctcttgaacggtgaaaccgtggacgcctttgcgacgatggtgcatcgttccaaggcgcgtgcgcgcggcattcagatttgcaaggcgctggccgataccatcccgccccaccagttcaagattcccgtgcaggcggcgatcggacgcgaaatcatcgcgcgcgaggacatccgtccgttccgcaaggacgtgcttgcgaagctgtacggcggcgacgtgacgcgcaagatgaaagtgctcgagaagcagaagcgcggcaaggcgcgcatgaaggaatttggtcatgtcaacgtgccgcagtcggcgttcatcgccgtcttgaagggcaccgtcaaggaaacatgaaggaggaataaatatgtcacctactttggaaaaggtcgcggcgacgccgcaggactacccgttcgacgtggatatgctcggcgaatgccgcatcgcgtcgcccgtgcggaggcacgagttcgtgcccgacggcgcacgcgtcttgatgagcgcggatgtgccgctccttgactggctgcgggagaagcttggtcgcgagccgtcgttcgagcgcgctggcccgaaggcgaagatattccacgaccccagctggacgcgcgctggcatcctcacggcgggcggactctgccccggcctcaacaacgtgatcaagggcatcgtggagattctctccttcgactacggcatccagaccatctacggcatccgcttcggctacgccggcctcaaccccgcctgcggctacacgccaatgctgctcgaccccgacgcggtcgatacaatccacgagcacggcggcacgatcctcggcagctcgcgcggacgccagccgactgaaatcatcgtcgatactcttgtgcggatgaacatcaacgtgctcttctgcatcggcggcgacggttcgctccgctgcgcgcgcgacgtggcggaggagtgtctgcggcggaagctctccatctccgtgatcggcgtgccgaagacgattgacaacgaccttcagttcgtggggccgagtttcggtttcgagacggccgttgccgaggccacgcatgttatccgcgacgcgcacgttgaggcgaagggtacgttcaacggcatcggtctcgtgaagctcatgggccgcgactccggcttcatcgccgcctacgccgccgtggcgaacccggtggtgaacttctgtctcatccccgagacggacttcgacctcgacggtccgcagggtcttctcgccgcgctcgagcgccgtttccgcagcggtaagacgcacgctgtgatcgtagttgcggagggcgccggacagaagttcttccagcatgcggaggaaacgcgcgacgcgagcggcaacgtgctcaagaaggatatcggcgactacctcaagcgccgcatctccgcctactttaaggataggggcatggaggcgagcgtgaagtacttcgacccgagctacatgatccgcagcgtgccagcgcgtggtacggacgcgattcgctgttatctgctcgctcgcgcggcggtgcatgcggcgatggccgggcgcacgaactgcgtggtcggctccaacggcgacctctacacgctcgtgccgatcaagcttgccacgattgaacggcagcaggtgtccctcagcggcgacctctggcgcagcgtgacggatgcgacgggacaggagttctacttctcgtcggaagtgccggccgtgaagaacgtcatggcgccgtaacgtctgcaacgtaaaagaagcctacgaacaaaggagcggaataaccatgaaaagaatcttcctttttctagtgacgaactttgccatcatgatcgcgatgatggtcgtgttccacgtcgtgtgcgcgtttatgggcgtcgatcccaacgcggcgttcaggggcagtggcctggacatgacctcgctcgcgatattctcgctcatcttcggcatgg

SEQ ID NO: 444 - DNA, 23576 bp, synthetic construct
  source 1..23576: mol_type = other DNA
  misc_feature 1..23576: note = Synthetic
acatgctcggtgcgcggcagcttcggctggccgtcgctttcgtacgacgacggcaacctgtcggccatagccaacttctacctcggcttctacgcccacgctctcaagatgtaccagagccgccacaatgtgacaatggccgaacttgcagagaggttcttcaacggtttcgaattcaggacgcatgccatggcgtggcagctttcggtgatgcgcgacaggttcgaggagttcgccccacatctgccggcgggcttcgggttcgaccgcaagtggaggttcgtgctctggtcgctcgagcgtcaagagcgccggctttcgacgctgcggcgcattttcttccagaaggtggcgctggtggagggcgacgccgcgaacgaggcggcttcgtccgaagccgacgacgatgaaataaacattgaagggttggagtgacaaatgaagacgtatggaataatccccagcagattcggatcgagccgtttccccgggaagccgcttgcgatgcttgcgggtaagcctttggtggcatgggtcgtggaggccgccaagaaggcgaaaagcctcgacggcgttctggtggctacagacgacgatcgcatcgcgtcggcagtggcggcgcatggaggccgcgcggtaatgacgccgtccgaactgccgagcggcacggatcgcatagcctgcgccgccggcgattttgccgacgacgacatactggtgaacatccagggcgacgagccgcttatagatcccgcgctcatcgacgggcttgttgcaaaactcaaggacgattcccgctggtcgatggccactgcggtcacgccgataaagaccctttcggatctcgcggcgaagaccgtcgtaaaggtggtgctcgacagagacggcggggcgctctacttctcccgcgccgcgattccctgcgaccgcgaccgcgagagcgatctttcaagcgggctgtatgtgcggcatctgggcatctacgcgtatcgcggcgcattcctgaggcgctatgtcgcggagccgccgtgcgatctcgaaaagaccgagaagcttgaacagcttcgcgcgctgtggatgggcgccaggattgccgtggtgaagacgaacgacgaaggcgtcggcgtcgataccccggaggatgccgcaagagtcgagaggattctccttgatcgcatggcgtgagtggcgcacggcggcgagccgcgcgttcgtggattcgcttccggtgcttatgggctacactacgatgggcttcgtcgcgggcgtgctgcttgcggccaagggcggcgtctcgcttgcgcccctgtgggccgtgctttcgtcgtcgatgtggataaccggcacgatgagcttcgcgttcgtgcccgaaatcgccgcccgttcgtccatcgccaccattgtgctcatgacggtggccgtcaacttccgctatgcgttctacggcttttcgatgctcgagaggtggcggaagataccgttcgtccagaaggcgtatctgattctcatgctgaccgacgagaactacgcgctggaggtcgccgcctcgcagtcgatggacgacaagacccatctgaagtattgcactgtgatatccgcgctcaaccattcctactgggtggccggggtgacggtcggcgctgttgtcgtttgcttgcttggcatggcgatagaccccgatgtgatacgcaggcacaccaacgggatggagtttgcgatggtcgcgctcttcctggtgatcttcaccgaccagataaggagcttcgtttcgcatgaaaagtgacgtgctttacatgtttggcgtgatcgtggccgtgttcgcggcgaactacgcgctgagggcgctgccgttcatcgcattcggcggccgcgggcgctctctgccgcgctgggcgtcgtccatgggcgaatacgtttcgccggtgatcatagccgcgctgatagtgtattcgtacgcgggcctcgcctggcgcacgccctggccgtacgtcgcgggcgcgctgacggttgggctgcagctgtggcggcgcaatcctctggcgagcataatcgcgggcacgatcctgtacatgtgcctgctttcatgcggatgcgtgagcgagcgttcgcaccgcctcgaatcctcggttgcgcatcccatagtccgcgtcacatcccgcggcataatgttcaaagacgtgccggtcactcccgcaagagcggttgcgctgctggaggaaaacgaagttcccaaaaacaggacgctccacgtgcttgtcgacgacgatttcgacaaccagcgcgttttgtgggttttcaagcacaactatctcgatcgggcgggctatacaaagtcggtatggattcatgggcgtcgcggagagtccggcaaggccgacataaagccgccggacaagggcgtcgcaacaccgtatagagacaggatgttcagatgaggttcgcattccccgaaatgctcgcgcttgtcgcggttgtgcctgttgcagggctttggtggacgtttcttcgcgcacgccgcgagaaggccctcggaaaactcaccctaagcgtaccgaagcccggcgggtcgtctctgcagtcggcgctgatcctgtcgggtctggtcttgagcctgttcgcggcgtcgcgtccgcaatgggggaggtccatggagaaggccgtgcagcgaagccgcaatgtcgtcgtggcgatagacgtttcccgctccatgcttgcggaggatgtccgccccaaccgccttgaacgcgtaaaagccgacgtggcggatctcatcgactcgctggaaggcgaccgttgcgcgcttgtcgcattcaggcgcaccggcgtcgcgatatgtccgctgacgaccgaccacggctatctgcgcggcgcccttgagcagatgacgcccgacagcgcgccgcgcggcgagacggatctcggcgccgcgatacgggcctctctcgacgccctagaccctgcggccgacgaccacaacgcgataatactgatatccgacggcggagatctgcggggcgaagcgctggaggccgcgcggctggcgaagaagcgcggcgtgccggtctttaccgtcgggataggcgacccgcgcgttggcgccgagataccgtccgaagacgggcgtgggacgcaaaagcacaacggatccgcggtaaaggtcaagctcgaggagtccgcgctgcaggctgtcgcggaggagtcgtccgggcgctatgtccggcttgctacggcaggaaccgccgagacgactctcggcgcgatttacaggcggtttctcaggcgggtcgccgcgaaggagcagaacgaggaggaaagccgcgccgccgagaggtaccagtttttccttgtgcctggcgttcttctgctgatcgccggcgcctcgctttcgcgagggcgtttccgcaaatgagcgcgcagacgacatcgtgcagggtggctcggttgtcaccgtggcgaaaataaggtataatataccgacaatgtttggttttttgaagaagacgcgaagacgaccggtcgtatatacgcgaccggagcactgcatttcgagaaagaacatagatccggacgcgttgaaggttttgtacaggctctccagtgcgggctatacggcctatcttgtaggcggtggcgtgagagatcttctcatgggccgtactccgaaggacttcgatgtgggtacgagcgcaaagccaaacgaggtcaagcatgtcttccgcaattgctttctcataggcaggcgtttccgccttgcgcacgtgcgcttcggcgacaagatcatagaaaccgcaacgttccggcaggattcgcagtcggtcggcgagataatcgagcatgcggcggaagggccgctcgaagacaacactttcggcacgcctgaaacggacgcgtaccgccgcgatttcacggtgaacggtctgttctacgacataaaggatttcagcgtcatcgactgggtcggcgggatgaaggatatcgaaaagcgcgtgatacgcgcgatcggcgatcctgacatacgctttcaggaggatccggtgcgcatgatgcgtgcggtcaagttttcgtcgcggctgggcttcaggatcgagcgcaagacgcttgcggcgataaagcgccgccattcgtgcatactgaacgcggcgccgccgcgagtgtgcgaagaagtgttcaggcttttcccgtacggacacagcgccgaggccttcaggctcatgtgggagaccggccttctgcgcgatcttctgccggcgctttcgaaggcgatcgacgccaccggcggcaagtccagcatggcgtggaaatacctgtcggttctcgacagccttgaaaagctgcgccaggaagagggcgatgaggtctccaacgggctgcgcgctgccgttctcatgaccgtaatgctgaaaagcggcggcgaaaaacagaaggacggtgcatcgcgcatggtcatgcagacgatgctcgacggcataaagataccgaagtccacctatttcacggcggtccttctcatggagagtcccgtgaggctcgggcgcagacccgaaaagagcagggctcgctttgtgtacaaccgcgattttcttgatgctctcgactacaacagaatagtacttcgcgccgaagggcgcgacgagagcatcataaacgaatgggcagacctatacgaactgaaaggaaaaaaagatgaactggttcaagacagaagatgatccgttggccgaagacttcgtgaaggagatcagagccaccataccgtggctgctggcggccgctctagtggttgcaggctactacggcgtcaaaaactacatggccgcgcgtcgcgccgccgcaagcgaggcgcttgtgaacgcgtatacggccgaagagctggaggaggccgtgtcgaagttcggcgggtccgacgccggcggggcgcttaagctgcgcctggccaagaaatacttcgacgcaggccgctatcaggaggcgctcgaccagtacgccgcgctgtccggcgacaaggcgccggacggatttgcggacgtccccgaagtcggcaaggcgcagtgccaggaggctctcggcaactatgccgacgccctcgcagcgtacgaggcgtttgccgaagcaaaccccaacagctatctcgcccttacggcgaagctcggcgccgctcgcgcaatcgcactttctggcgacaaggaaaaggctcttcagcgtctcgccgggataaaggagtccgtaaagggcgacgccctttcggaagccagggttgacgcaactgaagactgcataaaaagacctgtcgcaaagtgagttttacgcgcgaggtcggcaggaccacgcgcgtgatgctagcttctgtcgccgcgttcccgtccgtgttcagaagccgcgactcccgtcgcgactttggagtccaactgtacaagacggggataggcacgcttccggtggttacggtcgtttcgcttttcaccgggatgattctcgcccttcaggtggggcttgaactgcggcggttcaatcaggagatataccttggcgccgcagtaatggtcactctcatacgggagatggcgccgttcagctgcggaatgtgcctcgccgcatgcgtaggttccgccatagcggcggagctgggcacgatggcggtgaacgatgaaatcgcagcgcttgagataatgtccataccgccgatacgctttctctccgcgccgcgcattctggcgttggtgctgatggcgcccgtgctttcgtttttttgctgcgtcgtgggcacgcttggcggcggaatcgtcggcgcaacccagcttggagtgaatttcgagcagtacatggccagcgccatgtccatagcggacgtgaaggatctcacgaccgggcttgtgaaggccgtagtcttcggccttgtgataggcacggtttcggttgcgcagggtctcgccacgagcctgggcgcgacgggcgtcggccgcgcaacgcagcgttcggtgatcatatcgtttctgctgatactcatgctcggctacatgataacgagggtttgctaccaatgagcctggtcgtcttcgagaatgtgaagaagcagttctccggacggaaggttctggacgggctttcgttcaccatcgagaagggcgaagtgctcgcgctcgtcgggccgtcgggcacggggaagtccgtcacgctcaagcatatcgtccgcctccttgagccggactccgggcgcgtgctggtggacggcgtggatgtcgcggcgtgttcgcgccgcgagcttgagtcgatacgccgcagggtgggctatctcttccagagcggtgcgcttcttgcgtggatgaccgtcgaggagaacgtgtctctcccgctgagggaatgcaccgacatgcccgaggatgaaatcgaccggcgggtcgccgccgcgctcgaagcggtcgaactcgccgacgccgccgaaaagtatcctgccgagatatccggcggcatgcagaagcgcgcaggcctcgcacgcgcgattgtccgcgattcggatgtgattttgtacgacgagcctacgagcgggctcgaccccgtgacgtcgattaccattcaccggctcataaggaaactgaaccgcgatcttggcataacttcggtggtggtgacccacgacctgcagggcgcgcttggcttcgccgacaggcttcttctggtgaaggacggaaaagcggtggaatgttccgccccggcggagttcgccgcgtcggaaaatcccgtggtgcgcgagtttctcgcggcaatgaaaggagagttgtaatggcaagaagaaaaggcgatgctttcgccgaattcgtgaccggcgttttcatgctggccgtgctggcgcttctcgtgtactttacgatagtgatatccggcgtcgatcttgttctcggtcgggagtatgttcgcgtggcgatcgcgttcgacggcatcggcggactgaaggatcacgacaatgtcatgtatcgcggaaccaaggtcggaaccgtcgatcgcgtctccctcacgtcgacgaatctcgtcgcgacggtagatatagaccgcaacgtcgttcttcgcacgggctaccgcgcctacgtgcagtcgatgtcgctgctgggcggcaactgcctcgtgctggaggagggcgccggcgagaagctggatcttgcaagcggcaatacgcttcgcggcgaaacgcctaccgactggatgcgcgacgtcgcccagatcgcgaagaatctgagcgatgccacgtcgggcggcgagctgcgcaccatagtgacgaatctttcggtcgtcagcgaaaagatacggcttgtgtcggagcgcatagccgacggcgaaggcactctcggaaggctctcggcagacgacgcgctctacaaggagctggagggccttctgcgtgacgcgcggcaggttctcgacaactaccgcgacaccacgcccataacgacgtttacgtcgcttgccacgggggccctatgacagcgcttgtttttgccgcatcgcttttcttcaccgagccggcgcctctcgacatgccgcgcgccgaggcgtatttcatcgccgagtcggatggttcccgccgtctggaggatagatacgacgtcttcgacctctggctcggccgcgccgtcgacgggcggtggatggacgattccttccgcgtgtttgtgctcgctaccctagacgcgcttccaccggctctgaccgccgcgcaaaccgagacgcgcgtcgactacgaggcccagcgcgtcgcgccggaaaggcggaacgacgaccacctcgccgcgatggtcgatatgctttctccggtagaaccggcgaaagagttcgagcgtccgcgccagaagccgcgcggctaccgggatgtcagatactggcagggtacgaacactgcggcgatcgtctgcacctggctgcccgagaagtccgatgtgtggcgcttcgcctcgtgggagcttgcctacgacgacgactttgccgccatgctggatacgtttcagcgcgagtttgtcgaaaagcgcgaatgggagaagctctccggcgcgaaggccggtgaatccgcggaggcgaaaccgcgtcgccggcgcaaggacgaaggcccgcaggagcgggatcttctgcgccgcgatcttcgccacagcgtcgctgcatacgaatcgtggcacatgaccgacgcagacgagttttcggtaatcgactgcctgccggcgcgcgggttcgtaacgtcccttacaaacgacctgcgcataatgcggacgaagtacgccgaaaccgtcccttcgccgatcaacgtttcgaacactctgtcggtagcgcgcatctactcgaaccgcgaagactatcttgaggcggctggcgacgacatgcagtggagcgcggcgtactggaatcccggccggcgcgaactcgtcgcctaccttcccgtgcagggcgaacagcagcttctccgcacgatccgccacgaggcgttccaccagtatctgtcgtacgcgtgttccatgatgtcggccgcaccatggttcaacgagggctacgcgcagtatttcgaggatgtggacgacgccgattggcgaatcgcagttacggcggaagacctcaacaggcttgaggatatgctgctgccgcttgtattgatggactacggccagttctacgacggaaccgacgccgagcgcaggctgaaataccgccttgcgtggtcgatcgcattcttcatcgagaatggcgcgccgaaggtgaggttccgtccgttcgagaacctcaagaaagactacatcgatgcgctgctcaaaacccgggacatgcgaaaggcgaccggggcggcgttcggttcgaccgacaagttcaagaactttgtgtcggaatggaagaagttctggttgagaagaggcctgtaggccggctcgcgccaagccctacaggcgcgttgcatctcgggaacgtccgcacgttcatggttgcgtggctcggcgccagaagccgcggcggacgcgtaataatgcgcatggaagacctcgaccaccccaaggacaagcccggcgcggccgaaggtgcgattgaagacctgcgctggctcggattcgactgggacgaagaatacgtgcagtcgcggcgcaaggacttctaccgcgacgcgctcgacgcgctcaagcgcaagggtctcgtctatccgtgcgtctgttcgcggcgcgacgtcgaaagcgcgcagtctgcgccgcattccggcgaacagcttcactaccccggcacatgtcgcggacgtttcgccacatggtccgaagcattggcgttctcgggccgcgcgccatgttggcgttttcgcgtcgaagcggacgaacgcgtggagttcgacgacatgtttgcgggccgatattcgcagaatgtggcggagaaactgggcgactttcctcttgcgcgggacgaaggcggcgcaggctacacgcttgccgccgttgtggacgatgccgcgatgggcgtcaccgaggtggttcgcggcgacgaccttctcgccgcaactcctgcgcagattctcattcagcgcgcgcttggcctgccgatgccaagatactgccatgttccgctggtggtcggccccgacggacgccgcctcgcgaagcgccacggcgatacgcgtgttgcacactacagggaggcagggacgagacccggcgcgattctagggatgctggccgcgagctgcggctgggccgaggccggtgaagaggtatcgttggccgaccttctgccgcgtttttccctttcgacgattccacacgatccattcgtcgccgcaaacgcctttccacccggtgcaaacgcgattcctacctagtgcaaatgcctttgtcacccggtggaaaacggcgactgtcccctgtcgatgtaaacaaaaagcccggcgaaccgggctgcagtctcaaaacgacttcggcatatagccttgttgtgataagatgctaggaacatgatataatatttcttggacaacgtcaagagggacaccaaaatgaaaaatactttaggcattgatctcggcaccaactctttgggttgggccatattggataacataaccggagacatcctagataagggtgtcgtagttttcccagaaggtatagacgcggcgaacgatacccttgagactccagctgcgattaggcgtgctgctagaatgggtcgcagaatgaagttccgcagaaagatgcggaaatgggtgttgctgaaaattctgattgctaacggcatgtgccctatgtcggaggaagaacttgaatcgtggcgaaagcgaggcatctatcccgttgcgaacaagcatttcatagaatggcttaagtcgaccgacacggcaaatccatatatggacagagctactgctgccagaggaaaggttgcccctcttgtgcttgggcgcgctttgtatcacatagcgcaaaggcgcggcttcaagagttcccgcaaagatgcgcaggaagactcggattcggcaaagtccctcggaaatgtcaagagcgacattctcgctttgacaaaggaaatttctgacgcgggttgcaagacgcttggacagtactttgccaaacggatcgaagaggaaaagggaagcgttgtcaagacgcgagtgcgaaagcggtatacagggcgcgtcgagcattatatgacggagttcgcggtgatcatggcggcgcaaggaattgcccatgacagcaaactctacaaagacttatataatgcgatcttctttcagcgtccgctccgctcacaaaagcatcttgtcgggaaatgtcccttggaacatcaatctgcccgtgcgcagattggccacccattgttcgaagagttccgcatgcgctcattcgtcaacaatctctccttcgaaactgccgatggagaaaagattcttttgacaaacgaagagcgcgagatggcgtgtactgcgttcttgaaagaatcgccgactatgaagttcagcgcaatctccaaactcttcaagaagaagatgcgggacgaacggcttgagtttcactactacagcggcgacgattcagtgtctacttgctgcacccgcgcaaagataaagaatggatttgggtctctcgcatatgacgagcaaatggtgtttgatgcgttgacattctttgatgatgatgaaaaactgcgcgcatggttcaccaggcattatccggaattgccgaaagaaaatgtggagaagctttgcaaaatacatccaaaggaggggaatgcgcagtattcgctaaaggcaataaagaagattcttcggtttctgcgaaaagggcatgatttgttcacggcgagactccttgcgaaaatgccagatgtcattccgcagtttgccgagcacgaggatgagatagttttgcacctcaaggaaatgcagataaaatgcaacgaacttcgtgatgccgcgcgaagtatgcgcaccgaaacgccaccgcctcgacttatagacatgtaccgcgattatttcctcacgcactggggcgtggtggatgaagagtggaataaactctatttgcggggagatgcggcatattctgcagaccggaaatatccctatcggttgccgaaggttgcgcttggaatgattcgcaatccgcttgtgcagcggtcattaacgacattgcgccgcgtagtgaattatttgcgcgaccatggcaagattgacggcgagactactattcgcatagagcttgcgaggggcgtgaatgatttcgcgacacgccatgcgattcagttgtggcagaaggatcgcgaagccgaacgggcgaaggctcgagcagaactcggcgatgcggctacggaggaaatgattgatagatatattctctgggaagagcaagggcgccagtgcctttatacaggcaaagccatatcgttcagagagctgaaagagggtaatgcctttgacgtagaacatacgataccgcgttccatgtccggcgatgattcaatggccaacaagacgctttgcgacgctgtctataacagacaggtcaaaaggggaatggtgcctagcgactgcccgaattacgagagcgagatatatgcacgcctcgctccttggcgggagaaggttgaagatcttgcgaagttgtccagatcgagaaacaattccgcaaagatggcgacggatccgcaagccaaggccaatgcgcgcataaaggcaattcgcgtaaaattggagctgtcttactggcgagataagttgaagaggtttgagatcgcatcggacagacttgccgagcctgcggaaggtctttccggcttcaagcgcaggcagttggtggacaccggtatcatgtgctcgcacgctgttgatctgttgagaagcgtatatccaagtgtctattctgtcaatggtgcggctgttgcatttgcgcgaaaagcgtggggcattcaaacggacggcgcaaaagaccgcaatgagcatactcaccacgccaaggatgcaatggtaatcgccgcgcttacgccaggaagatttaacgctatttgcgctgcattgaaggatgatggcgcattgtccggcattcggccctgtgatgtctgcaagccgccatatgaaggtttttcggagaaggtaagaaaggcgaccgaagagattcttgtaaagcatgtgttgaggcagacgacactcaggcaaagctctaaacgcaatgctctcgctaaggcgcatccgcaaaagggcgatccagccaaggtcgtgaaatatgtcaacagcagaggtgacactattcgaggcccgttgcacaaggatacgttctacgggtgcatagcaaggccagaaagcggagaaaaggcatttgtcgtccgtaagccgctggttggacctgtcgcaacaatagagggcttcgccgacaagatagtggatcctgcgataagggatatcgtcaatgttgcaattgagacgcttaagtcatccggagtcaagaatgttgagccaggctacattaagatgccttctggagtgccgataaataaggtgcgcatctatgcgcatacaacaagtccgaaagagttgcgtagccatgcaatggtttctgacaagccatataaaacaccgtattatgttactgcagcagaaggttccaacttcaggcttggagtgtttttgtccaatggcaagttgcttgtcaggccagacaactctctagactgggcgcagaaccacaagaagccgaattatgtgcctttggatcggcaagatggtttcgtcggttacatagttcctggcgcaatggcaattgcggcagacaacggagacatagagtcggtgagaaagctcggaagggcagaactctcaaagaggctctacaaggttgtcaagtttgatagtacagggcgaattacatttcgcagacatcttgaggccagagccagtgtcgtgctcgcaaaagatctgacaattgcgggcaaacataaggcaggcgaatcgcagatagacttcgagaagccgcatgagctattgctgttaagccccggcgtctactttgccaaaatgctttttgagggaatccacttcaagatgcagctggatggctccatcatgttcctcaaatgattgcgcgaacgttatgcttcacacgcattggcaagctgtcggtgaaatacgatcagtttgtttggtgtccctctgatggcgagcgtaagacaatgccaattgaggatattggaattgtcattttggagtcggataagatagatatcaccacttcggcattgcaatctcttgcgaagcaaaatgttgcggttgtcttgtgcgacaaggcgcatatgccgtccgcgcagttattgccgtttgccgctaatgcgacagcgtcagagtctacggaggcgcaactttctgcgacagatgcagttcaaggcagattgtggcggcagattgttcgccagaagattcgcaatcaagcgatgttgatgcagagacttggtgccgataacttcaagcgactgctctcattggccgatgaagtaaagaatggagatccgcaaaattgtgaagcgcaggcggcgcgcatttatttccaaatgctaggaccagagggctttgtccgtgacagagagggcgattggccaaatgcaccgctcaattacggctatgcgatactgcgagcggctgtagcgagggcgctagtaggttctggacttgtatgctttcatggcattcatcatcataacaggtacaatgcgtttgcattggcggatgatgttatggagccttatcgaccatttgtcgatcaatacgtcttgggcaaagtaaggccattcgatgttccgttgaaggaattgtcgcgagagatgaaggcgcggctacttgagatgctgacttgcgatgttaggctgggagaagtgcgcagaccgttgatggtggcattatcctacactacggcttctcttgccgcatattacaggaaagaagtcgaggaattgtctttaccgaggttgaattgatgttgtgttctcaagaggcaataaacgggtataagcttatgtggctttatgtcatgtttgatctgccggtagagacaaagattcagcgtaagcgtgctgcacaattccgcaagaacctgctgaaggatggctttggcatgcatcagttttctgtttacatacggcactgcgccagttatggttctgctgatgttcacatagagagagtcaagcgtattatcccagacgaagggtcggtttctattttgaaagtaacagataaacaatttgagaacacgattcacattgttggcaaaaaggcaaagccttcaccaacgacgcccttacagctagagtttttctagaaaaaaaaagagcgaagccaattttcggcttcgctctcatgcctttttgtggtagtgaaatatataggattgtgctgtcaataaaggacaagattggcccaatattgcatcacattccaattaagcatcaaatcacaactttggacgaactttacgaaaatgatgggagattgcatcacattccaattaagcatcaaatcacaacttggagtgcgtttctgcgaatctcgactacattgcatcacattccaattaagcatcaaatcacaactagtttggagctcatgacgaaatatcgcaattgcatcacattccaattaagcatcaaatcacaacaaaactcttgtaaatatgtgtgataaatgaattgcatcacattccaattaagtatcaaatcacaacaggttcgagagatactggttcttgacctgattgcatcacattccaattaagcatcaaatcacaacgggcatgggctggtggttggcgtcgaataattgcatcacattccaattaagcatcaaatcacaacgaatgagcttgtgtttttggcttagagtcattgcatcacattccaattaagcatcaaatcacaaccgctactatatggcaaggctccgcaagtaattgcatcacattccaattaagcatcaaatcacaactgaatgtagccaaaactgttgcaggtgcaattgcatcacattccaattaagcatcaaatcacaaccgaaaggctgcctacgatcttgtcttccaaattgcatcacattccaattaagcattttcaaagagcaacacatgagtattatatcataatttgaaactgggtgaatgccccatctgggagcgcgggccgcgactaaggaggggtttggatcttccatctgagcgcgcgagcagccgcccttggaccggcggaatttggtatactatacgccatcggttcgcgaggcggattcgccgcgcaagacacaggggaaacgacatggcacgaaagcgtggagagcaggcaaaaggcggagtttcgcacggcaagtgcgacgcgcacgccgtccttgcaggcacatacaaaggcgaccagttgacgcgctggcgcggatggtacaactacccgatttcggatgaggaagtatctcacgcagagacgcagagacgcggagaaaatgaacttgtcacaaattgtgaccagccattgcgtgccagagaccccatggtacacgcgaatgtaatcaatgacgacattcacagattcaaggaggttgcatgagtgttggcgagggtagtcttgtcgtcatgccaaatgagatggctttgtcagaaaacgacgacttcattcgctcgtgcatacttacaatacgcggtgtgcaggtgatgcttgatcgggacttggcgatgttgtacggggttgatgcaaaacggataaatgagcaagttaagcgcaacatcgagcgtttcccggaagattttatgtttcgcctgactaaggatgaatgtttaaggtcgcaaattgcgaccttaaacatggagcgaggaaagcatttgaaatatatgccctatgcctttactgaaagtggtgttgcaatgctcagtgggatcttgcgatcctcaattgccttgcgcgtgtctcggaaattgagcgtatgcaattggaggagaagacatctcggcagtccgaccagcgacgcaacgaggagcggttcgacacgattttcagggctatggacggcggtgacttcccgccgcagaaggtgttcttcgagggcaggcactatgatgcatattccttcgcgaagaaacttgtgcgcaaggcggcaaagaaaatcgtccttgtcgatggctatagcgacgaggttacgctggatattctttcgcagaagaaatgcggcgtagaggttcttgttgcgacttcgcagaagatgatcgacaggcatttgacttcggtcgccgtagcaaagttcaacaagcagaacccgacgctgaaggtcaaggcggccggcgcgttccatgaccgtttcatgattctggacggcaaggagctgtatcacttcggtgcatcgctgaaagaccttgggcgccaatactgcgcagtgtcgaagatggatgcgatgttcatgccgtcgattcttgagcggatatgatataatcagcggccatgggccccatggcggattcgtatggcggcatgtgtaatttccccctaagggtaagcgtctgaaaccctaagggtgaagcgacctaaccctaagggtgatcaataaaaaccctaagggtaaagtgctcgcacccttagggtgaataatcgcgacccctagggggaatcggtcgggggggtgaaaccagggattcggggacagtccccggtccgccgcggcggcgtgaggtcacgccgccctaccaagcgaactagtgcctgtccccggtttttgaaactttcatatcagcccggcggcggtacatcgcgcgcgcgacgtcgcgcgcggcctcgacgagttcgggataaggggcgtcggtgacggtgacaaagccgatctggtagttctcgccgtcgaagcgtccggtcagcggctggtcgcgccactggaaccagtgcgcgccgacgtagcgcggatggtccaggcaggcgttgacgaaatcgcggtagcatgcggcgcgctccgcctggtcgcgcgtggcgacgagcccagtgtggaagagacccctgtcgagcgcgccgaagtggaactcgcccacgatcatcggcttgtcctccgcagcaggcggaagatcgcgcgaaggctcgcggctgtagatgttgacgctcacgacgtcgcaatgccgggcgcacgcctcgtagatcgcctcgcggccccaggcgattcggcaaccgaggtacagatggttgggcagctcctcccgcagcactcgccgcacggtgctgaaataccgctccgccacgtctttcatgcgcggctcgtcgttccacgagagttcattgtccacgaatacccccacgcaccacggatcgtcccgcatcgtcttcgccatgtctttcgcccgtttgcgaagcgtcgcttcgaatttcggattgaacggatcgggcagcgccccccaccagcccgtcgagccttcgagtcgcggcgtgccgtacgttccgagctggacggtgtacggcgtcctgcgcataccgtagatttcggggttgctccagttggcgatcgtgttgagtccccatgcgcgcatcctcgcgtgcgtcagttccgcgccgatgcgcttccagtcgggtccgtacttgcgccgtgcgttcgcgcggtggaagtcgaacgtgtcgaacggaagatgctccttttccttgtagaacccgtgcgcggccggtcggtcgatcctcccccagaattccccgaagtacgggtcgtccttcgcggggagccacgaaaaatacctctcgcgaaacccaacgcccgtggcgcccccatgcccgacgcagtcgacgccgtgagagaagaagaggaatccgtcgggatcgacaagccaccacttgccgcccaccttctctgtccggaagaaccccgtcgcctttagccggggccctcccgcccaaccgccaaacctgtcggcatcgggaatcggacacgaattcccgcccagccatgcgtcctcggccttgcgggacgcctcaagctcttcgtcgtcgtgtatctttcccgtccagtcgtcatgcgcgaactgcccgtacctgtccacgaacggcagaaattcgcgggcagacagcgtcttctgcctcacgcacgaatgcgttgccgcgacccgtcggacgctgaagccttcaactacgcctctctggaacacgaagatgtggaacgagcgtacgcggcgcaggtcgaacgtcgagccttcgccgggtgccttggggcaacccctcatgccggcaagcgaaagcggcgcgtcgagagcccatggcatgttacggatatccacgcatatctcgtccgccgcgtgcggcggcagcgtcaccgctcctccgggcgtctgcccttgcactgcgacacctttcacgctcagattcacgacgacggccttgtcggtggtgttgcttaccgctatggagactcgcccatattgtgaaaggtcgcattcgccgttggcaaagtccatgcgaactccaggccagcggtattccgtgccggtttcgacgcccatcgatccgtcgggcagcggcgcgatgacggaatcgggctgcgcatggagcgcggttgcggccgacggccacagcacaacggcgtctgacgccgccgcgcacgcgaccgggagcgcggatgccaagatgaatgcaagcctgtgcaataaactcctctttcctagtgaactcagcgcacgatgatcatcaagccatcgcgaatgtcagcaccgtcaggaccgatgaccgggaatgtcgtgtagttgtagggcgcggttgtagattgcggcacataggccttcttttcgacgaagtcccacagaacgacaaggccgttcgagagcttcaccggcctgtagttgcggaccagctgcatgttgctgccgtcggcatcgccctgccagagtttgaggaagtagaaccgcgatgcggccggggagatcggcgtcccggcattgctgtcgttcttggcgaagagaaagagattcctgccagtatcgacattggtggaaagtgtccgggacgagtagagcgtctccgttccggtggcgtcgtcgatggccgtgaaggtctgagagctgacggcgaacgagacgcgcgcgtgggtcgtgtcgccggagttcagcttgtagacgtccggatcagacgagttcgcggcgaccgtatagggatcgttgtttttcggacggtaggatgtgccgtagccaagcagtgccgtgttcccccacgcatggtaccacataaagcatcgggacacatcatcgctgctgccgccataagagccaaggaagcattcttccacgtctttgcgtttctgcatgctcgtctccttgaactcggcggttgtcgcggccttgccgatgacgcccgtgtcgatgaacacctttccgtcggtctcgacgtaatcgacatagcagtccagtttcgtcgcttcctcagggaagataatcttgcccacgcgcgacgcgggaatgtcgggcgacggacgatagatggccttcgtcacttcgtcgtagagcatccccttgccatcaacgaggcatggcttgaagtcgcgtacgagcgcgccgtcctgccagatctggaggccgtagcacctcgcggcagaacgccagcgccagtggctcgacgagaagaggcagaggttgttgccggtatcgacgtcgccggccgtggtcgcgttcaagacctgctcgccgttccattccatcgtctgtgacccatccgcgaaggtcacatcgaacgaattcgtaacgccgacggtcgcggggacattggcggagtcgtttttcagattgatttctccgctgttgccgtactgcgacagaagcaccgcattggattcatggagcatgctgaaccatgcgttcgaatccttgaggttcctcgccccgagatacgccctcttctgacgatagaacacggcggccgtgttttccaaatagcgatggtgctcgcgatcgtactcgcgcatcttgccagttccgttttcatcttcggccgtccacatcatcacgcccttggcacgcgtcccgctgcgcgcggggacgccagtgtcaagcgtgttgttgccgtcggactcgatgtattcgacgaaaacgacttctttcggcttgaccgactgccgatggatattgttgaaggcgaacggtgtgccgagcgagtagaagatgcgctttgagacgtcgtcgtagagtccggcgacgccgttcttgaggcacggcttgaagtcgcgcacgagtgctccgttctgccagattttcagcccgtaaagacgcgaggcggagaatgcatttggcgttccattgttgtttcttgcgaagagatagagattctgcttcgtatccacgctggttgagatggttttccttgaaacgagattggttgcgcctgtgtcgtcgtttatggtggagaatgtctgaagaccggcctcgaaagaaacgagggcgtgcgtcgtgtcgccgtaagagagcttgtagacgtttgcgctggactgcgaagcggcgccgtccggattggtcacatctgggcgccagtaggtgttttcatatccaagaccgagggtgtcgccatttgcctggaaccacatatagaatcgtgaatttgaagtgctgcccagtgctccaagaaggcaaaactcattgctgacggttttgaggcacgtctccttgaactcggccgttgttccggccttggcagtgatgcctgtgtcaatgtaagcgggaagctgtccgtcggcctgcgcggccactccctgcgactccacgtagtcgataaactcgtcgggaacttcgctgttctcgtcgcagatgagatcggtgccggacccagagtagaagatggtgtcggaaacggcatcgtagaggccggcgcgaccatccttgtccatgcagggatagaagtcgcgcttgagctccatgtcgccgccgtcctttggaccctgccagattttgagcccgtagcagcgcgacttggacttgccgttgaatgtgccgtccttctggttgttggcgaagacatagaggcttctcccggtgtcgaggcccgcgacggttttgctccatccgctatatccgtcgatcgcgatggagccagtgctttgcctcgtggcgtttgtcgcggagaactcggacgtgacggtgtagatgcggttcttctcaaaccgggtattccacgatgagctgctcaacgtaacggttgcgttcgctccctgcgacagcgttatttcgcctttatcattcaggcagtagcacatgtaaaaccgggtgccggtttcccagttgccacatgagacgaaaccgctgtcggcgaggttcatccattcgaccttggcctcgatcttggtgttccagcggcctgtgatgcctgtatcgacgtattggttacccgtcgactcgacatagctcacccacttgtcgggctgctctgcgagggctgctgttgcaacaagcgccagtgcaaacgcgccggcgaaacgacttgagagatgagaacctttcatctggtcagtacctttcctgttggtggataataacaaggctattatagcattcagccagtggcgcgtcaatgtcagaaatggaacaggggtatcatatttgcaccatcgccgccggtcacttgttcctgaacgccattggcgtgaggccgcaatcggcgcgaagtgcggagccgaggtgcgaggcggacgagaagccgcacatgcgcgctacatactctaccttgttgttcgagtcggtgagaagcctcttggcacgcatcagccgctggcgttgcagttcggcgcttgcggaatgcccaagctcggccgtgatgcgccggttgagcgtattgcgcgagacgccgagaacctgtgccgcactttcgacattcacgccggaccgcaagccggagacgaaaagttcaatggccgcgcaaacgagcggatcggtagcgacagtggcgtcggtcgaacgccgctctatgatgcgcttcggcggcagctcgacagcctttgaaggcatcggttcgccgtccatcaggcgctgcagcagggccgccgcctcgtatgcgccgcgccccatatccgtatcgacagctgttattggcacaggctggttctcgagaagtacgcgatcctcccctccggcgatgatgccgaagtcctccggtacacgtatgccgaggcgctttgctgccgtgaggagcagcacggcctcgccctgcgagtaggtcagtgcgccgagaggtttggcggcgttggcgaacttgctttcgagccagcgcgagacggcgccccagtcgttccagcgcaccttggggcagtcgagcgaaaacacccaccgttcggcggcggtcttttcggagagccctcgccaaagcctctcgtggacgttcccccaatcaatggagaaaaagacgaggcttctgtagttgcgctcgaggaaatgctccgccgcgaggcgcgcgtcggcaacatggtcgcaggagacgcgtgcgcaagggaagttgggacaggcgaacgtaaggtccacaatcggtatttcgagactggagaggtggtgaaggaacgctagttcgcgcttgtcgccgcgaatcgtggctatgacgccgtcgccgatccagtcgaacggatgggcgagccccatgcgatcctggaacatgagatgccaaccgtgttcgcgagcgaagcgcgacacgccgtcaatgcggctcgcgaccggcgacgaaatcatcgccagaacgcttctgccgccggtggacctatgttctccctttcgtgtcatctttccatatggcattataccatatttgacggcttgactgcctgcatgccgcgcggagcgacttcggcgggcgaggacacggcacacccgatttatggtataatctcaacatgaaaagaattctgcttttattggggctgggcctttcgctcgcgtttcttgcggcggcggggcgcgacgttacggatttcacggacggctgggagttctccagcgacaagtccaactggcgcgcggttgatgttccgcacgactgggcgatcgaagggccattcgacccgaacggcgatcctcacacgggaaaacttccgtggaaaggcgtgggctggtaccgcaagcagatagtcg

SEQ ID NO: 445 - DNA, 18687 bp, synthetic construct
  misc_feature 1..18687: note = Synthetic
  source 1..18687: mol_type = other DNA
aatatccacgaacgaagaccatacccgtcaatcccatgttcgtgcagcctgcgaagcaggcgtgttcgtgtgcggccttgggccgcattcgtgtcttggcgggcggcggaacccgcagggttgaagcagagacttgacgacgggcaggcgaagcctgaggcccggcggcaaggcgatggttcaaatcgcgcatcgcgcgattcgctgcccggccaaggttcgtgctcgcgcgccagcgccaagcaaacatgccggcaatttggtagaatagccgcatggcgaacgcaccggtaacatcgataaccctgctaaagagtctcgcgagcggaacagacaacgcccgctgggcggagttcttccgcatatacgaagagcccatgcggtcgtttctctcggcgcgctttccgtcggtcgacgcagacgacgcgatacaggagacgatggtcgcgctcatgcggcgcatgccggactaccactacacgcccgacagcgacggacacttccacaactacctcacgggcatactcaagcacaaggcggaggacgccctgagacgcgaggcgcgagagagcggcaagcgcgacaagctgaaagagcgcggcgcggcggatgcgccgcgcgaggatcccgacgactggaagctcgccgcgatgaacgcggcgctcgagcagctgctctcagacgaatctgtcaacgcacgcgcgcgcgaagtattccgccacgtcgcgctgatgcacgagccgcccgccgaagtcgccgcggcgttcggcatctcgcgaacgaacgtcgaccagataaagcgccgcatggtccagcggctctccgtcctcgtctcgtcaatgaccgcagaggaataacctatctgcccctgccactttcgtggacaaacttcgatgcgatatcctgggaaaagaattcgcgcgggttcgtgcctcggggaacgacgacttccttcccctcccaaccaatccacgacggcacaagcctgccggtcgtctcgtccggcgtcgttccgtatacgaccgtctcgggcgagaggacgaacttggcgttgaacccaagtttgcaggccgcgaacaccttgctgactttatggccaccggggaacagcggcatcgaccgcaccgtcgcgggaattgcgagtattccgtattcgaattcgccccagcggcggtgcaggagattgcggcccagcgcaacaaccggtcgctcgccaaacttatccgggacaaagacatcgcggccttcgccgaggaacataagggcgtttgcaccatcctccccctcttcggaccagaggaagtcgcccgtaatgtggaggcgacggtggagttggtcgtcgcaaaggaacagatgtgtgctgaatagcccgtctaccggcagggcatgggacttcagcgatattttcctcctcccatgtgttacggtgtttgttattcccccggaaaccttgacagtgctccaggatatctcgacaggaaccccgactgttccgccgtagagcgcaggtgcgcacccgtcgaaggcgtcagccgcgattcgcggcgagcggtagccttcgaaaaccaccagattgagctttggcgactcggcaaaggcccttgccgcgatgttggtgacatgggacttgatatgcaccgtctcgagctccttcgaccgattgaacgcctcaggcggaatctcccccgcacttccgtcgacatacagatagcggattcccctgatgtccctgatgcgcttgcccgccacttcacttggcaggccatccggacgttcctccacggtaccgtagtacgtggcttcgtccggaccagtcttcgccagcagaagtttcgcgccgggctcgggctgggcgatgatcagcttctccccatgaatcggccccttagagcagcagtcagcgatccagccctggaattccggcgacgaatactgggcgttccaccagttgttgccgtctggatagtagttaaggcgtacatccgcgccggccttcctgtagacttccaccattgtgttgaccttgtcgtcgattttatgatactcctccgacacggcgaaccaccagcggcccggacggtatctgtctaccgccggcacaagaaactgactcgacggatatgtcgcgcagacgccggcgtagcgcccgggatattcgcgcatcatcgaaagcgccgcggacgccccggagccaagccccgtaagcacaatggcgtttggatcgatcgttccccttcccttcgccacgagttcccgctgcagctcgaagactaggtccgcgtacatccgaaggagatccagattggcaggcggatcgccagagggagggtttgagcaaaacgaatagcgatgtggatagtgaagatacgacgcccgcgtggcgaaatctggcggcatgatcgccagcagatggcagggatgagcaaaaacgaaggaaggatctcggacggcatcgaagacgccggtctgcctgaacatcttcttgagatcggtcccttgttcgccgcttcccgcgatgtagacgacaagcggcatcggacctctccccggggccggagagaacaggaacggtatcttctccacggtgcaagtgttgcagcttagcacgtcgttcgttttgctctcccagcattcgaggcgctttttgtatgacgaataagccggatccccctccttcgggaacccgcggtggaaccagcccgtacggaagcgatacttgcgcgcgagggccttgagttcatcgtcttcctcgtatggagatatgcggccaaggcacccatagccgggcgtaaccccgacctcgggcatcttgaggggcccgtgcaagtcgaagaaccggaagaggtcgccgctcctttcgtaccacgtcgagacgaagtccaggtaattgtcgccgccgtgcacgatctcgttctgcacaatctcgcatggcagcttcgaaaggtcgagaagcgcgttcgtggtccgctggctgaccacatggggcgggctgttccgaacggaattccagaaccccttgaccggcatgggcgcacgcttcggcggaacgcgccaatgcccgggcttggcgcccttgcgtggcttgaccacggaagacgcgcccttgccggcagattcagtcgtggtggattccccgtcatcgccagagcgaaaacgatagcatcccggacagacgggccacggcgaggacagctggtagccatatccgtcgagatcgcggcagacgaacaccgcagcgccggactcgccgaacctaagtccgcacggatcctcccagtcctccgaaagcgcgggattcgggtggaagtcgccattggcgtagtctgcgaaaaatccctcgtccgcaaggcaatagcagccgaacttgtcgccttcgttcgcgccttcctgcagcatggcgcttccgtagctgaggcagttcagcatgaagagccgtgagcccgcagagttctcgaataccgcctcgtcgttcagttctccacgacagcggatgaacgtgcagtgcacaaccttggggtgctggccgtcgagcgattcggacgacatgattgcgccgccctgtttcgccgtgcagtcgacgaaaagacatgaaacgacgtcgcggcctccgtagatagcgccgcctacgcctccgttggaaatctcggaaccgcagctgcggaactcgcagcgtgaaacatcgccaaccccggctatcgcgccgccgccgtcaaacgcgcggcaatcaatgaacaggcactcgactacgtatccgcagtcgctcagtgcgccgccaatgcgcgctcggcaacgctcgaaaccgcagccctcgacgattccacacccctgcaccgcgccgccctcgcccgcccaggcatcggcggacgaaccacagccaatgaaatcgcagtcctttacacgcgtgccctcgacgcttgcgaactcaagccgcccctggttgacaaaggtcaggtttctgaagaccgactccctgccgcagcccttgatcgctacagcccgtccgtccctacgctcgccatcgccgccgattacaatggtgccgcttgggcagtcgcccgcatcaagcgttatcctgcgtccgccacagtcgaggaggcactttgcgtcctggttccagatatcgtcttcaccgatcttgatcggcgcacagtccgccgcgaagacgacatcgaggtcctgcaccagaaggcccttcccgtccgacgccttagcaactgcgtcgagaagctcggccttgcctctcaccgtcgccgacacgccgaatgcgtctgccgacagaaacagggccgccgcaataatcagacacgaaagaaaaaacttgctttgcataatgtgttgcgtgggatgttatctatcaaagctacatgctatctccttgggcatttccataccgcgacaattatatcaaaaaacgccgcgcggcggatttaccgcgcgcggcccaagtcgctgaagacgacttttgcctcaatcgcatctgggggtatcttcagcgacttcgcgtcggcgaccgcgagccgcctgtcggcagcgggatctttaacgacaagctcgccaagcgccatcggacgcctgtcttcaaggactattgtaacgacataatatccagccgccggtaatcccagccaagcaaccgccgccccatgtggcgaaccgtctctcgacgccaccgccccttctcgtcctgaagccagcctgcaggcaaaggcattgtcccttggagctatacttatttgtccccggtatccttgtatatgtcgtatccaacggtcttgccaaggatcctgagcgcctcgcgttcatgcctggcgacgtccccctctgtatgcgcgagcatgtttgtcaacgccgttacatcggcacaccccaacatcaccatgtcggcctggcgcacaaacaaaagtgctcgcacaccgcaagcaccgcggctattgctgttttctgcctttagcccaacctgcaatagccaaacatcgcacaaaataaaaatgcccggcgaaccgggctgcagtctcaaaacgacttcggcatatagccttgttgtgataagatgcgagaatatgatataatatttccataaactcgtcaatggggttcgacaaatgaaaacaactcttggacttgacctcggcaccaattcactgggttgggccgtacttgatgacataacgggtgacatcatcaacaagggtgtcgtagtgtttcccgaaggcattgacgccgccagcgacacactagagacgccagccgccgtccgacgcgccgcgcgaatggcacgtcgcatgaaatttcgccgcaaactccgcaaatggaaactgctcgagattctgagcaggaacggaatgagtcccatctctggacaagaactcgagacgtggaagaaatctggcatctatccaatcgagaacaaggagtttgtcagctggctgaagtcaaccgattcgtctaatccttacgcagaccgcgcagccgccgcatccgggaaggtctcgccgctcatcctcggacgtgcgctttaccacatcgcccaacgtcgtggattcaagagttctcgcaaagacgcccaggccgacggcacagaagacaaagacctcggcgccgtcaagggcgacatcatcgcactgacgaatgaaatcgccgacgccggatgccgcacactcgggcagtattttgcaaagcgcatagagtcggaacgcgacaacatctgtaagacgcgcatacgcaaacgctacaccggtcgcatcgagcactacatggcggagtttgccgtcatcatggaagcgcaaggaatcgcacatgacagccccctttacaaagatctctacaaggcgatattccttcagcgtccgttacgctcccagaagcatctggtcgggccatgcccgctggagcacggaaaccccagagcgcagattgggcatcccgcgttcgaggaatttcgcatgcgagcgttcgtaaacaacctatcattccgcaacaccgtcacagatgagcgcgtcccgctaacagcagaagaccgcgaacttgcctgttctgcgttcatgaaggaatcctcgacgatcaagttcagcgctatatcaaagcttttcaagaaaaagttcaaaagcgagcccttgaagttccaccactatgcaagcgacgacaccgtggccgcctgttccacgcggtgcaagatcaagagcgggttcggcgacatcccctatgaagagcaaaaggtcttcgatgcgctgacgttcttcgacgacgacgaaaagctcgctgggtggttcaggcgccactatcccgcattgacggacgaacaagtggagcggcttgtcaaaatccacccaaaggaaggcaacgcacagtattcgctaaaggcgataaacaagatactgcccttccttcgcaaaggccacaacctcttcacggcacgactgctggcaaagatgccagacgtgataccgcaatttgcggaacatgaagacgaaatcgtcctgcacataaaggagatggagtccaagtgccgcgccgcaagagaagcgatgcggaacgagacaatccgccaagagggaaatcctccaagactgatggaccttttacgcgaatacttcctgacggaatggaatgtagacgacaacgcatggaacaagctctatctacatggcgattcacaatacgaagtggatccacaacatcccgaccgcatacccgccgtcgccctcggcatgatacgcaacccgctcgtccagcgctcaatgacggcgttgcgccgtctcgtcaactatctccgcgaccatggaaagatagatggcgacacaacaatcaggatcgagcttgcgcgcggcgtgaacgactatgcaacgcgccacgcgatccagctgtggcaaaaagaccgggcggcactgcgagacaaggcgcgcacggaacttggcgccaaagccaccgaagatcttgtcgaccgctacatactttgggaggagcaagggcgcatgtgcctctacacaggcaagtcgatttcgctgactgaactgctcgcaggcaattcattcgacatcgaacacacgataccacgctcgatgtctggcgacgactctctcgccaacaaaaccctctgcgacgcaaagtataaccgcgaagtaaagaaaggcatggtgcccacggactgcccgaactacgaatctgagatctattcgcggcttgcgccatggcgcgagaaggtcgaagaactcgaaagggcataccgttcgagaaacaatgcggcaagatcagccacggatccgcagcagcgcgcaaacgcccgcatcaaggcaatacggacacgacttgagcttacatactggaaggacaagctaaagaggtttgagacaacatccgaaaagctcgccgatccgacaaacggtctttccggcttcaaacgtcgccagcttgtagacaccggcatcatgagctctcacgcagtggaactccttcgcagcgtctatccaagcgtctattcggtaaatggtgcggcaacggcctttgcaagaaaagcatggggcatccagggcgacgaagccaaagaccgatcggagcacacgcaccacgccaaagacgcgatggtgatcgccgcgctcacgccgtcgcgcttcaatgccatatgcaccgcactcaaagacgacggcagatcagcggacatgcgtccttgcgatgtctgcaagccgccttacgacggctttgccgagaaagtcaggaaagcgacggaagagatattggtcaagcacgtcctgcggcagacgaccatgcggcagagctcaaagcaaaacgcgcttgcaaaggcacatccactgaagtccaatccatccaagacggtgaagttcgtgaagagccagggagacaccgtacgtggcgctcttcacaaagacaccttctacggctgcatagcaaaaccggagagtggggaaaaggcgttcgtagtccgcaagccacttgtaggcccgatcgcggcaatcgaggcgctttcagacaagattgtcgaccctgccattaaatcaattgtcgggtcttctctggcagatctgaagacaaaaggggtaaagacgcttgagcccggcatgatcaaaatgccgtctggcgttcctatcaacaaggtcaggatttttgcccacacgacaagcccaatgcagctcaagaaccatgcctcgccgtcgaacaaagagtacaagacaccatactacgtgacagcgtcggagggatcaaacttccgcctcggtgttttcgagattgacggcaagctgtccgtcaagcccgacaacgtgcttgattgggcgcaaaaccacaagctgccagactatgtgcccctggataaacaaaaaggatttatcggatacatcttcccaggtgcgatggcgattgccgccgagaacgccgacatcgacaaggttaagcacctcgactcgaccgagctctcaaagcgcctttacaaagtcgtaaagttccggagcgacggactcatcacattccgtcgccaccttgaagctcgtgcaagcgtagtgcttgcaaaagatttggcaaatgcgggcaaacacaaagcaggggaatcctcaatagatttcgtaacgccccatgaactactattattgagccctggaatatacttcaacaacatgatcttcgaaggtatccatttcaaaatgatgctcgacgggacaatcgtctttttgaaatgatttcgagaacgctatgcttttcaaacatcggcaagctgtctcttaagtatgagcagctcgtctggagcacagaggctggagagtgccgctcagtgccaatagaagatatcgggtttgtaattctcgagtcagaaaagattgcaataacaacagccgcccttcagtttctttctgcaaacaatgttgctgtcgtcgtttgcgatcaatctcacacaccatcggcacagcttctgccatatgcggccaacaccacggccgcagaatcaatggaggcacagttgtcgacgacggacgccgtaaacggacgcttatggcgcatgattgtccggcaaaagctacgcaaccaagcgaacctgatggaacggctcggggcgaagaattccaagcggcttcttacattagcggacgaggtaaaaaacggagatccctctaaccgcgaagcccaggcagccagaatttatttccaggaattgggcccagaaggtttcgtgcgcgaccgagatggtgattggccaaacgccccgctcaactacggctacgcaatactacgggctgcaacagcacgagcgcttgtcggatctgggcttgcgtgctttcgcggcatgcatcaccataaccgctacaatgcgttcgccctcgcagacgacatgatggaaccatatcgtccgttcgtcgatcaatacgtcctcggcaaagtaaagcccttcgatgtgccgatgaatgagctcactaaggaaatgcgcgcgcgtcttctgcaagtgctaacgtgcgatgttaacctcggcgacgttcgccgccctctgatggttgcgctttcctgcacaactgcgtcgctcgcgcgttactatagaaaagaggcggacgaactggcgcttccgaggttcaactgatgctgtgctcccaagaagcgataaccggctacaaaatcatgtggctttacgtgatgttcgatttaccggtcgagacaaaaaaacaaagaaagcgcgccactctgtttcggaagaatctcttgaaagatggcttcggcatgcaccaattttccgtttacatccggcactgtgcaagttatagctctgccgatgtccatatcgagcgcgtgaaacatatggttccagaagaggggtcggtttcgatactcaaggtgacagacaagcagtttgaaaacactatccacattgttggcaagaaggcaaaaccgccacccaccacaccccttcaactggaatttttctaaaaaaccaacgagcaggaccgctgagacagccccgctcgccatttttttgcagcacaaaatcacatgaaatgactgacaataaaggacgaaatacgcccaatactgtttctcatttcaatagagcatcaaatcacaactactagtggtgacatctatgagtttgacaactgtttctcatttcaatagagcatcaaatcacaacagaactttcgatttccagtccgggccataaactgtttctcatttcaatagagcatcaaatcacaactacatcttgccgtcccagctcatttcctgactgtttctcatttcaatagagcatcaaatcacaacacggcatcgacgaaaacggcgcggcggtcaactgtttctcatttcaatagagcatcaaatcacaaccgcagcttctggagcttgtcgaggtcggcgactgtttctcatttcaatagagcatcaaatcacaaccgtcaaaccaaaacatccgagatccgcaacactgtttctcatttcaatagagcatcaaatcacaacagttcgcgctgatggatcgtctcacagggcactgtttctcatttcaatagagcatcaaatcacaacccgtactgagcgtcttagcaaagcggtgaaactgtttctcatttcaatagagcatcaaatcacaacaagagggcgaatggctgcggggagagcataactgtttctcatttcaatagagcatcaaatcacaacgccttgagtatgatggtactactcatgatactgtttctcatttcaatagagcatcaaatcacaacatcggaaagattaagttctccatcaaggcactgtttctcatttcaatagagcatcaaatcacaacagaagtgtagcccaccgcaaagtcggtgagactgtttctcatttcaatagagcatcaaatcacaactccttcttgagcgcggccgcgagctcccgactgtttctcatttcaatagagcatcaaatcacaacaagggggcgggacgcagctttggaccgcaaactgtttctcatttcaatagagcatcaaatcacaaccgcccttgttctcgagcttgcggagatagcactgtttctcatttcaatagagcatcaaatcacaacgacagcttgtagtaggtggcagggcgattgactgtttctcatttcaatagagcatcaaatcacaactcggcttcagccattcctcgcggggcaacaactgtttctcatttcaatagagcatcaaatcacaactccaagtcgaagctctcgttgtccgcctctactgtttctcatttcaatagagcatcaaatcacaacccaaaggatgtatatgtggagcgccgctaaaactgtttctcatttcaatagagcatcaaatcacaacttattataagcattgaggcgaaaaatggacactgtttctcatttcaatagagcatcaaatcacaactttctgttgtggtgtttcactctacggggcactgtttctcatttcaatagagcatcaaatcacaactttctacttcttttctcgagcgaaaaaatactgtttctcatttcaatagagcatcaaatcacaacctcgcgctatggcgggtgattctttcggaactgtttctcatttcaatagagcatcaaatcacaacgggttggttggtatagtgcgaagctccgaaaactgtttctcatttcaatagagcatcacatcaaatcacaaccttgcctctgacaattcccacctgtaaaaactgtttctcatttcaatagagcatcaaatcacaactgattgaatacttccgcgataccttcaacactgtttctcatttcaatagagcatcaaatcacaacgagggcgcaatcgcaatcgaccgctacggcactgtttctcatttcaatagagcatcaaatcacaacgaaaatgggcggattttgggtggggtgtcaactgtttctcatttcaatagagcatcaaatcacaactgtagtgttgcatggttgtgcaccctttctactgtttctcatttcaatagagcatcaaatcacaacaaaatcgtgtattggtcgccgaatccgccgactgtttctcatttcaatagagcatcaaatcacaacggcttgcggcaacattgtatcatatcctgactgtttctcatttcaatagagcatcaaatcacaactgggtcaatgcagtcaatcaagttcatgacactgtttctcatttcaatagagcatcaaatcacaactagttgttcgtgtcgaggtgttcgagcgtaactgtttctcatttcaatagagcatcaaatcacaacgcgttcgtcggcttgttcttgtccatgtcactgtttctcatttcaatagagcgtcaaactcgacacatgaattttcaaagaacataagtattatatcatattatcacgctcgaaggtaagcgagctgacggaacgtcggcgagcgcagaagctgcgaagaaaaaagcgccttatggaaggtgaggtaagggacgaggggacgagtgccgaactgagcgacatgcggcgacgcggttcgtcggatgcgcggtgagacacgtcgcaaggcgaggaggcgtatccgccgacgaagcattgcggcgcgtatcgccgcgaagacgacgggagtcacccgaggccgaaggccgagccgccgaaggcggtcgctagaggtgtgagaggccgagaccccgagcaccgcgccgaactcccgagggtgccaagcgcggccacggttcgggtcgggtaaccgccgaaaaacgcggagcgttttgaggggcgaggccgaaggccgagcggaaagcccacagaaacaaggctttgggacaaagccgcagtttcgtagggccgagcggaacggatcgaagcagggggaggcgagttgcgcaggactcgaccccgacggcgtatatgtatacgccgagcgggtcggaggacgcgcaaatcgcccgccctgcacagggagtaccgttacccgaaccgtggccgcacgttgataggcaaaccagcacggcacagcaactcgccatgccacatgcgcattgcgttcatactaaaaccgcaagcacaaaccaaacacaaactcccgagccaacgtgctctcgggagcatggaaaagatcaagttgtcatgcggtcacccgcaagacattgaaattataacacaccgcgcttcgaaatggcaagcgcaggatttttgaaatttttcgatagttccgattggtttgagactatcgcaaatgggctacactttcactacggactcaccgtatgctatcaccttctcgtcgtgcgaaatcaacaaaagtccatcgctgcgtgcctgagttatgagcatccgatcaaatggatctgaatgaatgtctggcagattggctatgtctacgccatgccgagaacgtacaggcagttcgataaagcccatcttaagtgcgagatctttggcgcgctcagatgtgatagccatctgctgcggatgcttcgcgtgcttgatcgatacctcccaaagcgatattggactgaagtaaagcacattctcgggattctcaagaattgtcttggcctttcgcgaaagccgcttcacatccagcgcagcccaaaggattatatgcgtatcaagcaaatacttcatcagaagcactcccaaacatgcaggcgatttcttcgtccatcgagcgatcctcatcctcggtgggaatgcggcattcgccatcggcgattcccagtttccttttcttcatttcaggcttacgcgtagaaagctcaatgatgtacatcttcacaagatggctgagcgacgttccacatgaactcgcataaatctttgcgtcttttacaatcgccggaggaagctgcaacgtgtaactcatcgacactcctttcgttgctgtttattataccagattcatagtcgtttttgcttacgtcgtcctccttcgctgcttgcgccagctacggaggacatggcggatgttgccacccgcccttggcggactccgcgtttcgcgtgccgccggtcccgggtcgtcgagcgcccgggagcatggaaaagatcaatgtcgtcatgcggtcacccgcaggacattagaattatactacattcgccctttcgccgtcaaatcgcaaaattaaaaatcaaagcgcggtgaaatgagattatggtgcggacgaaatcgcgacggatttgccgcgcgggagcggaggggggtgtttcggcgcaatgcgaagcgacggcgaaaaagacggaagcgacccgatttcgacgcgtcgtcattttgccgagaggcttgacggcactggcaaaatgtgaaagaccgcgaaatcgacgctatacatctgacggtgcgacacatatgccgcggggaagcgggcgcctcggagaggcgcccctaccaagactgcgcgagcacggttgcccgagacaaagccgcacgttgtcaggcaaacacgcacacagcataaccactgtgcgtcgcaaatctatctatcgaggaggattcgcatcgagccgatgcgggcggccatgttcacgatggacatgtcacagccggttgcggcaatggcatcgccggcagcgccgtggagccacgcagacgccgccgcaggaaggaaagcgccgccaccgagatacgcccacctcgcggcgaccacgccagagagcaggtcgcccattccgccaagcgccataaagggattgcctgtcggattctcgtacaccctctcgccatcgggagagacgacaagcgtcccagggcccttgagaacgaccgtggcgcgatagcgacgcgcaatctcctttgccgcggcaattctgccgcgggagacttccgcgcagtcgacaccgagaagtcgcgccgcctcgccttcgtgcggagtgagaatcagctccgccccgccctcgcggtccccgccatcgccgcagatcgccgcgagatgggtaatcgcgtcggcatcgacgacaagccgcccgccgccggaaagaagcccgcgcacggcaagccgcgcagcttcgccgagcccaagaccgggcccgacgacagtcacatcggaatgcggaatttcgccgccaaggtcagacaccgtcgcctcggggagcagcgctcccgcggcacagcgcgactccgtcgggacgacgagacggacaagccccgctccggcggctcttgctccgaggcctgcgatcaccggtgcgtgagggaagccgtgcgaaccgccgatgacagtcacggtgccgacggaacgcttgtgcgcgtcacgcggccgcgcacaaaagccccctgctatctccttaggcgtttccatgcgagggtgattataccaaaaaacgccgcgcggcacatccgccgcgctatgtcagcgggattcgaggagcgcctttgcgcgcttgttgccgagccgcgcggcgcggtagagccacgtctccgcggaggcgatgtcctgctcgacgccgattccctcgaggtagcattcgccgacgagcgcctgcgccggggcgtggccgttcttcgcggcctcgagcgcaagggcaaagccgccctccaggtccttctcgacgcctatgccgtgaagccggcagaacgcgaggtcgttcatcgcggagaggttcttctgcgccgccgcgcgcgtataccacgctatcgctccgtcgatgtccttctcgcagccccagccacgcaggagcatgagcccaagcgacgcctgcgcgtctgaattgcccgacgcggccgcagtgcgataccagcggacggcttccgcgagattcgtcgccgttccctgtccgtacatgtacgcctcggcaagagcgcactgcgccaccgggcttccgtcagccgcgagctgcttgagccgcgcgaaatacgcggcgtaggactcatcgtgcgcctttgcgaccgtaaggacgcgaggcggcgcgttgaagcgctttcccgcccagcggcgcaagtcgtcgagatgcccaagcgcgacaagcccggcggccaccgcgacgagcagcaggacgcaaaggaacgagcggaagtagttgcggtggcgcaaggccgcggcaaacgcgtcggccgactcatagcggtcgcccggaagttcgcgcgtcgccttgcggatgatcggcttcacgctcgccggcggacgcccctcgtagagcgcgcggagaatcttcccaagcgcaaagacgtcgctctgcaccgacgcctcgcccttcaacagctgctctggcgcggcgtagtcgagagtcccgacgccgacgggcttcccgtcgatgatcgatatgccgcggccgtggcgcactatcgggtccgacaccgccgtaccgcgcttcttgacgaggccaagatcgatgaggacgggttctccgttcgcgcgcctcaaaatgttgccgggcttcaggtcgcggtgtatgtagcccgcctcgtgaagcgtgtggacggccttcgccaccctgttcatgaagcgcggaacctccctgcgcggcatcgggtcgggcagcggctgaaggtactccatcacatagtatggcgcgcctttccacgtgccgccgcccatgaaccgcgggagcgagcggagcgaaaggaagcgaagcgcatcggcctccgcggcgaagcgctccgcaagaccgcgcgagccgtcgacgagaagcttgagcgcaccgtcgtggccaaagcgtgcgttcgtaacgcggtagacctcggcggaaagcccgcggccgagatacgcctcgacgcgccactcgtctacgacctcgccgcgcgcaagcagcccgacgcggttttcgccgaacgactgggcaccgagccaactctccacgctcgcggcagacgggttcatgcggagttgcggcgcgagaggaaaaacgcgcagaggatccaggcggcgagcatgacgcatgacaccacgaagaccttgaaccatccaatgtcgacgacgagggtaaaagcaagcgccgtccacagaccgcctcccatcacgggctcgtggaggagctgcttgtagccgaagctcgccgccgcgcacgtcttcgagtcgggatcgaccgtcctcaggagcagaagaccggttgccgtcactcccgtggcctggccgaagtcggctatggcgcgctcgaaccacgcctccttgaggcagcgcggcccgaaccacaggacgacgaacacgctccagacggcgccggcgagaatcagcgccacaagcgggacccagttcgccgccacgaccttgatgcttatggtcgccaccgcagacacgacgagaaagtcgagcgaggcgccggagatgcgctccatctgcccgtggtcaacgagaagatccttgcggatggcgcgggcgaaggcctgaaggacgatgccgccgatcatgcagagcgggaagagcgggaagccgttgaatatcttccacccggtaaggcgaaggagccagagcatgccgacgcctatcgcaatcgagacgccgacgatggcaatgtgccacgcgagcgaatctatcgagtcgctcatgacggtctggaggcctgccgcgggacgagagtggcgggcatggactccaagccgctcgccgaacctgcgcttgctgaagggaacgacctccttgacgattcccttcctgtgcgcccagttgacaagcaccattccgacgacgatgccgattatcatgccggccgtagcgaccgtaaagccaagggccgcgccgtcgttccatcctgcggcaagaaagctctccgtcattccgccgacggtgccgtggccgccctcgaagccgatctctatgagattgccgaagaacggcgggacgttgcacaggcgtgcgaggacgaagcccgcgaggccaaggcccacgacgtactggccccacgccatgatctgcccgaggacgagctgcgggaacgcaagcgtcacgacgcgcttcaggttcgggaggcgcgtcccgaggaagagcgtcgcgaagacgacgtttatgagaaagcccggcaccttgcgcatcgcgtcggtgatttccgggtcgattttgtcgccgagagcggatataacagcaagtccgatcgccccgccgatgacggagcttgggagatacagccgctgcaggagcgggatcctgagccggacgaacttgccggcgacgagaagcccgcagagggagatgaacactacgacggccagaggcatcgcgcgccctttatgcgagacgcgcgagcttcgcggcgagccctatgtacgtcgcgggcgttagcttgagaaggcgcgacctgtcctccttcgggagcggaagcgccgctatgaagtcgcgcattatctcggccgtcacgcggcggccgcgggtgagctccttgagccgctcgtagggacgggacatcccgaccttgcgcatgacggtctggatcggctcggcgagcacctcccagttgtggtcgaggtcttcggcgagacgggcctcgttgagctcgagcttgccgagccccttctgggtcgagcgaatggcgataagcgtgtagccgaacccgacgcccatgttgcgcagggtcgtagagtcggtgaggtcgcgctgcatgcgggagatcgcgagcttccgcgccatgaagccgagaacggcgttcgcgaggccgaggttgccctcggagttctcgaagtcgatcgggttcaccttgtgcggcatcgtcgacgagccgatttccccctttatggtgcgctgcttgaaatagcccatcgagacatacatccaaatgtcgcggtcgaagtcgagaagcacggagttccagcggcagagcgcgtcga

SEQ ID NO: 446 - DNA, 15139 bp, synthetic construct
  source 1..15139: mol_type = other DNA
  misc_feature 1..15139: note = Synthetic
gcgggaaatcggccaccttcgaagaagtatgcgccttgctcgacgccggggaagaggtcgcgcgctgcaaatgcggcggcgccttcaagccagatatcacattcttcggcgaatcgctcccggaggatgctttcatcgccgcccaatctgccgccatcaaggcggacgtgatgcttgtgctgggcacttcgctcaccgtctttccggcggcagggctgccgcgcctcactttgcaggcgggcggcaaagtgtttatcgtcaacgcccagccaaccgacctcgaccgctacgccgccgcgtgctaccccgatctcctcgacttcgcgcacgcgattttgcaaagcgcggattgaggaattccctcctttccttcgtagtccgcctggctggacttcgtagtccggcaccctttccttcgtagtccgcctggctggacttcgtagtccagcaccctttccttcgtagtctaggcttctcgactacgtagtccagccccttttccttcgtagtccagccttctagacttggcagggcggcaatcgaagaatcgaaaaatatcttttcccctagacaaaaaaaaaaaatgctatactatggtcaaccacatggaggaaatgtcatgaaaacaaaaacattcttttctctcattctggcttcattggcaattgcgtctggatttacggcaaatgcagaagattatgatttgtctcagcatacatcaggggagcaattggtcgtcggtacgcgcactgtgaccggcacgctttcggttcctgcgagtattaaaatcgtcgatggcggcgttctgacgcttaaaaatgcgaaaatcaatcctgacggcgcacagagcgatggcacccaacatgcgggtattgaatgtcgaggcaatgcgactattatacttgaaggcgacaatatcgtccgcagcttcaacggccgtttcccatgcatttttattaagaagggctgcacgcttaccatagagggcgacggcacgctcgaagcggcggcaatcggcttcaatgcggcggcgggaattggcgcctgcatgttggatccgaatgttgggcaggcaccgtggggcggcaaaattatcatcaacagcggtacaatccgggctaccggcggcgctttgggcggtgccggcattggcgccggtgccaacggcggcacatgcgaggacattgaaatccatggcggcacggtgatagcccaaggcggtcgcggtgcggccggcatcggcggcggtgcgtctttaggtaagaattactcccattgcagcggggatataactattgatggcggcacggtcgaggcgaccggcggcatttttgccgccggcatcggtggcgggtcggacagcggctgcaagagtattaccatcggcacgggcgtccagagcgtttccgcaacccgcggcggcggcggaaccttattggggcgtgcgaccaatgacgagcccatcggcaggggagatagcgaggatttggatacggccgcttgttggaatggagttcacatcgatgatacgcttatcgacatcacatcgggcgatgtgcggacggtgtcggcggaagaaacaatcaatcttggcgagcttaccgcaaacaccacgatcaaaaacaatgcgctggttaccggcactcttgcgaacgctatcaaactcacgattgccgacggcgcgacggtcatgctggataatgcgaacatcaacagcgcgggcgaagtcaatttaaaccatccctgggcgggtctcacctgcgagggcgatgcgaccataatcctgcgaggctcaaataccgtcaaaagcttcagtgtggcatctcccggcattttcgttccccggaacaagacgcttacgatatctggctccggttcgcttgttgcgcattgcagccatgaaacggatggctgtggcatggcctccggcatcggcggcagctataacgagcacggcggcaatatcgtaatcgatggcggcgtcatcacggcggtaggcgggcttgcctcggccggcatcggcggcggatctttcaagaagtgcggcgatattaccatcaatggcggcacggtcgaagcgaccggcggcaatggcgctccgggcattggcggatctgccgccagcaattgcggcaagataacaatcaatgtcggcattaccagcgtcactgcaattgccggcgaaggcggctcgctcatgggcatgacctacccggaggtcgatccaatcggtcccggcgcctacggaaaatgcgatggagttgcggtagataaagatcttaccgacacctctgtctctgcgcagcgcaagcgcataatttcctttagcggcgtaaatctcgccacgggcacaggcgatgtgattcaaatcgcggacaataaaaaggtgaccggcaggcttcccggcggcaaaccggtcgtcattgacgccggcgccacggttacgcttcgggatgtcgtcattgacggcgatgacgctcagggcataagctgtgcaggcaatgctacgattattcttgaaggcaagaatatcgtccaaggcgactccttccatccggcgcttttcgtgcctaaaaacaaaaccgtgacgataaccggcgatggcgagctttatgcaactggcagtcaaggcgccggtatcggcacctcgtatggaaatcagggtggaaaaggcgaatgcggcaatatccgcatcgagggcggaacgattgtcgccactggcggagaaaacggcgccgccggcattggcagcgcttttggcggcacctgtggaaatataaccattgtcggaggcaaggttaccgcaattggcggttccgacgccgccggcgtcggctgcggagcagaaggcaagtgcggcgatataagcatcggctttgacaatggcacggaacttcccatcgacggcctcttcaagttcgagtcggttgaagcacgagccggcgatgccaaatactatgctgccggatcgccgatagggttgagcgggtatgcgaactcgacatgtggaaacatcaaggtcaaccatcgtcttcaggacgcacccgatggcttgactcgtattatctttatctcgaggaaatcggtaaatcttgatgaagatgatctgggcgagggcgacacctacgagcccgaagacggtgagtcgatgaccggcaagaccgcaaagaaggtgttgctcaagcgcaatacgacggtgtcgatcaacggtgtggaggtttcgggcgcggtcgatgcgccagagtttgacttcaagggagaagatactgccaagaccgagacgaccgagtttgccaaaagcgacgacggcaactcgtggacgcttacgacctttgccgagctcagcaacgccgcggtaggtgcggacgtcgacgcgaatacgcagataaaggtatattcggcagaatcgctggaagagcttgacaccgaatccgccaaggttgaaaacgcaaatgtggaaatcgtggagaagaagagcgcggtgatgaccacgatcaaggttacgccgcccgagcccactcctggcgtcaatcgtcggttcttcaagatcaagtacggcaattaaggcaagtgcgcttacgcactccccaataatgcgccgttgctcgcaacggcgtgaagtttccgcttgcaatctggttgggagtatggtataatctaccagttttgatgaaaagggacaggaaatgaagtgctgcaaggcggagaatagggaatcgacaggaagcgacggcgccatcgcgccgcgcggaatcgtcgaccgcatccagagtgtgttcgagagttggccggcggtcgttttgagcgcagcgtgccttgggctcagtttgtggcttggcggcgggcattcgcacggcgactgcggcggctgcgggatggccgcccaatcaggcggtgcatggatccacctcgccttggtgtcgcttttcatttgcggtttgccgctcctaaaagaagcgctcgtcgcgctcttccgcgaccgccagatcaaggcgacgctgcttatctccatcgcaatgatcgcctgtgtttgcatcggccaggaatttgccgccggcgaggtcgctttcatcatggcgctcggcgaaaaactcgagaccatgaccctgaagcgcgcccgcaagggcctcgcaaagctcgtctcgctcgtgccgccaaccgcccgcaaagtgattacctgccccaaatgcaatgccgccggaatcttcttccgcgaagtccccgtggccgaactcgccgtgggcgacttggtggaagtccttccgggcttcgccatccccgccgacggcgaagtcgtgaagggcgaaaccatggtggaccagtcgtccctcaccggcgagtccgagcccgtcgaaaagaaacccggcagcgaagtctactccggcaccatcaacaacttcggcacgattcagttcaaggtgacgaaaatcggcgccgacagctccatccagaaactcgtgcggcttgtgaaggaggcggattccaagaaagcgccgatgcagcggatagccgacaaatgggcggcaatattagtgcctgctgcgctttgcctcgcgattctgacattcctgagcgtctgggcggcgatggatttccataccgcgcttatccgcggcgtcaccataatggtcgtgttttgcccgtgtgcgcttgcgctcgcgacgcctacctcggtcatcgcggctatcggccaggccacgaagcgcggcgttatcgtcaagtccggcgaagccctggagcgcatggggaaagtttctttcgcctgcttcgataaaaccggcaccctgcagcagggcgacagactccgccccggcgcgaaagagacgatcgacgcgctctctcggctgggcgtcaggtcgctgatgctctccggcgaccgcaaggaaatcgccgagcgttttgccgccgaggccggaatcggagatgtgcgctacggctgcctcccggaagacaaggccaggacggtggaagagctccaggcgcgcggcgaggtcgtcttgatggccggcgacggcatcaacgattccatcgcgctcaaggtggcggatgtcggcatcgccatgggcggcatcggcaccgatatcgcgcaagaggcggcggacgtctcgctcgtcaacgacgacctttcttccatcgtttatctcaagcgcctttccgtttcctgcgtgaagaccataaaactgaatatcacaatttcgatgtgcatcaatttctgtgcgatcgtctgttcggttcttggggtcctcactccggtaaccggtgcgctcgtgcacaatctcggcagtgtgctcgtgatcctcaatggcgcgctcctctacgacagaaagataaaatgacatgacgacaccactcttgctcgcgccgtacacgcgcaagctcgtctggggcgaagagcgctgggtcgtgtccgcgcgccccggcgcgtcgtcggtcgtcgtggggggcgaatatgccggatggacgctcgaccgcgtcgtggagaaggagggcgtcagcctcaccggcgtgcgctcgcccaatccgcacgagttgccgctgttgatgaagatcatcgatgcgcgcaggccgctgtcgctccaggtccacccggattccgcgtcggccaatactctcggcggcgacgccaagaatgaagcctggtatgtcctttccgccgactccaacggctcggcggcgaaagaggagctttccgcctgcatcctcgccggactcaaagatggcgtcaccgaagatagcctccgcagcgcaattgccgacggcacggccggcgatgccgcggtgcgccgaccggtcaagccgggcgacatctactatatccccggcggcaccgtccacgcaatcggcggcggcactcgcattttcgaggtccagcaaacgggcgagacgacctaccggctcttcgattggaaccgcaaggacgcgaacggcgagatgcgtccgctgcatgtcgaaaaggcgctcaaggcgatcaactggaacgagcagggcggaaaactcttccgcaagcgcgtcggcactccgttctttacaatgtacgagcaggaactcgacggcaaattcacgcgcactatggatggcgttagtttccgcacgctcttcgtggtcgatggcgtcttggaagtcacctccggcggcgaaacggtggcggcaacctccggcgttggcgttgtcgtccctgccgataccgatgaattcacgctcaagggccgcgccaaaataatctccgttaccttgtagccgccacggctttgtgatttatttgagactcaatcaagacgcgttcgtgaccgaacgcgtcttgatttttggtataatatgcggcgtaacgacggactggtcgagaaaggagcaaatcatgttgtccaaaactttttcaggcgcaattgccggagtggacgccatcccggtggaaatcgaggtttattcccaggtctcaaccgcttcttttgcgattgtagggctgccggacgccgccatcaaggaagctcgcgaccgcatccccaccgcgctcaagaacagcggtttcaaggcgcgtcaggaatatgccgtaaccgtgaatctcgccccggcggatatccgcaaggaagggccgatctacgatctccctatcgccatcgggctgttgaaggccatcgggctgctcgaaaacagcaaactcgaggaatatgccatggccggggaactttcgctctcgggtgaagtcaggcgcataaacgggattttgcctatcgccatggcgatgagggcgatcggcaaaaaggcgatgctggttccttacgagaaccggatggaggccagcgtcgtggagggcatggacataatcccggtcaaaaacctgcgggaggccttttgccatctctccggtcaggcgcagataatgaaggtgcattccgatttggccgatcttgtcgattccgccgccgcctgtcaggatgattttgcggacgtgaaagggcaggagatggccgtccgcgcggtggaaatcgccgttgccggaggccacaatgtgctgatgatcggctcgccgggatccggcaagacgatgatcgcgcgccggattccatcgattttgccgccgttgacggtcgacgaagcgctggaggtctcgaaaatccattcgattgccggggcggcaaaaggaggactgccgttcgtcaccacccgcccgttccgttcgccgcaccatacggtgagcgccatcgggcttttgggcggcggtgcgaaggccgtgccaggagaagtctcgctcgcccatcgcggcgtgctcttcctcgacgagttcgctgaattcccgcgcaacgtcttagaggtaatgcgtcagccgctcgaagacggcaaggttagcgtcgcgcgggcatgcggcgcccacaactatccgtcgcgcttcatgctggtcgccgccatgaatccttgcccgtgcggctatcacaatgacgccacgcacgattgccattgcaagccaggccgcattcgccagtatcaagagcgcatttccgggcctttgctcgaccgcatagacatccagattggcgtgagcgccgttcccttgaaggatctccagcgtgcgaaatgtggccgttcgagcgcggaaatacgcgccaatgtcgtccgtgcccgcgccatccaggccgcgcgctaccgggatatgccgggcgtcatgaccaatgcagaagtccgcagccgcgatttgccgcgagtctgcgccatggacgataatacccaagacgccttgcagggaatgatcgaaaaactcaacctctccgcacgcgcctacgatcgcctgctcaaagtctcccgcacgattgccgatctcaacggccatgaacgcgtcacgaccgaagacctctccgaagccgcatgtctgcggcaattcgatgccgaccgcgaggccgatatcctgggatattgacaaaaaaggaggggaaaatggaaaattgcatgtcaagagccggatttccgaatatcggagtcagacatggcgcgtggggcgagaatgtggcgagttcctatctgcgcaagcgcggttttattattgtcgaccgcaatagccgcccgtgccgccgcaaccgcaccctggaaatcgatatcgtcgcctatgaacagaaatccgataccctcgtttttgtcgaggtaaagcagcataagtccttttctcagtaccaatcccgcctgcggagtgtcgacaagcagaaactttccaatttgcgccgggcgtgcgtcaattgggtaaagaccaaagactgggacggcggctaccggtttgatgtgatcgaaatctacggcgccccggaatctggcagccctgaaatcgaccatatcgaaaatgtccagctcttcacctcaaaagaaaggagggtcgcatggaaatgacgataaccgagaaaataagcgagcggcatgtccaggccatctggtacgaccgcgaattgcgtccgcaagtcctgcgcgatttcagcggcgaagaattcacggtggtggatcccggcgtctggaatcttggcgccgggccggacttcaaaaacgccgtaatcgaagtaggtcccgaacactggcgcataaaaggcgatatcgaaatccacctcaacccttccgattggatcagccacggccataccggcgatcccttgtaccggaatgtcatagctcatattacctggaatggcggagcgccgccggaaggactgccggaatcggcgagatcggtggcgattggcgacgaaatgcgctcggcgcacggattttcgccctccatggtggatgtttccgcctatccgttcgcacgcctgccgctcccggaccgaccctgctgcgaggcgcttaaagaccgccctgacgacgcaatcgccatcctgcgcgacgccggcaagcgcagactccggcaaaaagccgaccgcatcgaggaaatccgccgacgccgccccggcgaggatggacagattttctacgaagaaatcatgaatgcgctcggatataaggtgaattcccgcgcattccgtcaggtggccgaagccgtaccggtaggcacattgctcgccgaaccgcaaatcgccgccgacgccatgcaaaccgccgccagattctgcgaatggcgatattcaggcttcagacccaacaattccccgtcaaaacgccttttggcggcggcaaatatgtttacgcaaaccggggtcatggcgcttagaaatgtgcgtgaattttcgcgcgaggattgcaaattggcgataaaatgcctgaccgacggcaaatttatcggccgacgccgtgccgccgcgattctttccaatgtaattgtgcctttttccggcaaaattccggattggctgccgccggaggacatatctgacgtgatgcggcttacggccttcaggatgttcggacgagaccacaatccagccatgtattctggaaataacgtgcttttgcagggtttaatacagatttatcgcgaattttgcctgcaaatacacccgttttgcgaacattgccgcctagtctagtcatgaaacaatcccttcacccactatgcagtccagccctttccactacgtagtccagtcctctccacttcgcagtccagctccctagacttcgtagtccaaccacctccacttcgcagtccagccctctccacttcgcagggaacgccccctagacttggcagggcggcaatcgaagaatcgaaaaattcctccccgcgcccctggcaatatattcggtcaaaagagtctactttttcaatcgacatttttagagttggtataatccagcaagtttcaaactcttgtctttttagtggatttttggtataattcgcaaacaaagaggaaggttgttgtaaaggcatccgacttttggagatgacgaagagagagaaaaaaaaagtgccggcgaaccggcacgcagtcttagaacgacttcggcatatagccttgttgtgataagatgcaataatattatatcaaatttcaacactgaattgcaatagtgaaaaggaaataaaatgagcgacaagacacttggaatcgatctggggacgaattcgcttgggtgggctattttggacgacataactggggatataaaagacaagggcgttttgattttccctgaaggcatagacccgaataacgataccttggagacgcctgctgcgctacgccgagcggccagaatgggccggcgcatgaaatttcgccgcaagatccgcaaatggattttactgaaaattcttatcgaaaacaaaatgacgccgctgacggaggaagaacttgccagatggcgcaaggaaggggtctttccgctaaacaacaaggcgtatatcgagtggttgcattcttcggatttgtcgaatccgtatgcggatcgcgccgccgccgcaagcggaaaggtcgaccccatgacgctaggcagggcgctttaccatctggcgcaaagaagagggttcaagagttcccgaaaggatgccgatgcgcaaggagaggagacagacaaagatttgggcaaggtcaaaggagacatcgcccggctgacggatgaaatcgccgccgcaggatgcaagacactgggtcaatatttcaataagattttagaaacaaacaaaagcaagaaagttaaagagcgcatccgcgccagatatactggacgaatcgaacattacgaggctgaattcgcggcaatcatggacgctcaaggttttgtgcctggagatgactttcgagagaaggtgcatgaagcaatattctatcaacgtccgctcagatcacagaaacatcttgtaggaagttgtccgctggaacctgatcatccgaggtgcaggatcgcccatccggcgtttgaggaattcaggacattggctttcgtaaacaacttgcgcttggtgcaaacaaacggcgaaggagaaaagcttccgcttcctaaggaatatcgtccggcggttttggattgtttctgccgcaagagcaatttcaagtttggaaccataatgaaaaagctcggcaaagagctgaagaaaaccggaatggagttttactaccacaccgcagaagaagtaatgaccgcaaatacggtgagttgctcgctaaacgaaactttcggcaacaaaaagtatgatgcgcaagcactgtttgatgcgctttcgttttttgatgacgaggcgaaattgagacagtggatgctcaagcatttcaacaagaaagccaacgaggggatagacaaagagattcgtccgcgcttgttggtagatggagatttgaccgaagaagaatgcgataaactggctaaaatcaaaatcaaagacggctatgctaaatactccctcaaggcgataaataaaatattgccgtttttgcggatggggagaaacttgcggcacgcattgcttttggcgaaattgcctgatctcatggagaactgggcgcgtgatggcgaagccgttatgcggagactggatgaaatcggttttgaatatcgccaagaaaaggaaagatacgagggccataaacttccagacgatttcatcaacctgagcgaccgcgaagagaattgtttgcgctttgaatttggcgtggatgatgccatgtggagcaaactatataccaattgcgaaagcaagtacatcgggcaaaaaacctacaaaaacgggaaaggggaaatagtcaagcctgttacgccgcgcataccagaagtgaagttgggcatgatccgcaacccgcttgtgcagcggtctatgacgatgctcagaaggctcgtgaatcatctctctggccttggcaagatcgacaagaaaacgacaatccgcatcgagctggcgcgcggagtaaacaaccttgccaagcgcaatgcgattaaaaagtggaatatcgagcgcgcgaaattgagagaagaggcacgcgaggaaatcgccaaactaagcatcaagccaaccgaagaagcgattgacaggtatgttctttggaaagaacaggacggcaagtgcctttatacagggcggcagataaggataacgcaattattcaatggcaatgaatttgatatagagcataccatacctcgttcgctttcgggagatgattcgctggccaacaagacgatttgcgatgctgtctacaatcgacaggtcaaacgcggacaagtgccgtcgcaatgtccaaactttaacgaagtttctgcccaatgggggtcggcaatcaaagtaaacctgaaaccatgggaagaaaaagtcgaattgctgaaagccgcatatcaaaagcaaagaggacgagccaaagggtgcgtcgacgccgtgtcgcacaacaaggcgcaagagaaggctaatctcattgaattggaacttgattattggcgcgacaagctaaatcgcttcttggtcaagcctgagaaattgtcatctgaagaggggaaacttaatggattcaaaaggaggcaactcgttgacactggaataatgtcttcccatgttgtggaattgctcgaaagcgtctatgatgaagtgtatgcggtcaacggtgcggctactgcttttgctcgcaaggcatgggggcttcaaggcgatgaagcgaaagaccgcaccaatcacacgcatcatgccaaagatgcgatggtaattgctgcacttacgccttcgcgtttcaacgccatttgttcggcgctgaaggatgatgggacgatacatccccgtccgtgtgatgtctgccccgcgccatacgagaatttcgccgaaaaagtccgtaaggcggcagaagatattttggtaaaacatgtcttgcgtcagacaacactcaaacagagttcaaaacgcaatgttctcgccaagtcacacgtaaacagcaaggatccatccaaagttgtaagtgcagtattgtctagaggcgacactgttcgcggacaactgcacaaagaaacattctatggttgcattatgaagccgggtagcgaagacaaggcattcgtagtgcgcaagagtcttattggtccggtaaagaacgcaaaggcgctaattgacaaaattgtcgatcctgcaataaatgcgatagtagcggatgctatcgctagacttgagcaatccgggaagaccaatgtcgaaccaggagatatcagaatgtcctctggagttcccgtcaataaagcaagaatatatgcgcataaagacacctgcaatgaattgcgcaaccacacgatgccatctacgaaaccatacaagaatccgtattatgtggaatcgggaactggttcgaacttccggttggcgattttcgacaatccgcctgatgccaaattagacaactcgctatattgggcgcagaaccacaaaaaggctgattatatgccgtgtaataagaagccgggttttgttggatatgtttaccctggaacaatggccttcacacacgatggcgacaagcgcggacacttgtataaagtggtcaagttcaactatatagggaaatatccgtatataacgcttcgcttgcattccgaagccagggcggccaaggatcttgaaaaagagttgccggcaattggcaagaacaagaagggagaatcgaaaatcgattttgagaacccgcacgaaatgctcttgatcggtcctaaagtttaccttaagcagatctggtttgaaggaattcatttcaatatggaacttgatgggacagtgcggttcaggcaatcgataaagtgataaagtaatgatagccaaaacgctctcgttttcgtcgccggggaagctgaggttgcacttggggcaacttgtatacgatggcgagggcgatgtgcacagaactttcccgattgaagatttgggaatggtgatagtcgataccgggcttatgactatctccacagcggcgatgcaggcgctggccgaaaacaataccgcattggtggtttgcgacaaaacgcaccaccctagcgcccagctcctgcctttcgccgccaattctacctcgcaagaaactaccgaagcgcaacttgccgcgtccgacgcggtcaacgggcgtatttggcggcagatagtgaggcagaaaattttcaatcaagcggctttgctagaaaggctaggtgcgtcagagagcaagcggctgtttaatatggcggaggaggtcaagaattacgacgaaggtaatcttgaagcgcaggcggcaaggatttactttagagcacttgcgcccacgccaagttttgtccgcagtcgagacggggaatggccgaatgtcgcgctaaattacggctatgccatattgcgtgctggcgttgccagagcgcttgtcgggtctggtcttgtttgcgtcaagggcgttcatcatcataatcgctacaatgctttttgtctggctgacgatgttatggaaccatatcgcccatttgtggatcaatatgtcctaggcaaagtgccgccattcgatgtgccggtaaaggaactttgtcccggacacaaaaagcggctgttggaaatgttgacttgcgatgtgacgatgggggagctgcgtcggccgttgatggttgcactttcatacacaacgagttcgcttgccaagtactatttaaaaaagactgaagaattggttttgccgtctttcaaatgatcgagcctgaagcacaagccttatgcggatatcgtgtgatgtggcttttcgttatgtttgacctgccgaccgaaaccaaaaagcaacgcaaggatgcggctatattccgcaaagatttgatgaaagatggattcgtcatgcatcagttttcggtttacataaggcattgtgcaagtcttgagtcggcgaatgtgcatataaacagggtgaagggtatggtgcctgatgaaggttttgtgtcaatagtgaagattacggatgtgcaatacggccagacaatcaatttcaccggcaagttacgcaagccgccgccgcaggaatttgtgcaactggaattattttaaatttgtcggattttgggttttgctgcgaatacaagcggaaatttcattcaagatttatttgggtaagtccttgcaataaagggcgaaatcgctccaatattgcaagacaaatccaaagtgcatcaaatcacaaccggtagctaccggcacagatacaagcggctattgcaagacaaatccaaagtgcatcaaatcacaacacaaggtagctaa

SEQ ID NO: 447 - DNA, 14422 bp, synthetic construct
  source 1..14422: mol_type = other DNA
  misc_feature 1..14422: note = Synthetic
gatttttgctatactatccccgttcctcgaaccaaaggagaaacaaggaatcgatttaaaaccataaacaagacaatttagcgaactgctgaacgacgcaaggagcaatcgacatgccaccaatagaaaccatagcaagacccgtccgaaacaagataagcgttgaaatacccaaacggtatcgcgcgtacgctttcagagtcgtgctagttccgattgttcccgaagagaatcgtggaatggctcgtgcggacgatgagatcgacccgcgcgtacgctcgttgcgcgggttgataaaaatgtcccctggcgacagaatcggtgatgagctccatgacgaaatgatggatcgctacgaggcgctgccatgagattgttcctggcatcctcgtgtatactccaacggaattgctggaaaagcacgcaggcgcatagctaccgatttttgctatactatccccgttcctcgaaccaaaggagacaatttagcaaactgctgaacgacgcctcacgtttccagacgtcgtacgcaacagagaaatcaaccatgagtactggcgaaaatcagattgtcttctatctttcgaggaatgagggtagaaaaaaagcccggcgaaccgggccgcagtctcaaaacgacttcggcatatagccttgttgtgataagatgcggcattatcttaccctaaaacgtggcaacagtcaagagggaacatgatgaaaaaaacactaggtctagatctcggttcgaactcgctcggatgggcgattctcgatgacattacgggcgatatcctggacaagggggtgattgtgttccctgagggggttgaccttgacgcgaaatcttcgacagatacccctgcagccattcgccgtgcggcacggatggcgcgtcgcatgaagttcagaaggaaacttcgtaagtggtatctccttaagaccctcattgatgatgccgagaaactcatcggcacaaaaatgtgtcctctgacactacaggagttggatgaatggaagacgcatggcaagtatcctgtgggaaacaaggcttttcttgaatggcttaaggctactgacgcctccaatccatactgtgatcgcgccacagcagcatcggggaaagtgccacccctgacattgggaagggcgctttaccacatcgcccagaggcgcgggttcaagggctcgcgaaaagacgaggccgaccttgcggacgaaacagcagggcaggagaagcaactcgacaaggaactgggcgcggtcaagacggacatcgagaccttgacgaaagagattgaggcggcgggatgcaagacgcttgggcagtatttcttcaaaaggctccaggacgaaaaggggaaactcgacaagacgcgcatccgctgtagatacaccggacggattgagcactacgagaaagagtttgccgtcataatggatgttcaggggtactcttccggtgacgaattacggacgaaattatacaaagccatattcagccagcgcccgctgcgatctcaggcccatttggttggcccgtgtccgcttgagccgcacaatccccgcgtccagatcggccatccggcgttcgaggagttccgcatgctggcattcgtcaacaacctttcccttgaggatggcgacgggaattgtcgggacgagcagggcaatcttctctacccgctttcagcgaaagaccgcgaaaccatttgctcggtgtttatgaaggccgcgccgtccatcaagtttggcgacgtcgtgaagctgttcaagaaagatccccgcttcaagtcgcaggggctcaagttccattactatcgtccggacgattcagtggcgacatgccagacgcgccacaagattatgtctgcgttcggaagtacgccctacgacgagcagaaggtgtttgacgcgctcacgttcttcgacgacaacgacatgctcggtgcttggttccgcaagcacttcccgaccctcgacgaggcagccgtaaagaaactcgtttccatccatccaaaagagggcaacgccagctattcgctgaaggccatcaacaagatgcttccattccttcgaaagggattcgaactttcgcaggctcgctttctggcgaaactccctgatgtcattccggatttcgccacaaatgagcaatcgatcctgcagggtctggaggaggcgcgctgggcattccgtgaggcgcgacgtaggtacggcgagatggattccgcagatcgcaggcaatccaagtcaccggtgctgtttgacttctatcgggagtacctgcttaacaactggaacgtgacggaagagaagtggaaccaactctatctccacggagaaggcacgtatgtcgcggaaacggaatacgactgcaagggcaagaaagttcgtcttgcccatccccgtcttccccccgtgcagctgggaatgatccgcaatccccttgtccagcgctcgatgaccactctccgccgcctcgtcaactatctgggagatcatggcaagctcgagccgtcggatacggtcaggatcgaactagcccgctcagtcaacgactttgccacccgcaaggcgtggcaggattggcaaaaggcacgtcaacgtctgcgcgctgaggccgccacagagatcgcaaagttgggcgtcgccgtcacggaggacgctgttgaccgctatatcctctggaaggagcaggacggtatctgcatctacacccataggacgatcaacgtggccgatctttttgccggcaacaagttcgacattgagcacacgattcctcgctcactttccggcgacgactccctcgccaacaagactatctgcgaggccgcctacaaccgccagacgaagcagggtcgcattccgcgcgaatgtcccaattgggaagagatcgatacgatgcttcgcccgtggcgcgagaaggtggaacaactagagaagacctaccgaagccaaacgcgaagcgcgcgcgcgaaaacggatcccgcccagcgcagcctggcgcgagtgaaggcgcttacgacgaagttcgaactctcctactggcgcgacaagctcaggcggttcgagatcacctctgacaaactgcagtcgccggaatcggggttgggcgggttcaagaagcgtcagctcgtggatacgggcatcatgtgttcgcatgccgtcgagctgctccgttgcgtctatcccgccacgttctcggtcaacggtgccgccacggcattcgcccgcaaggcgtggggcatacaggacgacgaggcgaaggaccgcacggaacatacgcaccatgcaaaagacgccatggtcattgcggcgctcacccccgcgcgcttcacggccatttgtacggcgctcaaggacgacggagcggaatctcaccgcgaatgcgacgtcagcccgcctccgtacgaaggtttcgcggaaaaagtgcgtcacgcatgcgaagagattcttgtcaagcacgtcatgcggcagacgacccttcgccagagttccaagcgaaacgtactggcaaaagcgcatccccccaagggaaatcccgaggggcctctcgtcaaggccgttctctcacgaggcgacactgtacgcggcgcgttgcacaaggaaacgttttacgggtgtatccagacgccaggccagaacgacaggaagttcgtcgtcagaaagtcgctcgtagggccgatcaaggacgcacagaccatcgtcggcaagattgtcgatcctgccatccgcgacatcgtagacaaacgactcaaggaactgctggcgagtggcgcgaagaatgttgccgccggagacatccggatgtcgtccggcgtgccgatcaataaggtcaggattgtagcaaagacgaccaacccatccgccttgcgcgatcatgcgatgccatccaatcagacctacaagacgccctattatgtgacatccgccgaaggaagcaatttccgtttggggttgtttgacgaggctggacgcgtgtttgccgtgccggacaattcgcttgcttgggcgcagaaccacaagcgcgcagactttcttcctctggacaagcgcgaaggttttgttggatatgttaggccaggtaccatggcactggcgtatcatgaagggcacgaggaagagttagaaacgatgccgagtgctgaattgcgtaagcgcctatacaaggttgtgaagtttgaaagcaatgggcgcattacttttcgcctgcatattgaggctcgtgccagtacggtacttgagagcgaacttaccgccgccggatataataaaaaaggcgaatcgagaatttcctatgatgctccgcatcggcttctcttgctgagtccaggtacatatacgaagcagatgttgttcgagggaatccatttccgcatgatgctggacggttctatccaattcatcaagaaatgacatccgatgattgctcgaacgctagcatttggttcgcccggcaaactcgccatttgtcacagccagcttgtctatgatggcgaaggaggggtgcaccggacgtttcctgtggaggacatcggatttgtcatcatcgaaaccgggcagatggttgtcacgacgtcgtgcctgcaggcgttggcggagcagaacgtggctgttatcatttgcgacgacaagcatgtgccgtccgcccagttgctgccgttcgccgcccattcgacggcgcaggaaaccgttgaggcgcaacttggtgccacgccagcggtacggggcaggctgtggcggcagatcgtccgggcgaagctcatcaaccagtcagagttgcttgttcggctaggccgtcccaatgcgcttcggttaaagactttggcggacgaagtgaagaacggcgatccgtcaaactgcgaagcgcaaggtgcgcgcctctatttccaatccatcaagacagaaggggagtttctgagagaccaggatggcggcggattgaatgccgcgctcaattacggatatgccgttctgcgcgcggcggtcgcgcgagcgctggttggatcgggactcgtttgcttcaggggcgtgcatcaccacaaccgctacaacccgttctgcttggcggatgacgtgatggaaccatatcgtccgcttgtcgaccaatatgtctttggcgatgccgatggcgcgtttgaaaatatggacgatggcctgactcgcactatgaaggcacgcttgcttcagatgttgacctgtgacgtccagattgggtcggtgaaacgtccgctgatgttgggcgtgacttccaccaccgcatcgcttgccaaatactaccttggtaagacgagggatcttgccttgccatcattcgcatgacgctttgttcgcaaacggcactgaacggatacgccatcatgtggctttatgtcatgtttgacttgcccactgagacgaagcggcaacggcatgacgcggcaaagttccgcaaggatttgttggaagacggcttttccatgcaccagtattcggtttacattcggcactgcgcgtcgttggagtctgcgagcgtccatatcgggcgaatcaagcgccttattccagacgaaggtttcgtatcgattctcaaagtgacggacaagcaattcggcgacacgatcaacattctggggcgaaagtgcaagccccgaccgcccatgccggttcagcttgaatttttctgaaaaaaaaggcgcagcgccgaaaaaggcactgcgcattctcttttttctcgcagtgtaacctttggttatgtgctgtcaataaaggccgaacatggtccaatactgaaagcgatagtcaaagagcatcaaatcacaaccgtgcggatgtcgtccgcgatttcctccgactgaaagcgatagtcaaagagcatcaaatcacaacgtgtcgatctccgccgtgagcatggcgttgactgaaagcgatagtcaaagagcatcaaatcacaaccggtgaggtcgtatgccgccatcgcctcgactgaaagcgatagtcaaagagcatcaaatcacaacgtggctggagccttggtttcggtactgataactgaaagcgatagtcaaagagcatcaaatcacaaccctcttccgcaatagcgcaacattccatgcactgaaagcgatagtcaaagagcatcaaatcacaaccgtccacgtcacgtccccgccaacggtgaactgaaagcgatagtcaaagagcatcaaatcacaaccgtggacgtacacgggcatcccctcggcttactgaaagcgatagtcaaagagcatcaaatcacaactcaatggggttgtttaaccctttttcgatactgaaagcgatagtcaaagagcatcaaatcacaacctgcgctctccgcacaactgggggagatgcactgaaagcgatagtcaaagagcatcaaatcacaaccaccggctgtaaaggaggttggaagacaaaactgaaagcgatagtcaaggagcatcaaatcacaacttgttctgttgtaaaccccgccgcacccacactgaaagcgatagtcaaagagcatcaaatcacaacacatggcaacgtgcgcatggtggggacactactgaaagcgatagtcaaagagcatcaaatcacaaccgcagccgtcgcatgggcgatagcggaaaactgaaagcgatagtcaaagagcatcaaatcacaacgctgtgcagacggatagataggaggactgaacccttgccaacatcctttacacagaattgtgttctgagtcaatggctgtgagttaggattgtcaaagaacgacggaaaacagtgtcattataccaaaaaaattggtggtacgaaagatgttgtcggcaatgcgttcgcggcggtgcggttcccgagcatgccctgtcacctctggcgggtggtggaggtggaggggtgagctgtcttttgcgccgccaagatggcggcgttcccagttgggccgcgacaagcgcggcccctcccgtggcggcgcggccggagtccgcgccctacccagtgggcgttctccctacacggagagtttggagttcttatacggcgaagcagatgttctttgcgcggtacgtcacatatcgcgataagtgaagtagcgcgtgatcggcccgaggggttcgattgttccgcaccgtaatcgcacgcgggtttgggacggctccccatgcggcggctcggcgggacgcctcgccccaccacgcggtcatgcgggacgcgtgaccctaccggtaggacaatagaatagaaggcccaaatcccacgtagggaagtcgaaccctccatgtagggaagtcaaaacctccatgtagggaggtcgaaccttcgtagggtctcaaaaatcccctccgtgtagggagatcgaacctccgtagggtctcaaaaatccccccgtcgtagggagagacgcggtcggcttcagcgcggcgaactccggcaaatatcgcagatagggggtatcaaatgtatctcatgggagagccatgagagacctccttatgcgctaaaagggcattcggggtgccggcgtgcggcggcgtcagccacaaggccgacgacatccccgcccctacccccgtcctctacccggggggtactacctcataatacctattatataggtattaggtactagggggtaggggtagggatgtcgagacggcaccccaatgcccggcgggtgtccctacttttcccagttttcccagtgaaccgccaggaggacggccgagaatgtgatatactaatccgcaccatgaaaagaataatactcttagttgtaactaacattgccgtcatgctcgtcttgatggtggcgtttcacgtagtgtgcgcgttcctgggcgtggatccgattgcggcgttcggcggcacgggtctggacatgacgtcgcttgccgtcttctcgctcatcttcggcatgggcggggccgtcatatcgctgctgctttcgaagacgattgcgaagctcagcgtcggcgcgcgggtggtcaacggcaccgagggcgaggcggagcggtggctcgtcgagactgtgcgttcgctcgcggagcgcgcgaacgtgcagatgcctgaggtggcgatctacgagggcgaggccaacgccttcgcgacgggcgcgttccggaaccacgcgcttgtggcggtatccacgaagatcatggagcagatgacgcgcgaggagctgcgtgcggtgttaggacacgaaatgagccatgtggcgaacggcgacatggtgacgacgacactcgtgcagggcgtgttgaacgcctttgtcatcttcctgtcgcgcttcgtggcggccgtggcggcgggcgcgcttgcgaaggacagaaacagccgcaggggagcttcgcgcggcatctactacctcgtgtattacgtgctgcagatggtgctcggcatcgccgcgtcgctcgtggtgtgctggcactcgcgtcggcgcgaatacgcggcggacgccgggagcgccaatctgctggggtcgccttcgcccatgatcgcggctctgcgccgtctggacaacctgcggccggggattctgccagattcgctcagggcgatggggattaacggacggaaggcgtcgctcttcgccacgcatccgtccatcgacgaccgcgtggcggcgctggagcgcattatgcgcggcatctagttagataatttgagatagtttctataaaattggatagcataaaccaccatctgtaggcgcggcggttccgtttttcaggcttggcatgaaatctgctcttgacatcgcgctatggctacttttaagaacatatcgcataatgcggtgcttcgcagggcttttgggtactgggcgaacgtggtacgcaattatgacggattgatgagggaatgggatttcttcgacctcatctggcggtacatgcgccgcgaagaagtggcggagatgcttcgcatccattacaccaaggcggagctgagtccgctcactgaatgcggacgcgaccctcttgaccttgaggtcgacggggtcaacgagatgctcgcacgcatctggaacgagaaacctctccgcaagatgctgcgccgtctccttgagctcatgaagaaccgcatcctcgcccacctcgatgtcggggaggacgatgccgcgttcgacgcgcgttttgcgaatctctgctcgttcatgaacctcaacgaggtggaggcggatttgttcatgctgatgttcgtgcgccgggatacgatcttcgacgacttccccgagaacgagaaaatcatggagcgtccgctgtactacgcgatggccattgaccgctcctactccgaggtgctcaaggccctgagcaaaaagggcaagctcgcgcgttacgggtgcatggacgacgaatactggttcaactacaatgagttcgacgcctatttcacgggtacggatgagtccccgcttgacgagcgctactacaaggtggcgcgggccgagcctctgccgtgggagttcttcggcgacctctcggagaaggacggcgctcttctcaaggagatgctcgccgcccgcgcggccggcggccggctcaacgtcctcttctacggcgctcccggcacgggcaagacgagcttcgcgtgcgcgctcgctaaggctgtcggcggcacggcctacgaactcttgcagggggaacgcgacggaaagaacatctccaccgagtcgcgcatggcgggcatccagattttcaacgagcgtgtcgcgggcgcgcacacgctgcttatcgtggacgaggcggacgagcttctgcgcacgaacgcggaggtgtacggcggcggtacgggaaatgggcacaccgagaagggcgtgatgaacaccatcctcgacggcatgcgcgcgcccgtcatctggatttcaaacgcacccgccgaggtgatggacgagtccgtccgccgccgctttgactactctatctgcttcaaggcgctcacgccggcgcagcgtcaggccatctggcgcaacaacgtccagaagttcggcatgggggacatcatcggcgaccagtccgccgagcgcttcgcggacctctacgagacgagcgccggcggcatcacgatggtgctggagaacgtccggcgtctcaatcccgaggccgggcgggtcgaggagctcgtggaccgcattatgaagccgcactgcgaactcatgcgccgtcccgtgcaggacggcaagctccagccggcgtccgactactcgctcgagggcctcaacatccggggcgaccttgggcttgacaaggtggtgcaggccgtgcgcaacttccaggcccgtcaggccgccggcggcgggaagggcggccccgaccgtccgcgcatgaacctcctcctctggggaccgcccggcacgggcaagacggaattcgtcaagtacctcggttctgaactcaagacgaaggtcgtggtgaagatgggctccgacctcctcgacatgtacgtgggcggcacggaggcgcgcatccgcgacgcctttcaggaggcggctgcggagaaggccgtcctcttcctcgacgaaatagacggcctcgtgcaggggcgcgaacgcgcgtcccattcctgggaggtcacgcaggtgaacgagcttctccaccagatggaaaacttcgacggcgtgatggtgggggcgaccaacttcttcgcgaacctcgaccaggccatactccgccgcttcaccttcaagctcgagttcggttacctcgatacggaaggaaagcgcctcttcttcgagcgcatgtttgcgagccgcctcacctcttccgaggcggcgcgcctcgacgccatccccgatctcgcccccggcgatttccgcaccgtccgccaggcgatgttctacctggatggtgtcgccgacaacgccatccgcctcggcgagcttgagaaggagtcgtccgtcaagcgccagggccgcgtctccgcccccgtcggcttcagcgcggcataagattttgcattggtgtgcagggccgtgttatgctataatggcggcgtcggcgggaatgggtcttgtcggcaaccttgaaagagaaggagcaaaaaaagatgacgaagtacgtgtgtccgatctgcggttacgtgcatgaaggcaacgaaccgccggagaagtgtccgcagtgcggctgcgccggcgccaaattcctcgtgaaggaggctacggacaagatgacgtgggcctgcgaacacgagatcggcgtggccaagagccttgacgccgaggtcgtgaagggcctcgagatgaacttcacgggcgagtgtacggaagtgggcatgtacctcgcgatgagccgtcaggccgagcgcgagggctatcctgagatcgccgacgcgttcaagcgctatgcgttcgaggaggccgagcatgcggcgaagtttgccgagctgctgggcgacgtgctgacgaagtccaccaagaagaacctcgagctccgcgcggcggccgagcagggcgcttgcgaaggcaagctccagctcgccaagcgtgcgaaagagctgaactacgacgcagtccacgacacggtccatgagatggccaaggacgaggctcgccacggcgcaggctttgaaggtctgcttaagcgctacttcaagtaaggcgctgcgggtaaggccctgatgccgtcggagtgatgaccagccgtggaagtgtttttcctgagacatggcgaaacggagtggaaccgcgacaagcggatccagggtgccacggaatggactgacctcaccgacgatgggattcgcgttgcggagtccacccgcgacggaatgctgtctcggggccttgctttcgaccggctctactccagcccctaccgccgagccctgcacaccgcgcaggtcatcggcgcggggttgggtctggagcctgtcgtggacgttaggttgcgcgaaatctcattcggcccctacgaggggacgcactacggcgaagggcgtttcgcggatgacaacattcgttgttgcttccaggatccgccccgctacgtcgcaccggaaggtgccgagtcgttcgatgccgtcgcggcgcgcgtgagaaaattcctcgacgacgagcttgcaccgctatccgggcgcttcgcgcgcgtgcttgccgtcgcccacggcggcatcctgcgcacggttctgcgccttgcggcgggaatccccctgcaggacttctggaaggggacgcagcccaactgctgctgccacatcgtcgatctttccaacggccgcctcacgctcaaggcccgaagcgtcgtattccgatgacccgatgtggggcgagtcctgccatcactacgggacgggaaccaccgggccgggatcaggggtgggattgggctctgggtgcggctcctcgtcgcagatgacgctcacgcgcacgctggtgtcgtcgtacagcacttcgtacctcacgtttgtgccttcggcctggccactcacgcaggtgttagtccatgcgctggtgatcgtgccgaatccgctggcgatcgtgtacgtgttgccttcgggcgtcgcggtgtcgccaatcagcttaaggctgccgccattgatcttcagctcggccctgccttcgccggacagcgcggccgcaccgttcagcctgccaagatcgacgatcagggtgccgccgctctgcacgaacgcgccggtgtgtcgcagggtctgttcaagcgtcagtttcgttcccgtgccggacaggacgcttctgtacgtactgatctcgcgcgcaaaacggacgtcgccgccgttcacggtcaggttggtcacatacagactgccgtcgccttcaaatgtgtactcactgccgttcacggtcatcgaggacgcctggagggcgccagccaatgtgacagttcccgcgtttttcgcagtgaacgtcacgctgtcgccattgtggaagtcggcagtggtgccgtcggcgtcaaccagccagttacgttttccgtcatacgctttccactgggtgctgccgccgttccaggtgagggcgtagttgatggacggcgtgacgacgtcagacggcaccggggcggcgacggcgatacaggccttgatgaaggagccgcatgacgacggaacggcgatcgtcgcggcgccggcggagtatgtgacgttcgccgccggaatcgccatcggcgtgagggcgtccagcgcgtcgcccgcctcgacgcagatcacgccgttgatctgcgaaaggtcaaccgccgtaccgcccgccgccgcgaccacgcggattgtcgcgccgccttccgccatctcgatgccgtcgatgcggagctcggcgggcgtcgccgacggcgccacgttcaggagatactgctccgtatagtccatagaggcatagtcgctcacgcttttttcataaacccacttccagaacttcacgtcgtcagcctgtccggcccacgcgggcttgacggcattgaacatgttggtgaccgagccggcaatgaaattagtgctcccggcggagaaggaaatcgtgccgttcacctcgtcgtagagtccggcgcgattgtccttgatgcagggaaggtagtggcgcagcagatcgaactcgccggtcgtgtcgttcttcttgaatatcttcatttcgtagagcttgccctggcccttccaatctggcctcccgccgtagttggtggcgaacacgaagaggttgaggtgcaagttgacaattccgttcgtcgcgaaagtctcgcggtcggtggcatcgaaggtgttcatgccgttctgtatcagctcaaaggagttggtgctcgacatgtccgtgatgatctcgcaccgttgcccgccgacgaaggagacagagttagcgggattccggcgctgcttgagtccgtaggcaaaaaacggcttgccattgtacatgtggcacaagaagatgcgggaacgattatccgatttggcggagaccgtggccgcatcaaggagcgaccagtcgggattgccagaaaaggtcgcccacgcgaagtcgatgctggccttgagaccgatctcggcgttgacgcccgtgtcgatgtactgctcccccgtcgcctcaatgtagtcgagcaaggcgtccggctcggcggtgacggtttctccggcggcggcgcaggtcgcgagaacggccgcaaccgcgatcatcgcggcggcagttgagcgaaagattctcgttttcattcgtcggctcctatttgagcaaaaggacagaagacaaaggacagaggatttaggacaaaggacagaagacagagtattggactggatggtgctttgcacttcacagccacctatcctttgtcttctgtcttttgtcctctgtcctctatccatcctttgtctttcgtcctctgtcttttgtccgttctcccccctcactgctccaccgcgcggaggcggaagaatcggcggtttttgtcggtttcgttgatcaccgtctcgccggagggattaagcg

SEQ ID NO: 448 - DNA, 11368 bp, synthetic construct
  variation 5329..5456: note = n is a, c, g, or t
  misc_feature 1..11368: note = Synthetic
  source 1..11368: mol_type = other DNA
ggtgggcgttccggcgcaacggggtgggcgttccggcgcaacggagtgaacgcgcggggtgtcgggtgcgttaaaaagaatatatggagcgtattttctttttgggcgcggcgtttttcgcggcgatgggtggatttgccgcggaaagttccgcgacaaacggcgtggcgtatctgggcacggttacggtggaggggacggcgctttcgacgtaccgcgcggaaaccgtgaacggggggacgtatacggacacgccgccggagaagttgccggtcgtggtggacacgctgacggaagatttcatcgaggagcacaatccgaccgacctgcacgatcttctgcgctatgtgccggggatcgaaacaggcgggaaatcgctgctcatccgccagccggggacgttttccatccgcgggtttggcgggacggagccggcgtttgacggtgttttgccgatcggacggggtgcggggctgttcatggatccgtttttgatggagcgggtggagatcgtgaagggtccgctcggtgcgctcgggggcgggcaaggggcttcccagaacgccgcgggggcgggcggggcggtcaacctctatctcaagagcgccacgacggcgaaagacgagacgaatctggagggccatctttccgtcgggcgccatacgcgccgcgaacgcggcggactggacgtgaaccagacgtttctggacgggaagggggcggtgcgcgtgttggcgacggccgactgctatacgcccgcctatatagaggagggttcccagaagggggcgcgtccgcgggaatcgttcgcggtggcgccgagtttcgttttcgagccgggcgaggcggtgcgtttcgggttgaagacgctcttccagtacacggaccagcccagctacatcggggtgccggtctggcgggggcgtccggcgggcgggtacggctggcacgaatcgtcctgccggcgcggggatcgttccgcgtatcaggggtttctggtcaatccgtggctggattggcaggtcacggacgcgtggttgctgaaattcggcgcggcgatgctggtttcttcctgggcgcagacgacgcgggaaccgtatgcggcgacgcgcggggacgaattcgaccatttctgcgagacggggctgtggttcccggtccacaataccggcgacggacgctatacgacaacgcaattttccgaaagttcgagtctcagccgcaattacaacacgtttgtgcgttccatctacacgaaagagatgggctggggcgcgacgaacgccctcgtgaaccaggcggatttcaactaccgcgaggccgggggcggtttcggcacgcccacggcgcgctatgggacgcttttccaggattccgtctcgtggcgggggctcacgctcctcgggggtgtgcgctacgaccacttcgaacagcaggcctacaccgccgggacggggacgcgctaccggcaccagacggcggacgccgtttcgccgcgggcgggggtagccgtccagcccctcgactgggttgttcttttcgggaactattcccagacgcgcacgccgacgctcgggtaccgcaatgcggacggttcttcgccggatagcccctggatcgccgaacaatacgaggcgggcgtgcgcgtttcgccggcggagcggctgtggctgacggtatccgcttaccgtatcgagcaggaaaacgtgcccacggccgacacggcgaccgggttctacacgtatgacggacgcagccgttcgcgcggggcggaagtttcgctgacgggggatattgcggaaaactggacggttctggcgctttacgccttcacgcaatacaaggattgcaccgtgccgcccggacaaaaaggacgcgatttcgcgcggtatcccgcgcacgccttttcgctgaacacgtcctaccgaatcgcgaaaggtccgctcgcggatatcgtgttgggggcggggtaccggttccgttccatgagctacgcgacgctgcgcggcaaattccaggacgagaatctgcggtttgatccgtcccatctggtggacatccgcgtggcggtgccgctggcgaagttcggcgggccggaagactggacgttgacgctcggggtgcgcaatcttctgggggagacgtatttcgagtcggcgcggcacttctacgagtgtctggcgggtgaggcgcgaacattcgaaatcggggtgcgcgcacggttttgaggctaaaatacgcgtttggacgcggggagaacggcaatggaagcactgaaggcggtgtccgtcacgaagaaatacggcgggcggacggtactggacgatttttcgcttacccttgaagcgggcggattcgaggcgctgatgggtccgtcggggtcggggaagtccacgtttctgcatgtggcggcggggctgctgggggcggattcgggcgagatcgcggtgggcgggacgctcgtcacccgcctttcggacgcggcggcggccagattccggcggcggcacatcgggttcgttttccaggatttcaacctgctggaagagaagacggtggcggaaaacatccttttcccgctcaaactggaccatgccgcggcggatccggcgcggtgggcgtggctgacggagacactggggctcggggacaagctcgggcggcatccggcggaactttcgggcggggagcggcagcgcgtggccatcgcccgggcgcttttgccggaaccggacatcgttttggcggacgagccgacggggaatctggatacgcaggcggcgaaagggctctgcgggcttctgcggacgctgaacgcggggggtcaaagcgcgattctggtcgtgacgcacgatccggtcgtcgcggcgcacgccacgaacgtgaacttcctcaaggacgggagactggcggcgagccatccgaccgggggcgacccggcgcgcgtttcgcggctctatctggagacgtattcatgaaggcgcggagtttgtgcgccgtgctcgggattgccctcgccgcggggacggtcgttttcatgcgggcgcttgtggcctccaacgacgcgcaggcggaagccgtcgccgcacggcttttgcgggaagtccccgtggaagaaggggcgcagacgtggcgaagcgcgctggattaccgtccgggcgggcgggtaatgcagggtccgccggtgcggtgcacgttcgcgacggcgtccgccggggtggcgaccggggaggtcgtggtcagccgggcgcttttcgcgcagcggcggttggcgccgccgccgcgcgggacggaattgacgtttgtcgggcagaagggggcgtaccggttgcggctcgtgaaaatactcgactgggaccgtcccgtgcgggggtatccgaacgcgttcgtggcgcgggagacggccgcggcgattggggaggaatggacgccctaccgggcgccaaccgccgcggaactcgcgccggggttccgcagcgacgcggggcgcaacttcgaccgggcgcggggacttctgctttgggccgcggcgttgacggcgctcgggctactcgtccagacgctgtgcctctcggtggaagcgaagcggcgggactacgcgatccagcgcgttttgggggcgacgcggggcaggatcgtccggcaggtctggggcgaggcgtgcgtgctggggctggccggctatggcgtgggggcgctcggggcgagcgcggcgctttgggcgtacacggccgcggacgcggcgcttttcccggaaggcggggttctgccgctttcggcgttcggaatcgccgcggcgctcgtcctgggcgcgacgctcctggcgtctttggcggcgctgcggccggcgctttcggtcagaccgctggaagcggccgggctgcgtccgtcgcggcaccgtccgtgggggatggttctggcctacgccctcgggttcgggggtttcgtcgccgtcgaagtgtggggggcgtccctgacgcaggcgttcgtgccgtccaaggagtggccggacgcaatcgtgtcgattctgccggcgggcgtgtcgagtttcgacattgggaagctgcgcaagctggagggggtgcggcggatttcggagcttcagccgctgcaggtcaatctgttcccgctggaggaactcgcggggcggggttcgggcggcgggcgcggcaaggcgtaccgcaacgcgcttctgctcgcgagcgactacgtgccgccgttccggttcgcggccggggaccgtgtggcggcgacgaacgcgcttttcgcggggaatgcgtgcctcgtgacggagatgatggcgcgggcgcggcatttggcgctcggcgacagcctggaactggcgtgcggcaagggcgagaggcttgcgctgaagatcgccggaatcgtcgacctcaactggcacatggtgaccagccgcggacttttgcgcggactcggccgcatgcccgtctacaccgacggacccgttttcgtgagcttcgatacgctcgccgcggcggacaggcgtccgcaagcgtttgtgccgatgacgcacctgtggctcgattatgaaccggcattcgtggcgaaatacggcgtgttcggggcggggcggcgcgtggagcgggagattgtgtccgccttgaacggcgccaatctcgtcacaaaggaaggtgaggtgcgcggcaacacggtgcggttgcatgcgcgggacgaagtcgccgacgggacgctcgcccacagcagcgacctcgtcggatcgctcgcgcacattcccttcgtcttcgtcctcgtcgtgtccctcgggttcgtttcgcttctggcggcggacgccgacgcgcggcggcaggcgttcgcggtccgccggacgctgggcgagacgcgcggacagctcgcggcgcttctgttcgcgggcgcgctcaaggtggcggtcgcggggctggcgctggggctcgccggcggggcgctggcggggtggctgtgcacgttcgggacgcggcggatgatggcgaattgggggctcccggccggattcgtcctgccggcgcgtccgcttatggtggggacgctcctcgcgttgggattcgtgtgcctcgtcgccgtgccggtcgcctggggactcgtccgccgcctcgggggtaaataactcacgcagagacgcagagaacgcagagagtggggcttattatatttaaccgtgtagagaatgtagaaaatgtagggggggggctatcgatagtagccgtggagatcaggagaatggggagagaggggggattaattaaccgtgtaggaagtgtagagaatgtagaagggcggcttggtggccgtgggtcgtccaacggtnnnnnnnnnnnnnnnnnnnnnnnnnnnnnnnnnnnnnnnnnnnnnnnnnnnnnnnnnnnnnnnnnnnnnnnnnnnnnnnnnnnnnnnnnnnnnnnnnnnnnnnnnnnnnnnnnnnnnnnnnnnnnnnnccgtgtagaaaatgtagaatatgtagaatgggtcgcgtactacttgtcctacctgtcccgatcctccccccagcctttgccacccgggtattttcgatcaaaggatcggctgaatttgcagatgacaataaggtgaggaaatgctataatgcagatgtatgtgcgtgagcagtctggcaaatggtaaaaaaaatggaccccaagaaggggcccgcagtcttacaacgacttcggcatatagccttgttgtgttaagatgtatgagtatagtataacatattttcagaagaatacaagagggaaaatgaaatgaataaaacattaggaatcgacttgggatccaactctctgggctgggcggtgttggacgaaacgctgaagctggtttccgcgcagggcgtcgtgatcttcccggagtgcattggaattgataataaaccgacggaaaccccggccgcgacgcggcgcaaatatcgcatggcgcggcgcctgaagttccgccgcaaggcgcgcaaatggaaattgctgggaatcctcatccgcgagaagatgtgcccgctgacgctggccgaactcgacgcctggaagacgaaaggaatctacccgctcgcgaacaaggcttttctgggctggctcaaggcgactgacacttccaatccctattgcgaccgtgcccgcgccgcggaagtgaaagtccccctcgagacgcttggccgcgccctctatcatatcgcccagcgccgcggattcaaaagttcccgcaaggaagcgccgcccgacacgggcgacgaggacgagaacaagaaactcatggagaaggcgcaaggcgtcgtggaaagcggcatcgccgaactgtccgccgccatcgagaaatccggcgcgaagacgctcggccagtatttcttccgcctgcttgaggaggaccgcaattcgcccgagaagcgacgcgtgcgcaaacattacacccaccgcgtcgaacactacgaaaaggaatttgccgtcattatggactgccaaggcattccatccggcagcacgctgcggaaagacctctattcggcgctcttcatgcagcgtccgctccgctcgcagcggcatttggtcggaatgtgccccttggaaccccagtcgccgcggacattcgcggggcacccgctcttcgaggaatttcgcatgtgggcgtttgtcaacaacttgaagttcgaatcccccacgggcgaggaaatgccgctcacacccgaagaccgtgcccgcgtggccggggcgttcgactatggcaaaaccacattcaagttcaagcggataacggatttcttcaagaaagacgatcggtttaaggactatggctggaacaagccggagggctggcacttccaccactacaaagacgcggaaacactcccgagccgctctgtagggtaccgcctgcgcaagtacttcggctccatcccctacgatgagcagcaggtcgtcaacgcattgatgttctacgaagatgtcgaccggctgatcgggtggctcaagaagcactatcccgcgctggacgacgccgcggcaaaattgctcgcgagcatacgtccctcggaggcgaccgcccaatactccctgaaggcgatcaagcgcattgtgccgttcttgcgcaaaggctatcagctgtatgatgcgaccctgctcgcgaaactccccgacttcatcgccgacttcgactcgcatgaagacgagatttgccgcaatctgctggaaattcggcaccgccagaaggaggcgcgcgaggcggcctattcgacgggcgaaaaggtcgtcccgtttctggatgtgttccaggactatcttctgacccactggggcgtgacggaggaccagttcaagcaactatatgtcctgcgggacagcccctacaaaacgggaaaggaaggacgcattccggccgtgcagctcggcatgctgcgcaatccgctcgtgcagcgcgcgctgacgacattgcgccgcctcgtcaactatctgcacgaccatggcacgatagacgaagacaccgcgattcacgtggaaatggcgcgcagcgtgaacaactacgccacgcgcgtggcctggcaactctggcagaagaaacgccaggaagcccgcgaagaggcgcgcaagacgatagaagagcacgggtgcaaggttacggaagacgccatcgagcgctgcctgctctggcgggaacaggacggaaaatgtctctatacggggaaaagcatcggtattgaagaacttctgggcggcaacgcgttcgacatcgagcacacgattccgcgttccaaatcgggggacgattcgctcgccaacaagacgatctgcgaggcgcggtacaaccgcgacgtcaagaaagggcgtattccgcaggagtgcccgaactatgccgagatcgaaacgcgtctgcgcccgtggcgcgagaatgcaagccggctcgagaaggatttcctgtcccagaaggccaaaagcaaaggcaatcccgaggcgcgcgccaaggcgctggccgtcaaattcgaactcgactactggcgcgacaagttgcgccggttcgagattacggcggacaaattgaccgatcccagggaagggctgagcaagttcaagaaccggcagctggtggataccggcatcatgacgaagcacgcgaaagcgctcctcgagacggtctatccgcgtgtcctgatggtgaacggcgcggccaccgccttcgcccgcaaggcctggggcctgcagcccgcggacgaggcgaaagaccgcacgaaccacgtgcaccacgccaaggacgcgatggtcattgccgcgttgacgcgcgcgcgcttcaacgcgatctgcaccgcgctgaaggacgacgcgcatgcgccaaagcgcgaatgcgatgtgtgcccggcgccctgggacggattcgcggacgatgtccgcaccgccgcggagacgatcctcgtcaagcatgtcttgcgccgcacgacgctcaagcagagctcgaagcagaccgtgctcgcgaaaccccatcccgaccagaagcaccctggccggatcgtcaagtacgtccatgccaagggcgacaccgtgcgcggaccgcttcacaaggagacattctacgggtgcattcaaaagcctggcgaggacaagaagtcctatgtggtccgcaagtcgctgattggttcgctcaaagcggcgctgaagacggacaaagacattgtcgatcctgccgtccgcgatttggtcaaggagcaactggcggcgttggagagccaaaacgaaacgaacgtggaacccgggatgatcaagatgccgtccggcgtgccggtcaacaaagtgcgtgtcattaaaggagacgtgaagaatccgcagcggttgcgtgtgcatgcgatgtcctcgcgtcatgattataaaacgttttattatgttaccgtagcggaaagatcaaacttccgtatgggcgtctatgataatgacggcaaactttcggttgtgccggacaattccctcgagtgggcgcagaaccacaagaagacaggctacaagacgctcgacaaacgcccgggcttcatcgggttcgtctaccccggctcgctggcgctaacccatgcgacggggaatgcggaagagttgcacaatctgccgccgtcggaactcgccaaaaggctctacaaggtaaggaatatcgaggggagcggacgtttgaccctgtgtctgcatacggaagcacgcgcgagtacgcagcttagtgccgatataaaggaagcgaataatcatctcgcacctggtgagatgaagaaaagtcctacgggcgaatccaagatcgatcttaagcatccgcacgaattgctccgtgtcagttctggcacctacttgaagcagatgatgttcgagggcatccatttcaagatgatgctggacggcacgatccggttcctgtaacaccaaatcgagaaaggaggtgcgcatgattgcgcgcacgcttggcttcggttcgcccgggaggttatccttccggctcgaccagctggtctacgaaggggaggggaatgtgcgtcgcacattccctatggaagatgtgggcttcgtgctgatcgagcatccacagctcgtgatcaccgcgacgtgtcttgcgaagctcgccgcggcgaacgtcgccgtcatcgtgtgcgacggggcgcacatgcccatcgccgcgatgcaaccctacgccgcgcatacgacggcgcaggaaaccgtcgccgcccaaatggcggccacggaagccgtcaacggacggctctggcgccagatcgtccggtgcaagatcctcaaccaggcggccttcctcgccttcatggggaagtccgccgcgggccgtctcgagacactcgcggacgccgtcaagaaccgcgacgaggcgaactgcgaggcgcaggccgcgcgactctatttccaaagcctcatgccccccggcgtcacacgcgaccccgagggaccttggcccaacggtccgctcaactacggctatgcgattttgcgggccgccgtggcgcgcgccttggccggctccggcctttcctgcctgaagggcatccatcaccacaaccggtacaatgccttctgtctggcggacgacatgatggaaccctatcgcccgttcgtggaccgctatgtgctgggcggcgtgcggccgttcgatgtgcccgcgaaggaactttccaaggagggcaaaatccggctgctgcagatgctgacgagcgacgtgacgctggaaggcttgcggcgtccgctgatggtggcgctctcttacacgaccgcgtccctcgcacggtattacctcgggaaggccgacaaactcgttttgccgcaactggatgcctgaacttttccagaaagcactttccgcctataccatcatgtggctctatgtgatgttcgatttgccggtggaaacgaaacggcaacgcaagaacgccgcggacttccgcaagaacctgctgaaggacgggttcatcatgcaccaattctcggtctacatacgcccgtgcgccagtctcgaggcggcgcaggtgcacgtcagacggatcaagctgttcgtccccgaggagggacttgtttccatcctgaaagtgacggacaagcaattcggcgatacgatccacttgaccggacgcaagcgccaaccgccccgtcccacgcccgtccagctcgaacttttttgacaaaaaagaaagggagccttctaaaagaggctccctttacgcaaaaatatccatcccgaaatcggtgaatgggcccgtcaataaagggcgaaaccgcgccaatattgaaagacacattcaaaatacatcaaaacacaactcacctgcgagccgttcgtcaccgcgacaattgaaagacacattcaaaatacatcaaaacacaacccgatcagcgcggcatgggacgagtactgattgaaagacacattcaaaatacatcaaaacacaacggtagtcccccttgacctcgatgtaggcgcattgaaagacacattcaaaatacatcaaaacacaacggcgaggatgtagtagtttatcgggatttattgaaagacacattcaaaatacatcaaaacacaaccgagtgggtgggcatacacctcgccgaggaattgaaagacacattcaaaatacatcaaaacacaacagcacggcgaacggcgcgtatacgtcaagtattgaaagacacattcaaaatacatcaaaacacaacgcgagaggtacagcgcgagccagcacagcgattgaaagacacattcaaaatacatcaaaacacaacagatgctgttcgtggtcgcggccgtgtttaattgaaagacacattcaaaatacatcaaaacacaacacggcgacgacggcatggtcgacaaccgcaattgaaagacacattcaaaa

SEQ ID NO: 449 - DNA, 5648 bp, synthetic construct
  source 1..5648: mol_type = other DNA
  misc_feature 1..5648: note = Synthetic
cttcatctccaacggccaaaaccctcttggagcccgcctgtatcgccactacggaaggctctctcaatacaattccacgatccctggcgaacaccaaagaattggcagtaccgagatctataccgatatcggtagaaaacaaagatttaagcctattgaacatgctatgtctatctccaaattatttgtatatattataccgaatatctgttcatttagtcaagttggcatatcgcttctcttagccaacttgccccttctcccttctcacttctcacttctccctcgtcccttctcccttctcacttctcacttctcactggtcccttgtcccttgccccctaatttgctataatgaagtcgcgtcaggttatatgcaatgaggtatgaaaaactaaaaatgacagacttgaagaacagaaaaataaagaagggtcacctaagtgacccgttagtcttatttgaaacgacttcggcatatagccttgttgtgataagatgtaataatattgtatcattattttcaatgggatgcaaccgcaagtgggcaatggagatttgaagaaaggattagtataaaaatgaacactgtattaggcttggatttaggttcaaattcgctcggatggtcagtcatagatgaactgacgaagaaaatagtcaaaagcggagtagtcatattcccggaaggaatcgagcgagagaaaggaaatgacacaacccaaaccccggcagccacaagaagaatataccgggcggcacgaagactgaaattccgccgcaagctccgcaaatggaaattgctggagacgcttatcgacgaagggatgtgtcccttgacgaaagaagaattggcatcgtggaaacttgacggaatctatcccctgcaaaacaaagaattcatcaaatggttgaagtctaccgataaaacgaatccataccgtgaccgcgccaatgctgcggcgatggcagtggacaaacaaacattgggacgtgcgctataccatatttgccaacgccgcggcttcaaaagttcaagaaaagacgccggtgaagataccggcgatgaagtcgaaaacaagaaacaactggaaaagaataccggtctggtaaaatcgagcatcagcgaattgacaaccgcgatggaaaatgcgaattgcaagaccctcggagaatacttctgtcaaattatcgattccgaaaaagactccctcgggaaaacccgtatacgcaaacgctatacaggcagaatcgagcattacgaaaaagaattcgcgataataatgcaagcccagtcgatcgataaggattctgcattgtggaaaaagctctatcaggccatcttcatgcagcgcccgttgcgttcgcaaagatttctggtcggcaaatgtcctttggagcccaagcaaagcaaaacatttgccggacatcccgatttcgaagaattcagaatgctttcgtttgtcaacaatctgtctttcgtagatggagacggcaacaagcagccattgactgccgaagacaaggagttggtaaaaagcgcctttatgcgcgcttcggctatatttcagttcaaggctatcagcaaattgttcaagaccgacaagcgattcaaaactcaaggttggcgcttccattattatcgcgatgaagagacgctgccaagttgctcggtttcacaccggttatccgaaaactttggcgacacaccttacgatcgggatatggtggtcaacgccttgatgtttttcgaggatctggacaaactggaagcctggtttcgcaagcacttcccgtcattgagcgaagaacaagttcacaaactcgcagccatacgtccgagcgaagcaacttgcaagtattctctaaaagccatcagaaagatattgccgcatttgcgtgccggtcttcaactctatgatgccaccttattggcgaaattgcccgatataataccggattatgacgcgaaaaaagattcagtcaagttggcgatagaagaagccagatatctataccgggaagaaaagcggcatgccgccgaaaatcgaatgcagcgtgtcatgccatttctcgaccggctgcaagatttattgctcaatagatttggcgtaacagagcaagcatggaagaaattatacgtaatcaccgatagcccctacaaggtcgagaaagaggggcgcattcctgaagttcaattgggaatgctcagaaatccgcttgtgcagcgctcattgaaggtattgcggcggctcgtcaaccatctccacgatgatggcttaatcgactgcaatacggcaattcgcattgaattggcccgaagcgtcaatagctatgcagagagaaaagcttggcaaaattggcaggatgaacggcgcaaaaagcgcgaggatgccaagcgccagcttgtcgacgagtttcatgtcaaaccgaccgaagatgctatcgagcgctggatactgtggaaagagcagaatgaaaaatgcttgtataccggagagacaatcgatgtctgcgaccttttctcgaaaaacaccccatgggatatagcacacactatcccgcgctcgcgttccggcgacgattcctatgcaaacaagacaatctgtgcttctcattactatcgcgaaattaagaaagggcgtcttccggcggaatgtccaaaccgcgatgaaatagaaatccgactccggccttggcgcgaaaaactcaaagcgctgagaaagcagtacttctcgcaaaagaaaatcaagggcaatccggatgcgcgagccaaggcactcgccaccaaacacgaactcgattattggcgcgacaaagtgaaacgctttgaaatcaccgccgacaaattgaaagctcccgaaaacggcatcagcggtttcaagaagcgccaattggtcgataccggcatcatgtccacaaaagcagtggaattgctgaagagcgtctatgccaaagtatatgcagtcaacggcaacgccacatcgtttgcgagaaaggcttggggcttgcaggaaatcgacgaagcgaaagaccgctccaatcacgtccatcatgcaaaagatgcaatggtgattgccgcgctttcgcctaagcgcttcaatatgatttgttccgctctcaaagatgacggcagacagtatgcgaaagaatgcaagctttgcgcccagccatgggagaatttctccgataacgtgcgctcggctacggcagatatattagtgcgccatatcttcaaccgtagaaccacgaaacaaagttcaaagcaaacggcacttgcccatccccatccgcagaaagacaatcccgggaagatcgtcaaatatgtcaacggtcgcggcgataccgttcgcggtcagcttcacaaagagactttctacggttgcatcaagaatccggaaacaggtgcgaaagcgtatgtagtcagaaaaccgcttgaaggcaagatatccgaaatcaaaaacatcacaccgaagattgtagaccccgtgattcgcaaaattgtcgaagacgcaattgcggaaatggagaataacgacattaccgcggtaaaacctggcgacataaaaatgccatcgggagtccctgtcaataaagtgagaatatacgccaaagtgagaaatccaaatgaattgaagccacatctgataccttcggagaaagactataaaacgccatattatgtggtgacaggcaggggcgccaatttcagaatggcagtcttcgaaaagaatggaatacgctcagtcgaacatgatagcgcgcttgattgggctcagaatcatcaaaagaaggattatgttccttttgacaagcaacctggttttatcggctatatctatcctggcacaatggcattgacttgcaaagacggcaatgtcgcagagttgaaatcgctgcctggctccgaactttccaagcacctctataaggtggtaagatatgcaggaactgcaaaccaaattacctttacgctgcacaatgaagcgcgcgcgggcgtagaacttgacaaggctcttctggaagcaggcaaaaacaagagtggatcttcaaaaatagattttgaaaatcctcatgaaaggctttacgtctatccaggcgtttatctcaggcaaatgatattcgaaggaatagatttcaacatgaagatagacgggacaatagtattcaaaccagaaagaaagtagaaaacatgattgcacgaaccctttgcttttcttagcctggaaaactatcgtttcttcttgagcaactcgtctttgacggtaaagacggcaaacacggaacttttccggtggaagacttggggttcgttataatcgacaatccgcaaattgtgataacagcgccatgcctatccaaattgagcgaggcaaatgtcgccgtggtcatcacaaattccctccacatgccagtcgcgtcattgatgccttatgacgcccactccatttcacacgaaatatttgccgcctaaaatgccgcaactgaagcagtcaacggacgcctttggcggcaaatagtccggcaaaaaatcataaatcaggcaatgttattgaagggattgaagaaagatggtttcgacaaactcgaaggcttggcagagaaagtcaagaacaaagacgaacaaaactgcgaagcccaagcgacgcgaatatattttcaagcgctactgccgccgggtgtccatcgcgatccggatggagcatggccgaatgccgcattgaactatggctacgccatattgcgcgctgcgattgctcgggcactgattggctcaggtctcctttgcatcaaaggcattcatcatcataatcgatacaacgccttttgcctcgcggatgacgtaatggagccatatcgcccgttcatcgatcagtatatcttcagcaaggtgaaaccgttcgacatggaatggaacgaagtaagccaaccggtaaaggcacgcctcttggaagccctcacttgtgacgtctcgcttgacggaatgcgccgtccgttgatggtggctgcaacctggacttcggcttcactcgcaaaatattacttgggcaagaccgataaactatccttgccttcattctatgattagcccaacccaaaacgctctaaacgcatattccgtcatgtggttgtttgtcatgtttgatttgccggtggaaacgaaggcgcaaagcaaagttgccgcacaattcagaaagtgtcttctgaaagacggttttataatgcatcaatattctgtttacataagaccatgtgcaagccttgaaactactgaagtccacataaaaagaataaaaatgctcgtccccgatgaaggactcgtatcaatcgtaaaaataaccgataaacagttctcggacacaattcaatttgtcggaaaaaaacgaaaacccgagccaaaaggctttgtgcaactcgaattttggtgattttcttccgccgaacacttccgcataattgcagacaatcatcaattttcatctcatttactcaagatagtttatcagtaaaggcggcttttatccgccaatactgaaaacgaccctttttttacatcaaatcacaacaatatacctggacgggtctctttcccgcttgactgaaaacgaccatttttttttttttttttttttttttttttttttttt

SEQ ID NO: 450 - DNA, 23600 bp, synthetic construct
  source 1..23600: mol_type = other DNA
  misc_feature 1..23600: note = Synthetic
tatggagaccttcttcgttaactcgctgtggaaggatcacaaggttaacagctgcagcacacgcgatgccaactacgtggtagatgagaagcttaagttccgcgtgatagatgccaaggccaccggcaagcagcgcacgtcgcccgacatcatctatgcgcgttacaataccgagattggaaaggacaaccagatacccctgtggctactgggattcctatattaataatgtacgagtctattaagtaaaagttacacatatagttattcatttttttatagttatcaaagacaatggctaaagaaaagaagtttatcacctgtgatggtaacgaggctgcagctcatgtgagctatatgttctcggaggtagctgctatctaccccatcaccccgtcttcgccaatggcggagcatgttgacgagtgggctgcacgtggtcgtaagaacctgtggggccagaacgtctcagttcaggaaatgcagtcagaggctggtgctgccggtgccgttcacggttcgctgcaggctggtgctctcaccactacattcaccgcatctcagggcttgctcctgatgatccctaacatgtacaagattgctggtgagttgattccttgcgtattcgacgtatctgcccgtacgctggcttcacactctctgtgtatctttggcgaccaccaggacgtaatggcttgccgtcagaccggttttgctatgttctgctcaggttcagttcaggaggttatggaccttaccgctgttcctcacctggctaccctcgagactatggttccattcgtaaacttcttcgatggtttccgtacctctcacgagtatcacaagattgagatgatggacatggaggatatccgtcctctggttaaggaagagtacatcaagcgtttccgcgatcgtgctatgagccctgagcgccctgtaacacgcggtaccgccgagaaccccgagaccttcttcacacaccgcgaggccagcaatccttactacgatgcagtacccgaggtagtagagaagtacctgggcgagatctctaagatcaccggccgtgagtaccacctgttctcatactacggagccgaggatgccgatcgtatcatcatcctgatgggttcggctaccgatgcagctcgcgaggctatcgactacctgaacgcaaacggtcagaaggttggtatgatctcagttcacctgtatcgtccattctcagttaagcacctgttggctgctgttcctaagacagttaagaagattgccgttctggatcgtactaaggagccaggcgctaacggcgagcctctgtacctcgatgttaaggatgccttctacgatgttcaggatcgtccagttatcgttggcggtcgctacggtcttggtagccgcgacaccacacctgctcagatcatcagcgtgttcaacaacctcgctatgcccgagccaaagaaccacttcacagttggtatcgtagacgatgttaccttcacctctctgcctgaggttgaggagatcgccctgggtggtgctggcatgttccaggctaagttctacggtctgggtgccgatggtaccgtaggtgctaacaagaactcagttaagattattggtgacaacaccgacaagtactgccaggcttacttctcttacgactctaagaagtcgggaggtttcacctgctctcacctgcgtttcggtgatacacctatccgctctacctacctggtaactacacctaacttcgtagcttgccacgttcaggcttacctgcacatgtacgatgttacacgtggtttgcagaagaacggtcagttcctgctgaacactatcttcgacgccgacgagctcgagaagttcatgcctaacaaggtaaagcgttacttcgcacagaacaacattactgtttataccatcaacgctactaagattgctcaggagattggtctgggtaaccgtaccaacactatcctgcagagtgccttcttccgtattactggcgtaatccccgtagagctggctgttgagaagatgaaggctgctgccttgaagtcttacggagctaagggtcaggatgttgttgataagaactatgccgctatcgatcgtggtggtgagtatgttcagcttactgttaagcctgagtgggctaacctgccagatgatgaggttaaggccgacgacgctcctgcattcgttaaggagctggttcgtcctatcaacgcacaggccggtgacttgctgaaggtttctgacttcgttaagcacaacaccgtcgacggttcttgggaagttggtacagccgcttacgagaagcgtggtgttgaggccttcgttcctgtttggaacaaggacaactgtatccagtgtaaccagtgtgcttacatctgtcctcacgctgctatccgtccattcgttctcgacgacgaggagctgaagggcttcgcagctgctgctgatactctcgagatgaaggctcctgccgctatgaagggcatgcacttccgcatcgagacttcagtactcgactgtctgggttgcggtaactgtgctgatatctgcccaggcaatcctaagactggtaaggctcttaccatggctccattcaatcctgatgctgccgatatggttcaggaggctaagaactgggagtacctggttaagaacgttaagagcaagcagaatctggttgacatcaagagcaatgttaagaactcacagttcgctcagcctctgttcgagttctctggcgcatgctctggttgcggtgagactccatacgttaagctgatttctcagctgttcggtgatcgtcagatgattgccaacgctactggatgttcttcaatctactctgcttctattccttctacaccttacaccaagaacgagaagggtcagggtcctgtattcaacaactctctgttcgaggacttctgcgagttcggtctgggtatggctcttggtaacaagaagatgaaggagcgcgttgctaagctgctgcaggagatgatcgacggcaacgccagcgacgagtacaaggcacttgctcaggagtggattgctaatcaggacgacgccgagaagactaaggagattgctccaaagcttcgtgcttgcatcgccgagagcgctgctaagggctgcccagtttgcaaggaactccagactctggatcactacctggttaagcgttcacagtggatcatcggtggtgacggtgcctcttacgacatcggttacggcggtctcgaccacgtgattgcttctggcgaggatgttaacatcctggtactcgataccgaggtttactctaacaccggtggtcaggcttctaaggctactcctcttggtgctatcgcacagttcgctgctcagggtaagcgcatccgcaagaaggatctgggtatgattgctaccacttatggttatgtatatgtagctcagattgctatgggcgccgaccacgcacagaccctcaaggctatccgcgaggctgaggcttggcacggtccttcaatcatcatcgcctacgctccatgtatcaaccacggcttgaaggccaagggcggtatgggtaagagccaggctgaggagaagaaggctgttgagtgcggttactggcacctgtggcgtttcaacccagctctggctgaggaaggcaagaacccattctctctcgactctaaggagcctaactgggagaacttccacgacttcctgcttggcgaggttcgctacctgagtgttaagaaggcttatcctaacgaggccgaggagctcttcgctgaggctcagcgcatggctcagctccgttacaagtcttacatccgtaagagccaggagaattgggaggactaatttttcctgaatagtatattaagagaggtggggctcaaagagttccacctcttttcacaaaaacactaaatgacaatgaaagcaaagcaactaactatcttactaatgtggctcactacggcattcggcgcgagtgcagctacaaccgacgagcaaacactcatcaacgagtggaaggactcagtacgtaccgtgtttgccgatgcctaccgcaataaggtgctggtaaacgacagcctcaccatgaaactgcattggagcatctatggccccaagccagccgatggctacgccctgtacatctcgcttcatggcggtggcggtgcccctgccgaactgaacgatcagcaatgggagaaccagaagcgactgtatcgcccacagggtgccgtttatctcagtccgcgagccatcaccaacacatgggaccttcatttccgtcccgaggacgacaccttctaccgtcagattatcatgatgatgcaggcctactgcgatgtaaatcccaacaaggtttacatcatgggttactcggccggtggcgatggcgtgtggcgccttggtccccgcatggccgaccattgggctgccgcctcgatgatggctggtcacccaggcgatgtgtcgctcctgaatctgcgtaacactccattcatgatctggtgcggacagcttgatgatgcctacgatcgtgtgtaccgttgccaggatcgtatcgtagagatggactcgctgcacgcagccgatcccgagggctacatccacgaaggacatatcgtagagggcaaaggccattggatggatcgtgttgataccgtggctgttacatggatggcccagtaccagcgtaacccctaccccaagcgcgtggtttggcaccaggccgatgtggttaccccttacttctactggctcacagcccccgccaatgagttggctcgcgacaaagaggtacgtgcccagattgatggcaacaccattaccatcacccgttgcgattactcgcagctcacactctcgctatgcgacaaaatggtagatcttaaaaagcccgttaccgttatgtaccagggccgcaagctgttcaagggcaaggtaaaagcccagcccggcatgctgcgccgcaccctttaccagcgtaacgatccggcttacatgttccccgcgcaaattacggtaaacatcaagtaaacaggttataaggccatcgttttccagatggcaatactctggtttaccattctgataaactctcgagcggctgccttttggtagccgtttcttagtgtatggatacacccctccataccgttaccctcggctatgatggggatagcggtcagtccgtcctcgtcgataacggtcgattccgacagcacggtcacatacttggtttggtgtacaaacttgaaaatcagactcacattgtttatctcggctctcaggttatattccagtccgctttgtgccgtcatacggtcgaaagccttgcgggcttgcaactccttagtgggcagcaccaacggatagcgctgcaggtcctccagcgtcatactcttttcgccagccagcgggtgctcgtcgttcaccacggcagccacacggttgttaaacagcacgcggctctctatgcgcgggtcggcctcgttaggcttaaaggcaaacaccaggtcaagctcgtggcgcagcaggcgctcaatcaaatcctccatcgacgagtagcataccgaaagctttaccttggggtgctctcgcataaagtcggtcatcgtttcggccatgatactgctgaacgagaaggttacgccgatattcagttcgcccgtaagcaactgcttcagctcctgcaggcgcaacacacagttatctaccatgtgtacgctctcacgggccatcggcatcagtatctcgccagcctcggtcagcatcacctcatgactgttacgcacaaacagctgctggttaagctcctgctccaagtgcagaatctgctgcgacagcgtactctgggtgataaacagctcgcgggctgcctgcgagaaattaagcgtttcggccacacgtagaaagtatctaagttgtctgatttccatgatatataccttattaaattaaaattgcgcgtgcaaaattacaaaaaatatgcatttgccaatacgtttggctatcgtttttatcgatagcagcattcgtcttgacataaatcgccacgttcggcacaagtcatagccaattgcgtgccaggtacccaaaaagccgtacctttgcacccggaaaaagaaatataactgttttaatataattaattaggtattatgtcttcaagttggtttattgttttaggagaaatgtctgtgttattcatctgcctctactggtacctgcagcacaaccacgagcgcaagtttgccgtagttatcgagcacgacagcatcgagggactgacgctgggcaaggtagaagagctgataagtcgccggtttgtggtacgagagattcgattggctgactcatcgaattgcatcgtacaccccgacgacgacacggtgctacaccacggcgaccatctgctgatacaggcccgtccacacgagatcgagcccattatcgcttttcttggacaacgcgaaaacaccacgaaatgaagaatatagatgatttgcaaaagaggctggatctgttactccgaactggatgtttattaatggagagtgccgcagataccagccgtaccatgagaaccatgaagcgagtggcagcttatttagggctgccactcagcaggttacacatctacattgtatataacatgctgatggtaaacctgagtgatggcgagcgctcgttcaccaagttccaacgtgttgagcggcatggagttaatctcgacaccctgcgccaggtaagtcacctgtcgtgcgaggccctgcgcctgcattatcagctggatcgctaccagcaggagctcgattacatcgcccgtcagaaacgcaactactcgccctggcaggtagccgttggtggcggactggcctgcggtggtttctgcatccagttcggttgcgactggaccgcctttttctatgctgccctggctgctatctttggtttgcgcctgcgcatgtttctgaacgagaaaggtagtaatgcctatgtcaacatcggtatcgccgcctttgtgtccacactcttggcctggatgtgcagcttgctgtcggtttacgcccaagccagtagctggttgccgtcggtactcgtatcctctaccccctggcacccgttgttagcctgtgccctgtttatcgtgccgggcgtaccactcattaatttcgtaagcgacatgctctcgggcttcacccaggtgggcatgacgcgagctgtcaatacgctgatgatgctgctggccatggccttcggtatcgcctttgccatccaggtttgcggcatcgataactttgccaaggatctgcccatgacgccccatcacaattaccacgaatatatgttggccgccgccatttcggccatcggattctcgatgattttcaacacgccgcgtcaactcatgtgggtagtggccttaggtggtatcatcagcgtttgcacccgcaatttcgttaacctcggcccctccagcggcaacatcgggttagaccaaggcctggtagtaggttcgtttgcaggttcggccgtagtcagcatcatctgttgtgcgctcgttcgccagctgcacaccccacatcagctgctcagcatccccagcgtcatccccatgattcctggtgtgctcatgtatcgtgccctgtttgcattcatcaacatgcacggcatcgagggcgaagtaacagtagctatgaacaatgccatccaggcatcgctcaccatcctgttcatcgccctcggtgtagccatccccaacatcttcttccgaaggatgattgcggcgcgataaaaaaaagtagggttacttatagtaccctactcttacatcatgccttggtgtggcgatgggattccatgagatgtgcagccagccgttacctgttaatagctgatctgtttggtcgtgtgcctttaggaattcgattagccgctggaactgccgtgcgtccttaggacggatatccgcagcctgacctacgaggtgctgcgagttactcacgccaccaaccaaagcgttcacccgactacagcggaacccggagttgatgatgataggcccaaccacctgcctggcaggctccagtagcatgtggcagccataagttaagttaaccaccgcctgcatcgtagggatgttatccgcatacttctgcagattaataaactcgcccagcataaaatgggccgataatcgaacgtcatttagattttctttcattgtaatacttcgttaatgattaatacatcacgaagatacacaatccactcagagcaagttgccgttccctgcccttttatctcgatagcattacataatggagtattatttcgtccttatctgccgcaaattcaataatatcaaccattttcttgcaaaaatacaacctaaaagttgtattattctaaatatattcttatctttgcgccaaaaaggaggtaaagaatgaaagatgtaattgcacgactgaaggaacatcagtcaacaacaccttcaaaatggagggaacgtgcagagtggaggcaacagaacaagtcatggttgcgtcactctcagcgtatcgccgtgaagatgcttgagaagatggatgaactaggcttaacccagaaacagcttgccgaacagatgggatgtagccagcagtacgtttcaaaggttctgaaaggccaagagaatctttctctcgaaactatgtctaagatagaggattgcttgaagatctctattctccaagaagaactggagatggcataacactcaaataacaagtggcacacccaatcggatgcgccgctttttcgaatattatttgtatttttgctgcgtaatcaataatagtgaatcatgagcaatatcgactccatctacaaaacacctttcttcgagataacctatatcttgaacgactttgcccgtttagacgacctcaaacgcccgtggccttatattacgagtaaaataaaggggaatcgtccaccacttttaccacacgaggcttgtctgctaaaagcaaagacaattttgatggggattatttcgtcaatgtcatatatgcgactcgccatattacaaattaagaggcgttataataataaatactactttgcaaatgggtatactgcatatgatttctacagataccactactcttcattctgtcacgctataacaactattcatgatttattcttcaagttagtagttgagttgtgcaacatcaataccggcagcaaaagaatgattcaatggggaaatcttcaaaaagctttaaaaacaaataatgagatagatattatcaagcttctggaacgctactattcagcaatacaagaacatgagcaaaaacggaacaaggtttcccatgagggacttttaacttccaaaatgttagacaactatcaccttactatcatttggtcgagacatcacattaaaccattaacagcggatgataggcctgaatacatagaggggacaaaggagaataaatatctattagcaaaaacaaagaaagaatttgtaggcgaattaaacaaattactggaaaccacagtagattccacgcaaaaactatttgaattgctattacctaagttaatacagaagataagtcaagagttcatagaatcgcacagaaaggagtttgttgaactagataaagaatgcctgaataggtatatactttccaagtatagagagtaataatatcacaaaagaaaaagaaccgccactattataaaatagttttggctctctttaatgttcacaacggaataatccttattgtgaatacctcaaaattagtgctgcaaagatacgttttttcttcgaatgaacaaagaaaacgatggaatatttttcaaaatcctatccccaatccataattttatcaaaaatcgaggttgttttcatctcattatctagcttttttattatctttgcaagacataattaaattgctgctaccccatgaaatttatattaggattagacccaggaatagccagtatcggttgggcgctgatattagaagccgagaacgacaacgagaaatcaaggattattgattcgaatgtcgttaaggttgactttgacaattttgcgtatatgaacgctaaaggaaaaatatcagaggggaagcccatagatatgttcaggaagggactcaccgtttcgcctaatctggtgagacgacagaagcgtggtgctcatcgcaaccttcagcatttcaagttaagacgtgaagccctaatagccttgttgcacgacaatggtttcatcaacaacgataccctgttgtgtgaggacggcaagggaaccacgtacgaaacccttatgttaagagcaaaggctgcaagtgaggaaatttcgttaaccgaactggcaagggtgctgcttatgatcaataaaaaacgcggttacaaaagcagtcgtaagggcgagacagataccgacatagaggatctgggcgcttatatagcagccataacaggtcgtagccaatcgctggttgagaaccacctgaccgttggacaatacctgatgaaccaactaaatcttcatcctttgaaaggcatcaagcgccagacattctatcgtaaggactacgaggatgagtttgagcagatatggaagacgcagatggcattccaccctgaactgactcgtaaactgaaaaaggaaatcaagaaccggattatcttctaccagcgccccatagaaagcaaaaagcaggaactgaacttttgcgaactggagagccatcagattgagattgagaaaaacggcaagaaacaactggtaacaacaggcagcagagtgagccctgtatcgtcgcccttattccaacaattcagaatgtggcagcgactgaatgatgttgttctcaccaacaccaccacacttgagcaatactatctgacacaggaacagaaggagatgctggccacagaattatctatcaggaaggagctaaccaagaccgctgccatcagactacttgtcggcaaacagaccaagacctatgacctgaatttcgacaccctgattggcaacgagacacaggcgagactggtaaatgcttacctgaagatattggaattgacgggacacgacaagttggacatcaagaagatgagagcacaagatgtgcttgatgctatatgcaaagtgttcgagggcttgggttataagaccgaagcgctgaatgctgaagtcataataggttctgaaatctacatgcagcctcattataagttgtggcatctgctctattcttttcctggcgacaattcccgctctggcagctccaagcttgtgcagcgcgtaaaagagttcttcggcttcgacaacgatgaatatgccaaagtcattgccgacatcaaattccctgatggctatggtcgtctcagcgccaaagccatacaaaagattctaccttttctgaaagaaggctatcagtataatgaggcctgcgaaaaggcgggctacaatcattccaagcgttccatcaccaaggaagagaacgaaagccgcgttttgcaacaatacctgcaacccattcctcacaacagcctgcgtaatccgctggttgaaagagtgcttaatcagatggtttcggtagtaaacggattgatagatgaatatggcgaggaatatggtcaattcagcgagatacgcattgagttggcacgcgaccttagcaagaacgcagaaagtcgaaagcggatgactcaggacattgagaacaataagaacgagcgagctaagtgccgacaggaacttatcgaccagctaaacgaacgaggttatcacgtaacctatgtcagcgaaaacgacattctgaaatacagattgtataaggagttggcaccgttcggctataagacactatattctaagacaaaggttgatttgattgaccttatcattcatcgcaagttcgacaaagaacacatcatcccgaaagcaaagagtccaagcaacgcattctctgcgctgaccatagaactttcgagcatcaacgaagagaagggcgatatgactgctctggattatgtgaaatggaaatatggtgaggctgaagcccagcaatatatagccagagtcaacgacctgttcaaactgaaatctatcagcaaggccaagaaagacaatttgctacgcacagctgccgacattcaggacgaacccctaacaagggatttgggtctgacacaatacataaaccgcaaggcctatgaacttttgggtactatcactcgtaaagtagtgcccactacgggtagcatcacctgtcgcctgcgcgacgactggcaattggtggatgtcctgcaggaactcgtctgggacaaatatgaaaaactcgatttgattgatacctatgaggacaaagacggtaagactgttcgcaagataaatgaggatgcctggacgaagcgtaccgaccatcgcaaccacgcgatggatgccatcaccgtggctttcaccaagcccgctttcatattctatttgaactcgttgaactcacagggcgaaactcgaaatcaactccttaagatgcgacatgattatctgcatcgcgacaaaaagggaaactggagattcaatgagccaatgccattaggagagctgcgtgctgaggtaaaaaatcagttggagagaatcaacgtttaccaaaagcctgctacgagtgctgtaacacccaacctgaacatctcgaaatccaagaagaaaaaagaaggcaaccgccaggtgcaactcacaccaagaggcaaactacacgatgacaatccctttggcagcatcaaggagaaaggagttcaagtgttcaccaaacgagtagaggtaaacgagagtttgaatatagatgacgtggttgacaagggtgtgcagcgcatccttcaggaaaggctccgcgagtatggcaataagcccaaagaggctttcgccaatctggaggagaatccgatctggtttaatcgtgagaaaggcatctgcatcaaacgtgttatcgtaagaaccaaattaaaggatgcccgcgctatccacaagaaacgtaataacaagggcgaacttctgcttgacaaggatggcaagccacaatctaccgactacgttagaacaaacaacaaccatcatgttgcgatatacgaagatgcgcagcacgaactgcatgaagttgtagtgtcgttctttgatgctgtagacaacgctatacagggcaacccagtcatcaacaagacatataatgcagacaaaggctggcgattcttgttttctttgcagatgaatgattgcttcgtatttccagacgaggtttccggatttaatcctgcagacatagatctgaccgcaaaagaaaactatgctttaataagtccacatctattcaaggtgcaaactatttcggaaggcgactatcgcttcaggcatcagtacgatgcgacaaagggggaatatacaaaattgaaaaatatgacgtggaaaagaattaggaatccaaacggactaaagggtgctgtaaaggttcggataaccaagataggacacatagagtacgcagaataaaagaaatccctcgataccgagggatttctctgttatcataaacatttttgtgtttctatttgcaatcataaacccctatgattctgtcgattacggcagatttgctgtttatgatattgctttgtactaattttgaaaggtattcacaacgcggtactgctgggtgaggtgcatgccaaagctgtttatgatattgctttgtactaattttgaaaggtattcacaacgcagctcctgcagggccttgagcatgaaggctgtttatgatattgctttgtactaattttgaaaggtattcacaacatcatgttctgcaggctggtgtaggcccagctgtttatgatattgctttgtactaacatgtcaaagatcaccctttgcgctgcaaatatacattatttttgtgatattatccaaatttcatccaaaaagtttgtgatatttgcaattttcgccacattattatatttatactcgccggtgcatcctgtcaagcctttactcataaaacgtatcaatttaagccggaaaatatggaaactgtgcaccaaatggaaagttatgctagaaaacaagaaaatatgtaatcaaatctcaaatttgcagacgattcttgcttttgtttaacgtatttttgctacctttgccactcaaattctaaaaaactataagtaatggacaaaagaaattcgctttacgcaatttacaaattcgattttcataaatcgccacagcaatcaatacaaaccgccgctgatggtatagatggtgctaaatacgttaaatttgctcaaacctgctttgcaagtctgtttgacaaaaacagtatcgacaaacttgccaaaaagaataaaaagggcgaaattataaccatgctaccaaatgatgtgttagctaaggcagacgacatttttctatggcgcgtaaacaatagccaattcaaagattggtggaaacgtacaggaaaagaccaaaatggttttgatacgtatgagaaagatgaaattgagtcgaacccatattgctacattctgatagacaatcgtcctggcataggattgatggctattgagaaatcaccagcctggggaagcaaacccgatttgctgcgtgatgtgatattagaaaacttcaatcgtatgcttggcgacctatttgaccttgagatgcgcatcgaggccagaatgaacccaaaagatatttgggactttgtaaatgaaagattgttcgtacacggcgactatattcgtaaggtttcgttctcgtttcagaatcccaagaaaatcaacaagtcaaagggcatggagataaattctgcacacctgaaagcgatgctaaaaacggttgagatttcagacgccttgaaaggattcttcacaatggaatttgataagaactcaaatggcaaaatttcacaggcaaacaaagacatggctgaaatggtaaaactctgtagcgaaaacggttatgatatcagcatcacctttaaggaattcaaaacctaccgcataaacgactacgtaagggcatattacccattgactttcgaagttttacataactttagtattggtactcgcgactttgacaacatgacaggacttgaaacatggtttaacttaattaatgaacaaactaaaaactacctaaatgaatcagaggttccaacccgcagaaataaagctcgtaagtgagaagtatgccgagaacgagctttacaaggctatttgtcagattggtcgaaaactggaggccgaactgacagaatttggtttgtgtccagaagagtgtattgttgaaacactcgagctacttaatatcatcgccaacaagggtgacgctatatcaacagaaattgaggacatatggctacaaaagcacaatgagtacaagcgtttcgaccgtcatgtaagcgagaacgaaatacgaaaggctgtgggcatagtctttggttttgccatcttggcgcttggtacaagcagtcatagtttctacaaattcacacttacccaacagcttatgcaaaatatagccaaccattcttttgaggagtggcccctaatgctcgacaagatattctccatctccctacccgacggttggtatgacacctttatcaatgaggaaccggaaaaagataatggctgtaatcgggaagaatctggtacaaaagttacgaagtttacggattttataataaacaatgctgagactgacaaagtgataagtatcataagaaagaatatcactcccagcagaccgaagcaaacagcattagtaattattgggggcatcgaagcaggaaaaatccaacaagatgtatcggcaccaagtattgaaaaagaatttggtgtgaaaggaaactccataaaaccataccttactaaatacagagggtataaaattgggctgaacaattacttttccgaagatgaactaaaacctttcaaagcgcttttttgcgagaaataatcatttaaaggttccaaactttatagcgataaatagcgatgaatatacggctatttatcgctattcaattatttcgttccatttccacacacatcgtatctttgcagcagaaatttctaatcggagtttctgctgcattctttttgatgttagtcggcagaaaaaaactgggcacggctccgagcgcgagatgaagtacagcctatctatatcatcgcgtaagtgcaagagggcaattttaattcataattagaaaaatgaaaaagaattgcaacacgcattttagcgtgaatttgaaaaccttgctgcgcaaggatcgcctggcaaaggtgggtaagaattatctgggtgtactgcgtcgcgatgtggagagcgatgagtttcgttacgacgaacactttacgtttgttgagacgattccatcaactaccattaagcgtaatcccaaagtgtacgagggtaagcgcattacaattacacgtaaggatgatggcacgtaccgccccaactttaagcccatgcatatcggcggcagtcttaccttgtcgagatatgtatacgaggtgtacatcgaactttgcgagggattgagtggccttatagaggaaggctaacccaacagcaaatggccctgagacgtgtgacagttccaaatgttccagttttattttgcggagcaaatagcccttttaatcaattataactaattgatatatagatagttatataagtaaacaagggtaattgggactaccagaataataattggaacaactggaactggaacgcgagggttatatcattagtagtattaattcacctaaaaagcagattatcaatgaaatacgagatttcaaataacacagcgcctgcgatgccaaaccttggtaaaggcacagaaagtataaaactcctactctcgcaggcatcaaaagatatgcacgcgcccctggttccgatgttcttccccgtacttggcgcacacatcagcggcacggaatttatgtaccccgacaacagttggaaggaaccatgcggcatgatggccaacctggtggccaatagtggcgataacaaggggcagtttccaaaccttattaatgccatctgtcgcgactttaccgagcacgacctggtagagatgaacaaattggtagaatgggcaaagctacccaagggcaaaggcaacaacaaggataaagtacgtcccgaggtggccatctatttcccgccaaccgacaccaccaacccggcattcatacagaacgcgatggcactcgaggcacagggcggtcgcacacagtactttaatatgcctgaggttgagatggccgaccagctgtgtggtagtcataaaaaactgtcgcagttgctgcgaaatgtttacgatcgtgcccgtgcaggtgccttgcgtgccacagccgatggtgtaagcggcaaccctatcctgcgcgccaacctcaccttttcaagcacccctggcgccacccgtcgtttttataagtacgagctgtttaacggaaccttcgggcgcatggtgttctcgttcaagccccgtggtgagcgtagtggtcgcattccccgtcagggtaactatcccgatgagttttaccagaagttggatgagtacctggagcgtcttggtaacagcaagggccgatacattatccgtccactcaacaagcttatcgatcgattggctgaggatatggccacgctggccgatctgaccgacgacgacgtgctgttcgagatatcacaccgtagcttggtatcggcctggaaggctggatgcgtgctgtggatactgaacaaccagacgtggacaaaggcgatggccgaactggtagaatggctagtgtatcacgacctttggagcaagatgcagctatttgccaccatgctaagcaacggcgaagagggtgcgaacgacagccaacgccgaggccccagaaatatgctcgacgacctgcccacccagtttaacaaggcccagttagaggctctacgcgaaagtcagaacaagcccattgagggtgccagcaatcagctgcgcaaatgggtgcatcgtaagttcatcgagtacagcgcccaaacggggatttataccaagacggagttgtacctgaaggggaagaaagattaaacattaaacattaaagattaaacattcttggcgatgccaagcggcaaagccgagcgaaagattaaacattaaaatggataagatacaactgcaaaagctccgcgacctacctattgagggggtcgccgagcgacttggacttcgcgtaaagcatcacaaaagtctttgtccgtttcatgccgatagccaccccagtctgtcgttccgtgtaaagaccaacacctaccgctgctttgtgtgtggggctacgggcggcaccatcgatctggtgatgcgctacctgcacatggagtttaaagatgcatgccgatggttggccgatcagcacaatgtaatcatagacgagtggcaaccaacccaaaaggacaatgcgccacagccattcgatgccagtcgctacgagccatactttgagcacccgtggctgaacgaggctgcacgtaagtttctgttctacgagcgactgattgatccccgcgtggtgtggtggtgccggttaacctcgtggaccgaccgcaagggtgtaccctggttgcagacaccttattataataaagaggggcagctggtgggtgtgcagaaccgcaacttggtgaaaggtgccctaccccgtttccgctttccaccaggcgccgagtgcggcatttacaacctgcccgtactcaacctgctgaagccaggcgaaccgctgtttattaccgagggtgcatccgactgctgggccatgctatcggctggtcataaagccatcgccatcccctcggccaccctgctcaccaaaaaggatgtagaacaattgtcaattatcaatgatcaattgtcaactagtttccacatgtatcccgaccaagatgagccaggcgaacgattgttcctacagttgcagcaggtgttacccaatctgcagcaccatcagctgcccaaagggtgtaaggactttagtgagttttttacattaaggattaaagattcttgcgtcccttcggtagcaagcgccacccttcgggatgtcgagcgaaacatgaaacattaaacattaaacattaaacattaaacattaaacattatatggagacgtttatcattagggcttataccaagaaggagctggccttgatgtactttcccgatagcatgccacgcacagccgttaaccacctgatggcgtggattaaccgctgcacccagctattggaacaactgcaagccaccggctatcagcccacctgcaaggcatttaccccacggcaggtaaaagccatagtagaacaccttggcgaaccctaaaaaaataggaaaaaaagttcgcctatcgcacggcatcgcctgccatcgcctaaacggtggcggcgaatgttgtacctttgtaatgtcgaaacaaaggagaaaaatatctcgctagttagagaaaaaaatctccctagttaggcaacaaaaatttaatgttaaaccctttaaaacgtaatttaattatggcacttaaagttaaagcaaccgaacagttgattaagattggcacttacgctggcacgtaccgctacgtgatgttgcctgagttgtacaccgccctgaatcaggacaaagtgattaaggaggctgccctgcgtagcggagttagcaaaggtgtgatgcaagcttgctgggatgcagctggcgaagtaattaaggcatgggccaccgagggtcacagcgtggcgctgcccggactgggtacgatgcgattcggcctgcgcgccaagagcgtggacgatgtgaacaaggtaaaggccggactgatttcgagtcgccgcatcatcttcaccccagatgttgacctgaaggaggagctctcgaagacggctgtgcagattacctgcttcgaccgcaccggcaaggaggttaagcgtgttacctcgagtgacagcggcgatgtggaagatcccgacaacccacagcccagcaacggcggcaataccggaggcaacggcggcaataccggaggcggtggtaaccagggcggcggtaaccagggcggcggtaaccacaacgaaccaatcggcgactagttttaggcacggattaacacggccttttaaaaaaggacacggctgttatcaacgaaaaagagctgcgtttctctaaaagagagccgtgtaatctgtgcctaatcattaaagattaaacatgaaacattcttggcgatgccaagcggcaaagccgagcgaaacatgaaacattaaacattatgagtaagagagaaaccatcaagttcatcgtacagatgattgctagtatcgctacggcgatagtaacggcgctgggggctaccagttgcatgggatattaaggaatcacacggcatctacattgtagatggcaagaagttggtacgctaaatcaattgcgccaaatcaaaataatcaattattgctacgtaaatatttgcgtagtccaaaaaaaaatagtacctttgcacccgattttgcaataggtattattttttttatataaaacactaattgatttatgcgtaaagaatggcgtggttttaaaggaaccaagtggaccgaggaggtcaatctcagagactttattcagaacaactacacagcttacgagggcgacgagaccttcctggctgagcctacagatgccacaaacgtattgtggggccgtctgcaggagctgcagaaggaagagcgtgccaagggcggtgtgctcgacatggagacagagatcgtatcgagcatgacagcttatggccctggctacatcgacgagagtaagaaggacctggagaaggtagttggtctgcagactgataaacccttgaagcgcgccttcatgccttttggcggtattaagatggctgagcaggcttgcaccaactacggttacaagccatcagagaagctgcacgagattttcacaaagtattgcaaaacccacaacgacggcgtatttgatgcttacaccgaggagatgaagcacgtacgtcacaaccacatcctgactggtctgcccgatacttatggccgtggccgtatcgtaggcgactaccgtcgtgtggccctgtatggtatcgactttatcattgccgagaaggaggccgacaagcgcaactgcggtgccggtgtaatgagcgacgatatcatccgtcagcgtgaggagatctcaatgcagattaaggccctgaaggagatgaaggctatggctcaaatctacggcttcgacatctcgcagcctgctaacaacgctcgcgaggctgtacagtggctgtacttcggctacctggctgccatcaagactcagaacggtgctgccatgtcggtaggtcgtgtatctacattcctggatatctacatccagcgtgatatggaagagggtaccctgaccgagagcgaggcacaggagctgatcgaccacctggtaatgaagttccgcatggttaagttcgcacgtatcccatcatacaacgagctgttctcgggcgaccccgtttgggctactctcgaggtaggtggtatgggtatggacggacgccacatggtgaccaagaacgactaccgtttcctgcacactctggagaacatgggtccttcacccgagccaaacctcaccgtactttactcgccacgtctgaccgagaacttcaagaagtacgctgccatgatctcggttaagaccagctcgatccagtacgagaacgacgaggtaatgcgtcctgtatggggcgacgattatagcatctgctgctgtgtaagtgctacacagactggtaaggagatgcagttctttggagcacgtgccaacctggctaagtgtttcctgtatgcatgtaacggtggtgtcgacgccaagacccgcgagcaggttgctcctggtttccgccccatcaaggacgagtacctgacatgggaggagctggctccacgcttcgaccaggctatggactggctggctggtgtatatgtaaacaccctgaatctgattcactacatgcacgataagtacttctacgaggctgccgagatggccctgattgataccaacgtacgtcgtacattcgctaccggtatcgcaggtttctcacacgtagtagattctatctctgctgttaaatatgcaaaggtaaagatgattcgcgacgaggagggattcaacgtagactatgtagccgagggcgacttcccacgctacggtaacgacgacgaccgcgccgacgagattgctgtatggctgctgaagaccttcgttaagaagattcgcaagcacgctacctatcgtaacgctaccccaacctgctctatccttaccatcacatctaacgtggtatatggtaagtacacaggtaacctgcccgatggccgtcgtgctggtactcctctgtcgccaggtgctaacccaagctatggtgccgagaagaacggtctgttggcatcgctcaactcagtagctaagctgccttatgagtatgccctcgacggtatctcgaacactcagaccatcagccccaacactctgggccagaacgacgaggagcgtgctaacacgctggttcgcgtaatggacggttacttcagccgtggtgctcaccacctgaatgtgaacgtgtttggtgttgagaagctgcgcgatgctatggagcatcctgagaagcccgagtacgctaacttcaccatccgtgtatcgggttacgctgtgaagttcatcgatctgactcgcgagcagcaggaggatgtaattgcacgtcaatctcacgagagtctgtaatgagtagtacaggctatatacactctaccgaatcctttggctctgttgacgggccagggattcggtttctgattttcatgcagggttgccgcatgcgttgtcgctactgccacaatcctgacacatggaaattgggctcggatgcctgtggcaccacagctacaattgacgagctgctgaacaaagccgagcgctaccgcagctactggggccccgatggcggtattaccgtgagtggtggcgaggcgctgctgcagattgatttcctgatcgacctgtttgaggaggcacatcgacgcggcatcaacacctgtctggacaccgctgcccagccttttacccgcgaggagcctttctttggtaagttccagcgcctgatgcagactaccgacctggtgctgctcgatatcaagcatatcgacagcgagaagcatcgctggttgacaggtcacggcaacgagcatattctggattgcgcccgctatctgtcggacatcaacaagcccgtgtggattcgccacgtactggtgcctggcatcacaaccgacgaggatcagctcacacagctgcgacacaccatcgacacgctgcagaatgtgcagaaggtagaggttctgccctatcacaccc

SEQ ID NO: 451 - DNA, 19993 bp, synthetic construct
  misc_feature 1..19993: note = Synthetic
  source 1..19993: mol_type = other DNA
  variation 17844..17892: note = n is a, c, g, or t
ttacatctgtggaaggctgctgcaaaatttgtttcggaatagcctgcggttcttggtgtggccccggtctgtcctacctttgcaaggaaaaagactccagagaaaactcagctaaccccatgaggtgaaaatggcatacaggacaggacgaagatagaccagaaaagatttgccccttattcaagttccggcacccagtgacgggttatagaatgaagctgcgtctgactgtcatcacagactccctccaggaaagcggatgggcatctcacaagagaaggttacaagcagggctgagattcaacaaaggaaggtggtagtgtcaggccgtgtcccgctgacatggtttgtggtgcgtcgggaacctgttccagacccacgatgaattgtgtgtgtgcggttagccgcgcatactctattcatcgagcaaaccgcgtcggtgaaaaaggacaccgccggactctgctgcccctttggggaacctcgcccgtcgtgcaggaacccttgcagggagatacccgttcactttcaggaggattaagaggctttggtggtgtcagacgcatgcgccctgttcaagtcccatcagaaggaagtactggcgacccagcggccacactgacagacatcggacggcgaccaaagcagctgacgtgccatccgggatggttccccaagctctatgagctgccgggaatgagcaaggatagcacattagcaaatgccaggagtgggccgtgtccgttaatggggctgtgccgggagatttgatacaaaatcggctgtcaggaattttcgttttgcccgattttcgggggtattactatatcgccgactgcccgttatggccacagcgggcttcctgtgaggtcgttttcggggtggatgccctgaaaatgcccgttttcgaagaaatcctgacaaattcaggagcatggaaaaagggcgagattcacatctggcccttgtgcaaagatagttttaaaaaatttgcattgattttgcatcgtatgaacaaaggaggcttcgctaagcctccggtgtattttccttcttctcgatcttctcgatggcggtagccttccaggagagcgcgaagtgttctttctcgtccttgccggtatatgtacgtggctcgaagaatccctcgaccttgacgatggtacctttcttcaggagatccaactttggagagcctttcttggtacctacctcgatgtcctgaagggcagagatcttcttctcgttgccgtccttatccttcttggtggtgcggatggagagcgggaacttggcccatacgctgccgttgccgttgttcttaacctgagcgtccattgctacgataccagtcactgtgaaattgttgttagttgccataattctttaattttaaagggtttaacttataatttttacgtgcaatacagagccaacaagaaacagtcatgcaaagacaaggaataacaagcaaattttacggaataccccattttctttaggcttcagccgttaagaagaaaatgcggaaggctgctgaaaaatttgagtagggataaggaactgtgcgactggtacttgacgaatgacgcttgggctacctttgcaaaggaaaaatatgagtgcagacccgtatcaaaaaggaaagaggcaaccataacggcaatggtgacgtatcacggccatggatgcatgagagatgtgacggcaggctgcaactgcgccaggttctaccaccattgagagcgccacaggatgaggatgccaacgagagggcaggaagatgtctgtctggaagattggcaatgtggtaccaagggtttccagatgaccataaaaagagaaagtgcattgtcatgatgttcacgaggaatacgacaaagccatgagaccgacaaaggcgagagaactgtttgccctgacgggcagacgaacacagaagaagagaagaaatacactggagggtgaagccccaccaagtcccatcaggatgcaaatgcaaaagttataaaacctgcagttgggcagatgtaaacgtccaaaagtaccatatagagcgtatatggtatattttgaaggtatgagacctataaaagttgccatataggataataatccgacagattgggaagtattttattccattttcggtaagaaataatagtatagccatcaaatccaacaaattgggatgtatttcattccatgttgatatccttaaagtcgtcgtttcccatcaaaaatactcatcaaactgtcggtcaatctatgatagattaacaagtttaatagattaactatattaagacggcttacaaacgtctgattatcaataaattacaaagaaaaacccaacaaatagggaagtatttcccaacaaatagggaagtatttcccaacaaatagggaagtatttcccaacaaatagggaaccatttcccaacaaatagggaagtatctcgatggaatccaacaaatagggaagtatcatgattccaccatgaaaggtgtgatgaaaatgtgtgttttccaacaaatagggaaccttttcggttatttgttatgaaaatcactaataagtgtgaacctattcaatttcattcccaacaaatagggaagtatctcgacattatattcactaaaaaaaggcctgtttttttatgtcgatttcactgtcgatttcactgtcgatttcactgtggaattgtttaatgtcagaattttgtaattttctgatattaaagtatttgtaatttttaatattgcggatttcactgtcgatttcactgtcgatttcaacaacaagttgcataataatttgctccattcttaatatataacgaaaatggaatattataaatatataaatatacgaaaatggaatattatatgttaaatattccaaacaaaaaattgtataatcaactataattcgtatatttgcagaaaatttccgaattatgacattagaagagttagaaaaggcattgccagagattagagaaaaggcatcggtgagttacccgtggctttctcttaaaggtctcaaatatgaaacgataaacaagatacataatggtgggaactataaattacgttccctttatcggtatcttgatttactggcctacgtgttgcgtatcgatggccagcttgccgaagatcttcagaccttcggccagataatgcgtgaaaagcgaatagcagcaggccttacggttgttgacatatgctctcaggcacattgcacagccaaggcaatttacgatctcgaaggaggaaaaggctctcaaaggagtacccttcttagtttcatatcttgcattggcggtgtttctttcagtattcacgaaatgatagatgaactataattatggcagctaagaaagaaaacaagaaacagctttcaaacgaaagaaagcttaagagggcagtaaagaatgctacaaaagtcgaagttcctgaagagttgaggaatggagaccttcagattctaatgccttttgtagtatcatccatgaactccgatttttccaagattcagttagacgtgatattgtctatcattgaaaagataggcatgacactcagggatattttggatcagaagaaagccggagtacagcagctcaggcttttcgccgaagaagagttacgtgatgatcctcataaagtcaagatcaaaatacctcttaaggagttcggtgtttcacagaaccattacccggagttacgttctgccctgaaagccatggtgacagttcccgttgagttgccatatcggtctgagagcggacggcaatacaagcgtctcacaaacttctgcgatgtgtatataccagaagaccaggtgcgagaccagtattgtattgtcacgatggacgaagaagtatccgttcgggtacggaatatggaacttggttatcattacgtccgcaagcagttatcaagagctttcaaatctaagtatagcgaacgtctatattggtatatcgagagctttaaggagaaaggagttgtcaccacccagaccatcgacttacggaagttgttcgggctggaggataagtacaaggacttttccgttctcgagaagagggttttgattccagctcagcaagagcttcagcaattttatgagagcggcaatgctccctgttatttcacctataaaaaggtatatgagaatggcaggaagcgcggtgaacctgaaaagatagagttcaccattatctcccgcgaaccaacagtagatgaaatgctggcaatccaatccagtaagcaacaggaagagattaagcgcagcttgatggaagacctgtcgcttaatgaaagcgtcagcacccgaatagccaagagggtgacacctgaaaactttcagggtctgttaggtaagattatcagtctgaaggtattgttcgacgataaggagaaatccaaggggattgacagccggacaatctatattgttaagtccctgaataatttctttatggaatttgaagccaagcagaaggagtcaaatgcagcatcccttgatttatcaaaagggaagtctgaatgggacaagatgatgatggagtactgtaagaccgttgaccctgcagctgtcagggaaacgataagtcttatgacgtttggcggttatgatccggaaaagaaatcgttgattatttgtttcccggacattgacaccaaaacccgcatggatatctacggcccgtcgtttatcaaggccgtcaagaaatatttcggagaggaagtaaagacacaattcaccattaaagaaaaggaggtaaccgatgccgaataatcaaagcaacaataacaaccgtcgggcggttaagactgttgataacacctatgccaaggttcagccgcaagatcttaatgcggagagagcattattgggaggattattgatagataatcgtgcatgggacagagtgtgtgacctgctgcatcctgaaagtttctatgaacccagaaatcaaatagtctatggagccatccggaatatgtatatggatggcaagaaggtggatatcatcaccctttctgatagacttgccaaggatgggaatattgacgaaataggaggccctggatatatcgccgagttaagctcaatggttgcttcctctgcgaacatcgaagaacatgcagaaattattgcagaaaaggctttggctcgcaatcttatttctgctgccagtgtcattgaaacaaaggctttcgatgataccgtatctaaaatagatgtattacaggaagctgaacaaaccttatttgagatcggacagcaggattccatccatagttatgaacagatggacggcatcttggacgaaacccatgagcagataatgaaaaatgccatgggtgacggtgttaccggattaccgacgagatttgtcaagctggatgaaatcacttcaggctttcagccatctgatttgattatccttgctggaaggcctgccatgggtaagaccacccttgccgtttccttaatcaggaatattgccattgataacaaagttcctgttgcctttttctctatggagatgacaaaggtacaggttatgcagaagttgatttcaaactactgtactattgatggtaagaaagtcatcaacggccaactggatcctgttgattgggaaagctacgatgcaaggcgtaaagaaatgaagggaagtcccctttatatcgacgacactccaggactgtcgatttacgatttgaaaacgagagccagaagaatggctcgtgaacataagattaaattgataatcatagactacctgcagctgatgaacgccaatggtatgcgtttttataaccgtcaggaagaagtttctacgatttcccgtgccttaaaaggtcttgccaaggaacttgatattcccgtaattgcattatctcagatgaatcgcggtgttgaagcccgtgagggtattgagggaaaacgcccacaactgggtgatctccgcgaatctggtgccatcgagcaggatgcagatgtagttatgtttgttcatcgtccggagtactatcacatttattctgatgatagaggacgagatctgcacggaatggcacaggttatcattgagaaacaccgtaaaggagccacgggcgaagtattactatcattcaaaggtgaatacagtaggtttgagaatacggctgacgttcagtcgcagatttcagaaccggtcaagccacaaccgaaggagctggatttgcatgatacaggctgggacgatgcaacaccattctgagttaagataaaagatattatttaatatataatacggaatcgtcatgaagaaaatattaggtttagatccaggcattgcctccgtcggctgggtagtagtccagatggcagaggaagccagtgagaagtccggcattctcgatgcaggagtagtgaaggttgactttgacaatttcgcctaccagaaacctgacggtaagatatcatcgactggcaagatcgatgaactgtaccgcaagggcgttaccgtatcgcctaacctggtgcgcagacaggcacgccaagcacgccgtaggctgcagcactatcagcaacgccgtgagcaacttgttaagctcctgatggcaaacggcttcatcacagctgacacgcctttgaacgaagaaggaaaggacaccacctaccagacccatgcgctacgggcaaaggctgtcacagaagtcgtcaccctcgaagaacttgctaaggttctgctgatgattaacaagagccgtggctacaagagtaccagaaagggtgaaaacgacggtgaagatggcaaataccttgcagccatcaccgagcgtagtcaggtactccttgaaagagatttgaccgtcgggcaatacctctatgaaatgctgactcagcatccattgaagggcatcaagaaccagaccttctatcggaaagactacgaggacgaatttgagaagatctggagttgtcagatgaagtttcacaaggagttgacgaagaaactcaaaaaacaaatccgtgataaggttatcttcttccagcgtcccatagaaagcaagaaaggtgatgtcggcttctgccagcttgaaagccgtgaggttgttgtaaacgggaaaacctacaccaccggtagtagggttatacctacctcttccccactctatcaggagttcaggatgtggcaacgtctgaatgacacagtcatcaaaaacatcatgacgggagaggtgcgacacctcacccaggaagagaaggaaagacttgccgcagagctttccatcaggaaggaactgacaaaaacagcggtagtccgcttactgtatggtaaggccatcaagagtgtagagctgaatttcgacagtctgattggcaatgacacggcagcgcgaatctacaaagcctgccttgaagttattaagttgtctggacatgagcttgataccaaaaagatgtcctcggcagcgattattgccgccgtacaggatatttttgggatgttgggatatagaactgtagtccttaccgatgccggagagttcgctaaactttggcacctcatttattccttccctggtgacagttcacgtagtgggcatgacacccttacagctcacatcaagcaactgttcaattttgacagtgccgaccaggcagaaaaacttgccaatatcatctttgccgatggttacggcaatttaagcagcaaggcaattaaaaaaatccttccaaagatgaaagaaggcttgcagtacagtgatgcttgtcttgcagccggttacaaccattctgtacgctctgttaccaaagaagataacgaaaacagggtgttgtcggcaactgtcacccctattccccacaacagcctcagaaatccgcttgtagagcgcatcctgaataagatggtctatactatcaatgcacttatggcaaagcatggccagtttgatgaaatacatattgagctgccgcgagaactctgcagcaatgcagagaagcgtgccaaagataccgctgccattgaccgcaacaccaaggagaaggaaaaggcaaaacaagagctgaaggaaaaactggcagagatgggtttccctgttacctatgtcagtcctaacgacgtgttaaagtaccagctatacaatgaactcgccggcaacggttacaaaactttgtatagcgatacgttgatagatttgaaggagttgatactcggcagaggtttcgacaaagagcatatcatcccgaaagcccttcgccttgataacggtttctcgaacctcacaatcgagaagacagatatcaacctcaaaaagagcaagcagactgcactcgattttgtacaggaggaatatggcgatgccgctgctgagcagtaccgccagcgtgtcattgacttgcttgaaaagaaggctatcagtaaggcaaagcatgacaatctgttacgtactgttgcagagattcccgcaaacccactcgatagagatttgaatctcacccggtacattaccaagaaagctgttgagctgctggagccagttacaagaaaagttctggtaactactggtgctgtcaccgtcaaactccgtgaagactggaaactcgtcgatgtcctgaaggaaatggtgtttgaaaaataccaggagttaggattaactgaaaagttcaccgataaggaaggtaaggttgtcgagcgcatacgtgaagacgtctggagtaaacgcaacgaccaccgtaaccatgcaatggatgccatcacggttgccttcaccactcagtcgatgatacactacatcaattcgctgagttctcagggtgagggcagagagcagatttttcacatgcgccaaaaatatcttcataaagacggcaagggtaactggatattcaactcgccgatgccaattgacgaaatgagaaaagtagcaaagcaggtgcttgaaaatatttttgttattcacccgacaccaaaggttgcaccagtaaccagaaacaagggaactttggttccccgtggaaagttgcacgatgccactttctatggccggaagaaaaaagaagttgttttctttgaaaaggttgataagagtttcactgaggaaaagatttctaccgtcactaatccgaagtacaaaacagccctcatggctcgtttgcaggagtttggaggtgatgcgaagctggctttcacaggaaagaactcattggaaaaaaatcctatttggcttgacaaatttcatagtgcagcagtacccttgaaggtgaaatgtatgacaacgaagcatgtctatacgaagagagttaccgtcaatgagaatctgaacgtagaaaaggttctcgatgaaggaataaaggctattcttaaagcacgcctgcaggctttcaacggaaagacaaaggaggcattcgccaaccttgaagagaatccgatatggatgaacgaagaaaagggaatagccataaaatccgttatcgttgaaaccgacttgaaggatcttaccccactccatcgtaaagaagatggtacagcgaaggattttgtgaaaccaaactgtaataatcatgctgatatctatgttgacggacagggagaattacatgacaacgtggtaagtttcttcgatgccgttaaggagaataaactaccagtaaatgaaaactggagatatttcttcagtatcaagcgcaatgagtattttgtcatgccgggaaaggattttaatcctctggaaatcgacttggaggattcccgaaataggagtcttgtagcgaagcatttatttgtggtacagaagatgtcatcaggagattatctcctgcgcttacataacgacacatcgagcggcacagtgaaggagttgaaagatataacctcgatgaggataacatcattgtcaaagtttattggttgcgtcaaagtttcgatagacaaatctggagatctgaatgttttacagaaaatcgtcgtcgaatagaaataaaaaaatcccgccagcaatgacgggattttcctttctgagatctttttttgatttctgtaagccattcacaactacaaagaactcgccgacaacggttacaaaggtgtaaatgcatataatctgtgagtcattcacaactcccctactgaggaacagaaagtaaaaattggtgtaaatgcatataatctgcaagccattcacaacatcttcgagatttacaccttcaaggtggaggtgtaagtgatagtaatccgtgagtcattcacaatagcttgggagagctttccttggtacataccggtgttgatggtagtaatctgtaagctattcacaaccgtctcgtcgaggtgaacttcaaagccgaggtgttgatggtagtaatctgtaagctattcacaacataactgggttgttatcacttgcaatatgcggtgttgatgatagcaatctgcaagccattcacaacttctactaccgctaatatcggtactatccaggtgttaatggtagcaatctgtaagccattcacaacgaccatcagcggtttcagagccacatcgttggtgttagtgatagtaatctgcgagccattcacaacgcagtatatcatagataatactaagttgtgggtgttaatggtagcaacctgcaagctattcacaactacgaatgggcgcatcagtacctggggcgcggtctaagtggtagtaatctgtaagccattcacaatagcttgggagagctttccttggtacctaccggtgttgatggtagtaatccgtgagcgattcacaaccccacaccccctatccaagtgcatcgttggatgttgctggtggcaatctgtgagccattcacaacttgacaacgctctcggcgattacattggcggtgttagtgcatataatctgcaagccattcacaaccccccggctggcgcccgatgcgtcaaaaaggtgtaaatgcacataatctgtaagccattcacaactgccgctcgtggtttatgacgcccgaggatgttgttaatggtagtaatctgtaagctattcacaacccctgcgggtcgagatcgatgcagaggatgggtgtaagtgcatatagtctgtaagctattcacaacaagctgtggaacgagcatgaacgcgaggtcggtgtatcaggtagtaatctgcgagccattcacaacctacagcctctatgccattgccaaggagcaggtgtaagtggtcgtaatctgtgagctattcacaacggttgcaccgtagccgccaagttcagccgcggtgtaagtggtcgtaatctgtaagctattcacaactaacttcatccatgctaactgcgcggatgtggtgttagtggtagtaatctgcgagccattcacaactctgagcggtcagcagcactgcagggatggggtgttgttggtagcaatctgtaagccattcacaactgttgtagcccctaatggctatgtcttcttggtgttgttggtagcaatctgtaagtcattcacaacttgccgttggcagcgttcagcatctcggcggtgtatcaggtagtaatctgtaagccattcacaacataaagcacgagtgtattggagtgaaaccggtgttaatgcatataatctgcaagccattcattcgcaacaagtcaaagatctcatttctgctgcaaagatacaaataatctatgaaagcacaaaggaaagagctaaaaaaaaagaacctccccaccatcagcggtttcagctctttttgatgattcacaacgggcaaagcccttattgtgaatggctcacagatttatgctgcaaagatacagctttttgttgaaaccaccaaatttttcagtcgcaaaaaccttcgttttagcaactttttagagaaatgcttgtttttctcgggaaaagttcttatctttgtgccaaaaataagaccaaaatcaaagtatcattaccaaaccatctaaacatttttggaacaatgataataggttactgcagggtttcaacccacgatcagtgtcttgataggcaaaccgacattcttaccgatgccggatgtgagagaatttaccaagaaaagataagtggagcaacgaaagagcgtccagaactccagaggatgttcgatgccctccgcgaaggggataccgtagttgtgacagaactttcacgtttgagcagaacagtgaaagatttattttcactggttgagcagattcaccatacaggagccaacttgaagagtctgaaagagaattgggctgacaccactaccccacaaggaaaattactcttcgctgttttcgccggtatatcagagttcgaaagagatctcatcaggcagcgcacgaaagaaggtttggaagctgccagggcgcgaggcaggaatggtggcaggccaccgacagatgccgacaaattgaatctggcattaaagatgtacaagtcaaaagagtatagcatcagcgagatcttgaaggcaacaggaataagcaagactacgctttaccgttttctaaagaaataattatataataactatataataattatatattagttatatggacgattacgtattttcatgggcgcaggattcaactggcaagatggtacacatcgatagtgtggccagaggaaagtcatgcggatgtcactgtcctcattgtaaggagcctttagtggccaagcatggcgatataaaggcacatcatttcgcccatcacagcgaaacacgtaaggccacccttgaaatctgctatgccgtcatcttgtataaggtagcagagtatctgatacagactcataagaaaattcatgccccatcttattatggaatattccctgaacaggacatagaattttcagaagtgagggttgacggccagtatgagcgtgaagataaacagccggacgtcatagcgactggtacggacggtaaagagtatctgattgagtttgtttttgcccataaggtacaacacaaacagccgttggactacaagaacctgacttgtctggagatagatttggctcgtcagaatcttcagaccattgaaaagttcctgttcacatctaacgaggatcgtaagtggttgaacaacgagaactatttcacgattatcgaggaacggtataaacgcgctggtaaggcggtgaggattgccagagaaagagaatgtgctacatgtcctatacacgagtgtattggagtgaaactcaaaaactcccctaccccattgatcattgaaaacgatgggaacaaatatcgtctgtgtaaaattcgggaatacgatattaccctgaagaggttccaagatgaagaaaggcgtaaggccgagcaagagcgattaaggaagatgtcactggaagacagattggcaattttgccggagcgttcacttatgcgagttgcatacttcaccgatggaactgtcaggatcaatgagaaatggagcagtaagaagttacacgaaagatggtgttctgacagcattcttgagtttaccattgatgcccctggcaatccatcctcgatagccgctatgtatatacgatacagggggcataatctgaaggactgcatcatgtgcgagttctgccatgacggttattgctataagaacgtcgatcaacctgatgcctggcagtgtcggtcatttattgttgcatcacggctcagggttttaacagccagtggtttcaaacaatgggtagttgaaacatagtctaaaaagagttttgttatatattcattatataacgaactaataataaatatataattagtgttaagggattatataactatcagatattttttgtatctttgtacccagaaacattaaagcagaaagatatgacaatcacaggcgaaatgaagaatctggagaaggtacaagcgaggctggtacgcttctgtaggtatctggagaagcagaagaggtcagacggcacaaacagttatgatgacctctacatcaagattgcgtctgtagttggaactatcgaagatgccctgaactttgacgaaacaagatagtgtatggaagcaaagcagacattcaaggtgatagtggctggtggccgtgactttggagattacggcctattgtgccagacatgtgataggatgctctcacagaagcaccagacacatgatatcgttatcatcagcggtacggccagaggtgcagataccctcggcgaacgctatgcccaggaacgaggctatgccgtcgagaggttccctgctgattgggaacatgccggaaagtctgcagggttcatcaggaacgcccagatggccagtatagccgatgctctgatagcattttgggatggtcaaagcagggggacggcgcacatgattgatcaggcacgtcaaaagtccctaccctatcgtgttgtgtgttattcaccttgaaaagaaaaaaggaagagtgacaccaaaaagagagaagatccagccagtcgaaagtgattatggcgaaaaaatatactaattatatactcattatataatgaactaataataaatatataattattgttaaaggattatatattattcagatattttttgtatctttgtacccagataaacgaagatacaattatgaaacagacagtagacagattacaggagatcgagagccagatggaaaccatcggtgaggacatccgcaaggaaggccaagtgtaccgtgccgaactggaggaacgccaacgtctgggactccatgggaaagcagccatcaagcactacaatgaatggatgaagaaatatggtatggaacacttaatggttaaggaggattgattatgacagacataggcatgattaacgacttcatccagaaggaggaagaggtgaaggaacaggtgttttccggcaccaagcatcattgcatattcgagataactcacccgaacaagcatagtgagtgttacttttgtaagttcgtccaggacttcggagaagaccaggaaggggctgatatgatgtgtgaaagcatgaacaacttccgcaagccggatgaagaggtgtggtttattcaccgcctcctggatcaggaagagtacgacgagatacaagagtatctgaaacagtttcctcatggtgacgtgtcaaacgtttattcgccattcataaatagcgtaacagtacaaggcagtatataataagtatataacgaatatatattatgacaccggaagaatatattgagaaattgaaggaggtgcagcgcacccttgacagtgtaaaggaagatcttgaccgtgccatcgacaggatgcagcgacgtattgagacgggttatgaacatctggagcaggatagccgtctggcagctctggcgggacgtgaatacgtgaagctggctgacagcaaaatctacgagacagcaacatcaaaaatagaatattgagtatataattattatataataagtatattatgaagaaaggattgatatttctcggtggagtagtgacgggagtcctgcttaccttcctgtttgcttttatgttttcttcccagaaggaaacaagtgtaaaagagaatagcggcctgacgatgtttgaacaaccgggcgatgtgataacagagaaatcctttaaagttatccaggcacttgaacaaggtgctgcgctcgccgacggagagaaagaatacatgacaacatttctccttgtcaatgacgaaggaaaatactattacgaccacgaaatagtgaaggttccttcaggaaaggtagccagacaagttggaatattcaaatatacatctggaggtggccttgatagaaccgtaccagttgtgaagttcatggataaatgaccagcaaagataagtatgaataagattattgcatttgccaatcagaagggtggggtagggaagaccactctgtgtattctcttcgccgactacttggcttggaagaagaagggtgtggtactgcttgatgctgacgatcagcggtcagtaaccactaaaagagaaaaggatgtggagttcttcggcgaggaacctccctatgaagtgcagcatgtgggaatacaggatgttgactacatgcaaaggctgatggccaacgccaggcagattgatggcactgtcatcatagactgtcctggtaatgtaagggatgacggactgctgccggtatttacccaagcagatgccattatcattccattcgagtatgaggatatctgtctggaggccacgacggactttgtaaatctactgaacaccatcaagcaaaaggtgggagggtcggcaaagtacattttcgtaccgaacaaactccagtcctcctttggtactgcagcagaggtctcgatgtggaaacagtgcgcaagcatgtacggaatggttgggaaggtaatgccgaaggttccacaacgtgcgaacttgaagcgcatcgatacctacgacatcacaccatcacagagagagattcttcgggccaccttcgagggtatcatcagagagttgaatatataatcagtatataataagtaaataatagatattatggcagataataagagaagagagccatccgctccaaagggtatcagtatgttgggcatgctgcatgaatcgcagcaggccagtaagccaacagtggccatgcctgagcaagagcagacaagtcctgttcaggagcaaacagtatcagacggtgaactgtggaacaagttccttgagaacatgatcaagtacacaggtgtaaaagagcaaggatctgccgtctggcttccaagcgacgtaaagaaacgcctcgatgatttccgggcaacagcaaagaggaatattcccatcaggacgctcgtgtctgctatcgtcgtggccttcctcgacgaaaacgaagcaaagctgaaggatttataaacaataaaaagaatatatatcatgagaaaagttttatttgcaatcatgttattatgttctttggtttcttgcggaaccagtgagacagttgtatcaacaggagtgaatctgagtgaatacgaatactgtttactcggaacaggagtcaccagtggtgatgctgatgtgaccgatattattttgaaggtagagaatatccttccggaagtctttaccattgtatcaaaagagagggcatattaccttgtacaggaagggaaaaaggtactaacacccgatatcagcgtaaagtccgaaaaatgggatggtggatattcttacatttcgatttcgttcagggatttgtcaacaggaaggttactcgcagttaccaaatcctctgggcagggaatgtgcactaaataagatatacaaggaacttataagtaaattcggaaagaacaaataacatgaaagagacagtaaatccctatgaggtggaactgctcgacctctggaacgaggtaggtggccagatggtaatcaagtaccacagagcgaccatcaaaccggacaaaggtgacctacagcagctccgtgacaaaggtttcaagaccgatgtgatggcatgtatcatgtcagcattcatcggccacggtaagagccaggaagaaacgttagccttcctggaggaagctgctgccgccggtgcagcacccagtgttaccttcgaggctgcagagggcgaggccctgaatatcaccggcaaggagaataacccgatggtgaaccaactggtagaagccatcgagaatcaataacaaggggtgatatcatgaaagtgaagatttatggaagtaagcatcaacagttatcaagagactgaagagcagcgcatcatcagggctctcaaagagaaagataaagttcaagacaagctgattgaagnnnnnnnnnnnnnnnnnnnnnnnnnnnnnnnnnnnnnnnnnnnnnnnnnactattgtcgctgaactcatcaaggagatagacggatggcgtatcaaagctggactgaaaccgctgagtacagaatatttcgaggcctgtgccaaggattctgatccggaaacaatgattgtcaaaatgaagaacccatgaaaaggttaatcacattattctggcgatggtggtaccgtcaccaccaagagccatcaagattcacgagagacgaagcactggccattgcgaaagacttcggtctggagagtgaagtgactgaggccataaagcacggctgcaatcctgacgaagccctgcaggaatgggacatatatccctacgatgacacagcagtatataagcatctgcagcagacggatcctgaaggcatggaaatgctcagtgatgaagaacaagccgcctttgaaaagaaacatggactgtaatatggcacttcaaatagaacagaagaaacagctgttgatgaacacgctgatggaagacggtacgaccgcttgggattacgttcttacgaagagaacggaaagccagccctggatagccgctggaatactctcatgtatgaagaagggctacaacctcaatccgatggtagtcaactgggaggctcgcgaactaagatacagcaagtgactatggaaatggcaatttggcgaaaggatgagaaattatataccgcattacaggatttaatgcggacgtatctcatccacaatcacacgcccaatattgacaggcagttaaaggaacagtttgacagttactttgcctggcatgaagagaactgggagcgtggccacatcgagagctttggcggtccgacaggaagccagttgaaccgttacatcctcgccggtaagctcgcccttgcagccccaaggttactgccaggcgattcaggatggatgcgccctggccgtctggcatcccttgtcatctatctgaaagatatcgctttcgacaaggagctgacctacaggacaggtgccagtgtgttctactgacattgtaaagaaatctgctgaaacgggctttttacagatgccggaagagaaaatgaccctcagaaaggcccgctgtggccatatcgacgtgacggtggatatgttataccccctaaaatcgggcgaaataaaatatctttacaccttcaaatacatcaaaattgatgttaaatacaaggagtaccttatattttagaaggctgatctgatacgtaaccggcatcggtaatatagataatcatctataatttacgcatcaaatatagacagatatctatattttataggctccagtctataatctgcgcatttttttggggtagtgtgtattaactgtaatactccccgattttaacaaataatccaccaatatcgtcgtaaaattgttaaaatacgactttttatttttttcggtgatctttatccgaaaatagttgtatttttggcgcgataaccctcaaagcgtcttaaatacgttaaatcaagactttgttatcacgaaattagggagtatacattagaagttgtatctttgtcggaatatcatttttaattgtaacaaatatgaatatatctattgcattagaggttattagctacctcaacacagagtttgactctcacgactttatccggaagctgctggagaagcatccggaagtatatggtcggtatcttgttaaacatggcgacaacggtggcagtgtagctactgccgacggcgaaattgccaagttccttgccagacatgataacgaacatgataacgctcttcacattatcagaattggtaatggtcgctctcgtgatattcttgataatatttctgataacgccaaatggcataaataatttgaattatgaagaaacaacttttactttttgtgtttatactgctgccaatggtggccaatgctactgttaggattaattataacggggtttattacgatttaatagaatataatgaagagaagtatgctgaagtagcaagaatgtcaagtggtaaatacactggcagcgtggtaatttcttctactgtgacctttaagaatgttacttacaatgtgactggcattggaagtgaggcgttc

SEQ ID NO: 452 - DNA, 18439 bp, synthetic construct
  source 1..18439: mol_type = other DNA
  misc_feature 1..18439: note = Synthetic
gtcttcctgataattgcttcaatccttttcataccttattatatttaatagtcacctgaaaccaaccatcttgttagtttcctgctgcaaaattaatacaaatcgaaagcatttcgacaaccaaccaaacaaaatgattcaaaataattgtttgaagtttctatttggtttgtttgtttattgttttgcttgcaaactgtaagcgtaattgttttatttacttacagtttgtaatccacgaatcattttttcactcctgccacttatttgctgaaattttacggtctgcccaaacgtcgaaagacagtggggcaaacgtcgaaagtgatttggaatcgctcccgattcatcatacctttgcaatgtcaaaaagacaaaaacagagtctggcgacacaaaacagattattaacaattaaaaagcaaaggatatgaaaaaaatgattttcgccctcgtggcaatggtgatgatgacaatgagcatgaacgctcagagtgtgaacgacaacaggtcgatgaccttcgaccgcatgagcagctatctggaactgaggattgaccaggtggaacccgtcaagaccgcaatggcccagttcgacagcatgatggaggctctctatcagctgaaggatgcctcgaaagaccttgagacctgggagcggattcaggcagcccacaagaataagatgaaaaagattctcgacgggaagcagtacgacaagtgggtgaagatgctcgaactgactgccaagaaccatgcagaccgcatcatcgaacagcagactgccagcaaatagtacaaaccaaatagatacttagacagttcttatctctcctgcatagagattatgcaggggagattttattcttttgaaaaaaaacattatctttgcagacaaatgaaaagaatactgaccttgggaatgagtaagattcacataaaggatgtttggctgttcgtggcacaagtgttgttgctctcgctggtgatgctgtcgcccggcctgatcagctatatcacgagcaacgatgctgcggtggtatgggggtcgcttcagattgcagccttctggctggctcctgccgtattggtgtacctgctcaacttctatgtctgcgtgcctctattgtggtttcgcagacggttctggatgttcgccatcgtcaatgtgttgctcatcgtggcctgcaactcacacttgctgttctctcactatagcctgcccgacgactaccgcgccggctattcctctttccagatcatcgcactgctcatcaacctgatggccatcggcatcgccctgagcatccgctacgtgatgcggcagaacgagaagaagcagaaggtggtggaggcagaactggcatggctgaagaaccagatcaatccgcatttccttttcaatacgctcaacaacatctccagcctcgcacagattgacggcgacgagacacaggaggccatcatgcagctgagcgacctgctgcgctatgcgatgtatgagaccaacaagaagaccgtccccatcggcggcgaagtggagttcatgcgcaactatatcgaactgatgaaactccgctgcaacgagcagaccaaggtcagttctcagttctccattctcaactctcaactcgaagtggcccccctgctcttcatctcgctcatcgagaatgccttcaagcacggcatggacagcaacgcgcccgccaccatcgacatcagcctgacggagaaagacggcacgctcgtcttcgtctgcgacaacaccaacaacccgaagcccaccaaagaccgcagcgggtcgggcatcggactggagaatacgcgccgccggctgaacctcatctaccaaggccgctaccaatgggagcaaaccattactccggagaatatctatcacgttaaaatcaccctccagccatgaagccactcacctgtatcatcgtcgacgacgagccattggccgtccgcctgctggtttcctatgcggagaagacgcccgacctgaagctgctggcctcgtttaccaactccatcagtgccatcaacgccatcaaggcacaacagcccgacctgctgtttctcgacatccagatgcccaacatcgacggaatggaactggcccatagtctgccggaatccacacgcgtggtcttcactacagccttcaaggaatatgcctttgagagttacgaggtgaatgcgctcgacttcctgctgaagcccgtgcgctacaacaagttccttgctgccgtagagaaagcccgaaagcaactccagccatctcctgcgcctcagctgcagcagcccaacacggtttttatccgtgtcgatggcgagtggcgtaacgtggcagtagaacaaatcatctatgtaaacggaatgaaagactacgtgatgttctatctcgacggcgagccaaagccgctcgtcacccatctgacgatgaaagccgtagaggaaatgctgccccgcgaccgctttctgcgcatccaccggtcgtacatcatcgccgttgacaagattcagaaagtggaccgcaacgactgcgtctatatcggccgtgaaatcatccacatccccgacggctacctgccggccttcaagtcgttcatggaaacccggacattcagataaacagcgtggcgccttccgtggagaaggcgtaattttgcagcgagatttgagtaaagttgcaataagaattgagtaaaaatctacaatcgttttgggtatgacttatatacgaaagcaatatcacacacgggcggtgtttctttggaggatttcctaagttgtgatattgaaagtctgcttaataaggataaagccgaatgaacatcaccctaattcctaaatatttatgtcagatttttgaagatttttgtttaaaacggaggactgtgttcattcgaatcattttctttcactcctaaaactaaatcgcagaaaataaacgtcatttctccatattgtctgcaaaagtttttgtatatttgcagcattattttccttttgtaacaaaatgaacaacaaagaatctggatacgtttacatactgaccaatcccagttttcgtgaagattgggtgaagataggcaaaaactcacgtccggacgtgaggagtaagggaagttgtacattcattaatttggaaccatgagcgaaataaaatatatagagccccaacaagagacaacattgtatgcagatgtgtgccagattattgatggcgcacgtggcaggattgccacatttgtgaacacagaagcttgcctaactaactggtccattggtaagcgtatcaaggaagatgtactctataacaaacgagcggattatggcaaacagatagtaataaacctgtctgcaaacctgacagaacgatatggtagcggatggagtgagaagacactgcgacattgtctccgcgctgcggagactttctcagaagaggacattctctccgcaacgcagagacaattgacatggacgcatctgaaaagcttaatgtatatcaaaaatcccttagaacgtcagttttatgcccagatgtgtatttctgagcactgggatacacgtacgctggacgagaagatagacaagcaattatatataacgactgcactcagtcgcaagccagaggaggtcatcaagaaagaattggaggagtcaaagaagaaaaaccagctgttgccagacatggttttccgcagtagctacttccttgatattcttggactccccgatgtgttctcagaaaaggatttggagaatgccattcttaatcaggttgaggagtttctttcagaacttggttccgacttcacattcgtgaagcgtcagaagcggataaccgttgatgccgtagattactatatcgatttgcttttcttccatcgtgaacttcgcaggctagtagctattgacttaaaactcgggaagttcaaaccagagtacgaaggacaaatgcgcctgtatttaagatatctgaaccaaaacgaccgtaaaccttgggaagaatcgcccataggtctgatactatgctcagaaggcaatacggaacacattgagtacctgatgcttgatgaagaaagccccatcaaagtggcacagtattacacgaagttgccagacaagcaattactgtcagaaaaacttcgcaaggcaattgccatcgcccgagaacattatcaaaagaacaaggaagacaaacctgatggtcaataaataaagaaaatatatgaacaacaaagaacctggatatgtttacatactgaccaatcccagttttcgtgaagattgggtgaagataggcaaaagttcacgtccttactcgcaagtattatatggataggaataatctataaaaaaaagaaccgccactattagaaaatagttttggctctctttagtgttcacaacggaataatccttattgtgaatgactctcatatcatgttgcaaaattaacaaaaaaacttaaacctgcaaaaaaaataaggctaaaaataataaaaagggttatttcacatataatctctgttaatcaacaaataatttgtttcttttttactaactttgccaaataaagtaactaaaaaacttatgaaatatatactaggattagaccccggaattgcaagtataggttgggcaatagttttggaagcagagaacaatcaagagacatcaaggataatttcttctggagtcataaaggccaacttcgataatttcacatatctgaacagcaaaggcatacccaaggagggaaaccccgtagaaatgttcagaaaaggatttagtgtttctcctaatctagtcagaagacaaagcagaagtgctcgtcgtaatctgcaacattacaaactgcgtagggctgatttgataaagttgctgaaagaaaatcacctggttaacgatgatactattttatatgaagaagggaagaatacaacccatcagacttatgaactccgtgctaaagcggctatggaggaaatatcattggaagaactggctaaagtcttgttaatgataaacaagaaacgtggctataaaagcagcagaaaagaagattttgattcagatgagcaacagggtgaatatttgtcagcaatagttggcagaagcaaaacgctggcagataatcaccaaactgttggtcaatatttgatgaaccaattggagcagcacccattgaagagtatcaagaatcagactttttatcgtaaagactacgaagacgagtttgagcagatttggaaaactcagataaagtttcatccagaattgactcgtaagcttaaaaaagagctcaagaaccgagtcatattctaccagcggcccattgaaagcaagaaacaagatttgagtttctgtgaacttgaaagccgacagatagaaatagaaaagaacggaaagaaacgacttgtaacaacgggcagcaaggtatgtcccatttcttctccgttatttcaagaattcaggatgtggcaccggttgaatgatactgttgtcattaacctcaacactctagaaaaaaggagcctcacacttggcgaaaaagaattacttgcttctgaactatccatcagaaaagaactttccaaaaaagatgttattaagttattgttaggtaaaggtggtaaaaactttgatttgaattttgaaaaattattaggtaatgagactcaggcaagacttgtcaatgcttacctgaagattctggagttgacaggtcacgacaaactggacatcaagaaaatgaaggcgcatgaagtgattgatgccatttgcacggtgttcgctaattttggctattcttcagaagcgttaaaggggcaaatagaaaacggactggatgtatgccaacaaccttactacagactatggcatctgttatattcttttcctggtgacaacactcgttctggcaatgcaaagttaattcaacgagtaaaagatttattccagtttgattcagatgaatttgcaaaggaaattgcagaagtgagatttcctgatggacatggtagcctcagcgcaaaagccattcaaaagattcttcctaaattgaaagaaggatatcaatatagcgatgcatgtgaattggttggctacaagcacagcaaacgttcaatcaccaaaaaggaaaataagcaaagagtcttacagcagcacttaaagttaataccccacaatagtctccgcaatccactggttgagaggattcttaatcagatggtgatgcttgtcaactacttagttgatgaatatggtaagacatatggcacctttgacgaaatccgcatagagttgccacgtgagttaagtagcaatgcagagaaacggcagcgagactcaaagggaattgatgataatcagaaagagaaagaaacatgtagggaggaactgataaccatactaaaaaagcatggaataaaagtaacctatgtaagtgagaatgacctgctgaaataccgattatataaagaattggaaaagaatgatttcaagacactctattccaacagtaaagttgatcttatagatttgataatgggtagagggtttgataaagagcatattattcctagggcattgcgctttgataattctttttcaaatctaactatagaaaggacagacataaaccttgacaagagcaaatcaacggctatcgattttatcagagacacctatggtgaagaagccacacggcaatatattgccaaggtgaatgaactatttagacagaaagcaatcagcaagacaaagaaagaaaatctactaagaacatatgacgaaatccccagtgagtctttaaatcgcgatttgggcctgactgcctacattaacaaaaaagcaatggagatacttgagcctgttacgcgtaaggtcgttcctacaacgggtaagattaccagccaattaagaagggaatggcaaatagaaactgtgctgaaagaactcatttgggataaatacaagaaattaggattgataaattcttatgttgacaagaatggcgaaatagttgaaagaattaaccagaacgtctggaccaaaaggagcgatcatcgtaatcacgcgatggatgctattaccgttgcctttacaaatcctgtcttcatcttctatctcaactcattgaattcgcgaggtgaagctcgtgaacagcttattaaaatgcgtcataagtatatgcatcgtgatgagcaaggaaactggatattcaacccaccgatgcaaatagacatcttgcgtgctgaggttaagcagcagttagagcagatgcttatttttcaccagtcttcgtcaaaagtttctactcctaatgtgaatattactaagtcgaaaaagaaaaaagcaggaaacatgcaacagactttgactcctagaggcaaattgcatgatgacacctactatggctgtattcaatatcctgaatgtgaaattgttgctgttggcaaatctttcgatgaatgtaaaatcgcaacagtgacgaaagcttcttataaaatagctttgctggaacgcctaaaccaatatggcggcaatcccaaagatgcgtttacaggcaagaacgctttggacaagaaccccatttggctcgatgaaatgcatacgaagtcagtcccgcagaaagtgaagtgcttgcaaatcaagaccgtctataccaaacgggttgcagtcaatgaaaacctgaatttagaaaatgtcgttaatgagggcatcaaacgcattctaaaagcacgtcttgaagcatacaatggcaaaaccaaggatgcttttacaaatttggaggaaaatcctatttggttcaataaggagaaaggcatttgtatcaaatccgtcatagtgaaagccacagatgtaaaagacccaatacctctgcataaggaaaaagacagaagtggaaaacatgtgattgatgatgaaggcaagtcgaaatctgttgactttgttaagcccaacaaaaatcatcatgcagacatctatgttgatgctaatggtgatcttcatgaaaaattcgtcactttctttgaggccgttcagaaagccaacaagaaccaaccgatagttgacctaaattaccatgctgacgaaggttggcgccatttattctcgattcagcgttttgactatttggtggttccagacaaagtgagtggctttgatccttcggccatcgacgtgtgtaatcctgctaattatcctattgtcagtcctcaccttttcagggtgcagaaaatgtcttcaaagaattatgtattaaggcaacatcttgatacatctaataagacaccagaagaactaaaaggtgttacatcaattgagataagaagcctttcaaattttttaggttgcatgaaggtctcggtaaatcgtttaggaaggataacctctgctcagcctattatgatattatgatgattataataaagcaaaaatcccacctgctggtgggatttttaattatcagaagctttttatctctgtgatttgtcacgtatgcatcagattttcaattcaatatgaattatctgatgcttctgatatgaatttgagagtcattcacaactcactctctttgatggaacacccgtcaccggatgcttctgatatgaatttgagagtcattcacaactttgattcctacctccatacggtgacgaaggatgcttctgatatgaatttgagagtcattcacaaccgcccttgctgacgtaggtcgtgatggcctgatgcttctgatatgaatttgagagtcattcacaacatggtgatcctgccccacgcctggaagcgagatgcttctgatatgaatttgagagtcattcacaactgggcctccctcgaatgcaccaacttcaggatgcttctgatatgaatttgagagtcattcataaccctgttcaccgaagaaatgatgggcataataataatcaacaatgtcaatgagcactttgttgatgcaaaaatacaaagattctaataaaacaccaaatttatctgtatttataaatattcttgtttagtttgtcttttcctatttttttcgtatctttgtaacgaaaaattgtataagttcagagtttaagacatagagtaaaagaagtataatcgttatatggcaaagcagacaacaatcttttatggtaatggtgttaacttgttaaacaagaaggggaaatcgtgggatagtattctgcgagaaatatctgtagggcaaatcctgccaccgatagggaacaatactcttaaatatgaatatatcgttctgccaaaagataagaatacagaagttaacaaaggctgttctttagctgttaatggagttcccatacatataatgatagatacggaagaagatattaagacaaaactaaaaggagtaatgtccaattacgtagctcccacattctataataaactggcagatctagaagcagataactatatcacaacaaactatgaatcttttctaaatgaacctcttatgaaaagagggtataagttaaaatatacagagtgtagtacccataatatggaggctcattacacttttgttaatcgagaaaagaaaatacacttatggaatatgcatggtagctttgaattagaagaatatattatgcttggtctatatgagtattgcgagtctgtatataaattaaagaaaatgtttgattcatctgagatagataaaaaaagttggccatatgtcatgttgcattctaatgtttatattttaggttttggattaggatatgaagaaatcgatttgtggtattttcttacaatccgcaaacgtttgattcgtgcaaataaaatagaaaagaataagattatcttttattcaatagatgacaatacattggatataggcaaaaagaaactattagaggcattggatgtagaagtaaggataattgattttgactggagtgaacgtgcttatgaaaaagcttacgactacatttgccaaaatatcaaaaacgaaatggatgaaagctgtataaataataattgagtatgaatgtaatacctaaaaccaagcaagaagcctttgaccagttggatcggatgctgacaaaggaggagatggaaaaaatgatgagtgttggtgacacgatagagtatcactttacactgggattgtggattcggaataactggatctatgaacaagatgaagaggatgttaatcgcttggcaaaagcgttcagaatagagtttatagtcttcgatccagatagtttgtcggaaaagattattgaatcatatcaaaaatatttgaaacgtaaaaacaagtagaaatatggctgaaagatgttggatatatgaggtctgatggctgatgtgaaatataattgtaactatgcaaacaaaatatgaacaacgagatacaattcattttgtaccaattgcctgatgaggaaggcagggtgcaggtggtgataaaggatgagacaatatgggctacgcagaaagcgatggctcagttgtttggtgttggagtgcctgctattagtaagcatctggcacatatctttgaagagggagaattgcctgaaatttcagttgtttccaaaatggaaataactgcttctgacggcaaagactacctcacttctttctattctcttgacgccattatcgccgtaggctatcgggtatcttcggcccgtgctacgaagttccgcatttggactacgcaccaggggaattatctaaaagtgccttcacgccttcatcgcctcataaacaactgaaaaacaatgggatacggatgaaaccgcggtttcataccgccttcatactattatttggaaaaaagataatcaacgggagcgaaaaagattatgtattgatgatcgtttaatcatgtattcacgctcaatctatgattaatcggtgagcaatctattatatattcgggagtaattgataatctttttgtacggtggtgatattatgggaccttgatagcatatgaaagcggatgaaaccgcggtttcatccgtaaaccactctgcttcaacgtgttgcggaaagatgaaggcatgaaggcggtttgtaagtcgtaacactcttaaacgcagacgtcagttaatagggaagcaaaacagaaacttacgtcttgtcgtgatttaaatggatattacttacaaattgtaaggtaaaacaagaaatttcctttcaatttgtaaatcatatcgaaaataaatgtgagaaaagtctgatatttcttggagattctttcaaaatgttttacctttgcacttgaaaataaacaaaatgatagaaatcggctaaaaaagtttgcaaaatggcaggcaagatatgtttcacaaagatgcagggagcaggcaacgactatatctacgttgacacctctttatatacggtctctgatcccgtgaaggccgccatcgaatggagcgaccgccacaagggcatcggggccgacggcctggtgctgatagggcgttcggaaatacccgaagccgactataccatgcgcatcttcaatgccgacggttcggaggccagaatgtgcggcaacgcatcgagatgtattggaaagtacctgtatgagaagacccaggacctacaagccctacagacccaccccagccctccctatgagggagggagcaattaccacgaaatcagcatacggctgcttacgctttcgggggtgaagacgctcatcctgaagattgttgacgggaaggtagaaaaagttacggtggatatgggcgaaccggtctttgaagacgaaagcctttttaattccgctaaagaaaaaagtctaacaacttccctcccttcgggagggattgagggtgggttctttgtctctatgggcaatccccactacgtgatcttcgtggacgacattcaggcggtggatgtagctgaagaagggaaacggctggagtttcacgaggcattccccgaacgctgcaacatcgagttcgcccaggtgacggcccctaatataataagaacgcgcgtgtgggaaagaggcagcggtatcacaatggcctgcggaacgggagcctgtgctacagcagtggctgccgccatgaccggacgcagcgaccgcaagagttccatcctgatggacggaggacaattggacatagaatggcgcgctgacaaccacgtgcttctctctggccctgcggaatttgtgtttgaaggggaaatatacgaaagtgaagagtgaaagtgaagagtgaagagtgaagagtgaagaatttgcaaccgcgcgggcttattctgaaacttggaacctgaaacttgaaatttgaaacttgtatttaaaataagatatggcactgatcaacgaacatttccagaagctctcgaagaactatctcttcgcggacattgccaagaaggtgaatgcctacaaggcgacgcacccgaaagccacggtcatcagccttggcatcggtgacgtcacgcagccgttggcacccgccgtaatcgaggcgatgcacaaagccgtcgatgatatggctacaaaggagggtttccacggctacgggcccgaacagggatacctatggcttcgggagaccatcgtgaaaaacgacttcctaccccgcggcgtgcgtattgatccttcggaggtatttgtcaacgacggagccaagagtgatacgggaaacatcggcgaactggtgcgttgggacaactccatggccgttaccgaccctatctatccggtctatatcgactccaacgtgatgaacggacgtgctggcacggtcaatgaacggggagaatggagcaacgtgacctatatgccctgcaacgaagagaaccacttcatcccgcagattcccgaccaccgtgtggacatgatctacctgtgctatcccaacaatcccacgggaatggtcatcacaaaagaggaactgcgcaaatgggtgaacttcgccttgaagaacgatgccatcatcttctacgatgccgcctatcaggtctacatccaggacgacagtattccccactccatctacgagataaagggcgcacgcaaatgtgccatcgagtttcacagctactccaagacagccggtttcacgggtgtccgctgcggttacaccatcgttcccaaagacctcacggccatcacgctggacggttcggaacgtattccactgaatccgctgtgggaccgccgtcaatgcacgaaattcaacggcaccagctacatctcgcaacgggcagccgaggccatctacaccccagagggcaagcagcagatcaaggagaccatcgactattatatgggcaacgcccggttgatgcacgagacactcactaagctcggcatgcgggtctatggcggagtcaacgccccctatctttgggtaaagacacccggcaataccccttcgtggaagtttttcgaagaaatgctctacggggcacaggtggtctgcacgcccggcgtgggctttggcccttccggcgagggtttcatccggcttacgtctttcggcaaccgtgaagactgcgaggctgccctccaccgcatttcacgctggatgcagggaggataggggggccaaggggcctggattcaggattcaagattcaggtttcaggtttcaagtttaaagattaagttcccaggttattcttcgacaaaatgtaagataattcaaaaaaaagctgtacctttgcagcgcaaacttaaacaaaggtatcataaaaagattgtttaatagtaaatgttatgacaatggcaaacttaagattccaggttgttgaggaggctttctccaagaaaccactcgaagtgattgcgcctttggagcgcccgtcagagtattacgggaagtatgtgttcacccgtgacaagatgtacaagtacctgcagaaggatgtatatgagaagctcgttgacgttatcgataatggtgctgtccttgaccgcagcattgcagatgccgtagcaaagggtatgaagcaatgggccgatgagaacggcgttactcactatacgcactggttccagccattgacagagggaacagccgagaagcacgatgccttcattgagcacgacggtaagggcggtatgattgaggagttcagcggaaaactgctgatgcagcaggaacccgatgcctccagcttccccaacggcggtatccgcgccactttcgaggcccgcggctattccgcctgggaccccacctcaccggtatttatcatcgacgacacactttgtatccccaccatcttcatctcatatacgggtgaagccctcgactacaaggctccgctgaagcgcgcactccgtgccgttgacgaggcagccagtgccgtggcccgctatttcgaccccaacgtgaagaaagtgaccagcaacctgggatgggaacaggagtatttcctcgtggacgaaggtctctattcggcacgtcctgacctgatgctcaccggccgcacgctgatgggacacgattcggccaagaaccagcagatggacgaccactatttcggcactatccccgaccgtgtacaggcctttatgaaagacctcgagatacaggccctgcagctggccatcccctgcaaaacacgccataatgaggtggcacccaaccagtttgagattgcccctatcttcgaggacaccaacctagccgtggaccacaatatgctgctgatgtcactcatgaagaaggtggcccgcaagcacggtttccgcgtgctgctccatgagaagcctttcgacggcatcaacggttcgggtaagcacaacaactggagcctctctacagatacaggtatcctgctccatgctcccggcaagaatgccgagcagaacctccgcttcgtcaccttcgtggtggaaaccctgatgggtgtctataagcacaatggtctgttgaaggcctctatcatgagtgccaccaacgctcaccgtctgggtgccaacgaggctcctcccgccattatctcaagtttcctaggcaagcaggtcagcgaactgctggagcatatcgagaaggctgacaaggatgacctgttcacaatggccggcaaacagggcatgaaactcgatattcccgagattcccgaactgctcatcgacaataccgaccgcaaccgcacctcaccttttgccttcaccggtaaccgctttgagttccgtgccgtaggcagcgaggcaaactgcgccagtgcgatgattgccctgaatgcagccgtggccgaagccctggtgaacttcaagaaccgcgtagatgcactgatagccaaaggacaggatcagaccagtgccattatcgacatcatccgcgaggatatcaaggagtgcgcacctatccatttcgacggcaacggctacagcgatgaatgggtagaggaagccacccgccgcggactcgacgtggagaagtcatgccccgtcatcttcgaccgctatctcgatcccgagagcgtccagatgtttgagagcctcaacatcatgaaccgcaaggaactggaggcccgcaacgaagtgaaatgggagacctacacgaagaagatccagattgaggcccgtgtactcggcgacctttcgatgaaccacattattccggtagccacccattaccagacccgtctggccaagaacgtagccgccatgatcgaagtgtacggcaccgaagagggcaaggcgctctgcacccgtaacatcaagatcatcaaggagattgccgaccgcacacagaccatcgagaccatggtggaggaactggtgaatgcccgtaaggtggccaacaagattacctccgagcgcgagaaggccatcgcctaccacgacaccgtagagcccaagatggacaagatacgctatcacatcgacaaactcgaactgacagtagccgacgaactctggacattgcccaagtatcgcgaactgctgttcatccgatagacaccgattttaaacaatccatttcttttattggttgtttaagtttgcagcggaaggatttccgagaggaagtccttccgcattttttatggataacaattcatataaaattattatatgttaaaatgtctattatagtattgtattttagaaaataattgtatctttgcactcgcaaaagttttccaaaacggacaacttttcaaaaccgaaaatcaaaaaagttttccaaaaagtgaaacttctaaccgcaatcggactaaattaataaagtaaaatacataatggacaacaaacttttcagcatcaccaagcgagacggtgagaaagtacgtttttcgcttgacaaaatcatgaacgccatcatcaaggcattcaactcagtagaggaacccgttgatttgtcggtacttagcaaagtattggcccatctcgacatccacgaggacatcaaggtggaagacatccagaaccaggtggaggaagccctgatgaaggagggattctacaaggtggccaagtcgtttatgctctatcgccagcgtcacaccgaagatcgcgagaccatggagaagttgaactttttggttgactattgccaagctgccaacgccgcttccggttccaagtatgatgccaatgccaatgttgaacacaagaacatcgccacgctgataggcgaactgcccaaggccagtttcatccgtctgaaccgtcgtttgctgaccgaccgtatcaagaagatgtacggcaaggaccttgctgacaagtatattgatttgttgacccaccactttatatataagaatgatgagacctctctggccaactactgcgcctccatcacgatgtacccttggctcatcggtggcacagcttccattggcggcaactctacggctcccaccaacctgaagtcgttctgcggcggctttgccaatatggtgttcatggtcagttcgatgctgagcggtgcctgcgccacgccggagttcctgatgtacatgaactatttcatcgggatggaatatggcaaggactactggaaagagcccgacaaggtggttgacctttcgctgaaacagcgcaccatcgacaagattatcaccgactgcttcgagcagattgtctatacgctgaaccagcccacaggtgcccgtaactatcaggctgtgttctggaatgtggcctattacgataagtattacttcgatgccatgttcggcgagttctatttccccgacggttccaagcccgactggcccggactctcctggctgcagaagcgtttcatgaagtggttcaaccaagagcgcacgaaggccgtgctcacattccccgtggaaaccatgtcgctgctcaccaaggacggtgactgtctggacaaggaatgggccgactttactgccgagatgtatagcgagggacactccttcttcacctacatgagcgacaatgccgactcgctggccagctgctgccgcctgcgcaatgagattcaggacaacggattcagctacacgctgggtgcgggtggcgtgtcaacgggttcaaagagcgtgctcaccatcaacctgaaccgctgcatccagtatgccgtgaaccacaagatggtctatacggagtatctcagcgaggtcatcgatctctgccacaaggtgcagctcgcctacaatgagaacctgaaggaactgcagaagtcgggcatgctgccgctgttcgacgccggctacatcaacatcggccgccagtatctcaccatcggtgtgaacggactggtagaggctgctgagttcctgggcatccagatcaacgacaaccccgaatacctgcgctacgtgcagaccgtgctgggactcgtggagaagtacaacaagcagtatcgcacgaaggaagtgctcttcaactgcgagatgattcctgccgagaatgtgggtgtgaagcacgccaagtgggaccgcgaagacggctacttcgtgccgcgcgactgctacaactcctatttctacatcgtggaagacgattcgctgaacatcatcgacaagttcaagctccacggtgcgccctacattgagcacctcaccggcggttcagccctgcacatgaacctggaggaacacctctcgaaacagcaataccgcaacctgctgaaagtggctgccaaggaaggatgcaactacttcacgttcaacattcccaacaccatctgcaacgactgcggccatattgacaagcgttacctgaaggaatgcccccactgccacagccgcaatgtggactacatgacccgcatcatcggttacctgaagcgtgtcagcaacttcagtgaggcccgtcagcaagaagccggccgccgtttctactatgaggctgcccccaaggaactggtggaagaacttaccctctaatactatatgctgaaatacgtaaacactggcgtggtctttcaggaaatccctgacgagaccacgc

SEQ ID NO: 453 - DNA, 10125 bp, synthetic construct
  misc_feature 1..10125: note = Synthetic
  source 1..10125: mol_type = other DNA
gctattgggtgcttcatcgcggtgctgtcagatgccttcggttgcacctcggccccattcgctggcgcgaaaggacgggcggatgttcaatggtcaatgttcaatggtcaattaaaccgacacaatgtcggttgccactacgtcctgatatgccgctccgttgtgttcgtgcgtttggaagcgcagcgtcactacgacgatgtctccctcgttgaaactctgtgcggcggcattgcccagcacggcggcggcatattggttctcgtacttgccgccgagttcctgcaacaagaggttacgtttgttcagcgagcctgtctcggacttctcgctcttcacggagaacatctctccgcttttcactactttaaggatctttgcatccatatcttttctttgcctccgctgcccgagcgctcaacgtgagccgtctctttgtcggaaagcgctgcaaaggtatggcgttttattgggggcggtatggcttttgaacaggccttcccgagatttcccgagatatcccgtcatatcccgtaatatcccgtgatttcccgccacacccatacaagaaggcacaaaaaaagcaccagaaaataaattctgatgcttaatgagaactacctcgccgtagtctatcttacatagttattgctaaagtttttctcgctgaatccttcacctgtcggcatccccattcgtaccaactctaaatatacaaagcttgaatttgaaggaagcaataactttctgtcttgattcttatcctttagaaacgcgcatatatctggcatcctgtaattgacaaccaatcgctttattgtatcgtgaatatgccaagcctcttcatctcctatttcggggtgaataaaatgaaacctttcttcattcctctcgcggttgttgccgggagccacattttctatattattgcccacaggagattggggagccgcttgttggctcacctgcgaaccgggcattgcaaatatgcagtcacggatgtcaccgttgaacacttggcaattgctatccttttcaaaatgattaactacatttttgtttttattctcttcttccatattctttatatattaccaaattgtccagatgtcgggccattaaaaatttgacaatgactgttttcgccaaagtggttatgaatttctgcgcccgatttgtcgttttcttttattgcccgcagcaaacgcggtgtttgttttttgaactcctcgttctctgataaagtgagagccaaatgtgacaacacttgttccgctaatcctcgcgttagaatcagtagccccttttctatttcttcaaacgaaacagaggtctttgccaatgcttcaaaattatggaacaatgcctcatatcttttattaaagtctaaggcattatcttctaattcttttatcctcttatttttttcttctatttcatgcttcagctctgccgttgttgcagcagggcgactttttgacatcgcctccaaataacaatgggggaacaaaattccgtaaagcccatccagatctgtcttttgctcatggtcgctttcgagtctgttcaatgcgttaatggcattttggagttttatcttgttatcataatgagcgcaacatttgtcaaaacaacattccgcgatgggtaaatataagtgtatatagcctacgtactcaggattttttaaattattaaatacgctgacaatgttcgaaaaattaaagcttaacacacgccccatacatattccgtacattatgactatgcaagaccacttgtcttgcaggagatgaatcataacacggcgttgtgattcgtcctttacggaattgtatatcattaaaactgcaagcaaaaagcattcgccctctgcttggtggcgatcgaattgtgcgccaccactttccataactttctcccttacacgttctgacacctcaactctttgttgatcgtttagaaattgtgggataaaagaaaaaagctctgtgccgcgatatccgtactctctactatagaaatgccccctatatcgaacctcacttgagacgaatttaagtatgcagtctgctaactcgatattcgcgtctgcattctctttaaagaaatacaaatatcccgccctcttctcttcttcattcgcttcgtaaagaatcaaaccacccggcaataaatcttccacccaaatgttgccgggttctttgtaaaggttgtaggcaacaagcatctcatgatcattgttcatcacgatgatgcctgtgcgttgtatgttgtcgttggttttaaatgcgacaacgctacctctgtggagggtaaacggggtgacttgtcttctgtttgagacgtcaggaaaaggaagtgtagttaaatccatgcaattatctatgtgttttttgttagtaattattcaacttcgtgattaagcgttcttgcaaaggtagtaaaacttcgcaaaaacaccaagggaatgataaaaaaatggcaaattacaactcatcagctcaaaatatacaacgattcgtaaatagcaacgccgtaatttgacggatatacaaagaaaaagaacctccactattaagaaatagttttggctctctttactgttcacaacggaataatccttattgtgaataactctcaaattgatgttgcaaagatacgtttttttttcaaatgaacaaagcattttatgaaaatttttgcaaaaaccattccataagcacaaattaatcaaatatcgatgcttttttatttccattataccgcttttttattatctttgcaaagacataagacataagaatctaactctatgaaatacatattaggtttagaccccggagttgcaagtatcgggtgggcgctggttcgggaagccgagaataacacagaggaatcagaaattatcgactcgggagtcattaaagcaaactttgacaattttacctatctaaacagcaagggcgttcccaaggaaggtaaccctgtcgaaatgtttaggaaaggattcaccgtgtcgcctaatcttgtcagaaggattagcagaggtgctcgcagacgccttcaacactacaaacaacgtcgtgcagatttaatccgactgtttaaagaaaacggcctgatggacgatgatacgctgttatatgaggacggcaaagacactactcatgagacttatcgccttcgtgccaaggctgcctcagaagaagtctcactgaatgacttggcaagggtgtttttgatgatcaacaagaaacgtggttataagagcacaggggcagacaactttgagtctgaggaagaaaagggcgaatacctgtctgctattgtgggccgaagtaaaatgctgaccgacagccatcagaccgtgggtcagtatctgatgagtcgattagagcagcacccgttacacagcatcaagaatcaaacattttatcgcaaagactatgaggacgagtttgagcagatatggaggacacaaatacaatttcatccggaattaaccagaaagctcaaaatggagctgaaaaacagggttatcttttaccaacggcccattgaaagtaaaaaagaggagctgagtttttgcgaacttgaaagtcatcaaattgaggttgataaaaacggcaaaaagcaacttgttaccaccggcagtaaagtctgccccacatcatcgcccctgtttcaggaatacaggatgtggcaacgattaaatgatgccatcctcatcaaccagataacgctggagaagagacaacttacacttgaagaatgcaatttgttggcgacagaactttccattaggaaggaaatgaccaaacgggatgccatcaaattgatcaagggcaaagaggccaaaaacttcgacttaaactttgagaagttgattggtaatgacacccatgcgcgtttggtcaacgcttatctgaagatactggaactgactgggcacgataagctggaggtcaagaagatgagggcacttgatgtgattgacgccatttgcaaggtatttgctaatttaggttatcgcaccgatgccatcaacggtgaagttgacctcaatcaggaagtctgtttccagccttattataagctgtggcaccttctttattccttccccggcgacaatacccgttctggcaatgctaaacttatccaaaagataaaggagttctttgatttcgatgacgatgaatgtgccaagattattgccgacgtaaaattcgccgacggttatggtaatctgagcgcaaaggcaatacaaaagattcttcccaaactcaaggaggggtatcagtatagcaaggcctgcgaattggttggttataatcactccaaacgttctgtaagcaaagaagataatgataaccgggtattgcagcaacgtttgaaactgattccccacaacagcttgcgcaaccctcttgtagagcgtattcttaaccaaatggtattgctcgtcaacgaactgattgaagagtatggtgagacatacggagactttgacgagatacgtattgagttgcctcgcgagttgagcagtaatgcagataaacgccagcgagacactaaaaacatagacgacaatcagaagacaaaggatgcttgcagagacgaattgatagcgattctgaaagaacataacattaatgccacctatgtcagcgagaatgatgtcctgaagtatcgcctgtacaaagaactggccaagaacggatacaagacactatactccaacagcaaggtagatttgattgctttgattatgggcagaggtttcgataaagagcacatcatccccaaggctttgcgcttcgacaattccttctcaaatctcaccatcgaaaagacagatgtcaatctggccaagagcaagacaacggccattgactttgtgcgcgacacatacggagaggatgctgttcaacattacatcgctcgggtcaatgacttatataagagtggcgccttcagtaaaaccaaaagggataatctgctgagaactgctgcagaaataccggaagaaccgctgaatcgtgatttgggtttgaccggttatatcaataagaaggcaatggagctgttgctgcccgttacgagaaaggttgttgctacgacaggaaagataaccagccagttgagagatgattggcaactggtcaatgtgctccaagaactcgtttgggataaatacaaacaacttggtaaagttaacacctatgttgacaagaaccagaaaacggtagaaagaatcgaccgggaagcttggacaaagcgtaccgaccaccgtaatcatgcgatggacgccatcaccgttgcttttacaaaacccgcaatcatcttctatttgaactcgcttaactccctgggtgaagcccgtgatcaaattgtcaagatgcgacatcattacatgcatcgtaacgagcagggcaactgggtgtttaatccacctatgcaaattggcaaactgcgtgcagaagtaaaacgtcagttggagcagatgctgatttttcaccagacttctcacaaggtggctacgcccaacgtaaacgttacaaagtcgaaaaataaaaaagagggaaacaaacaaactgtgctcactccaagaggcaaattgcacgatgacacctttttgggatgcattaaattgcctcagtcggagattcttgctgttgacaaatcattcgacgaacagaagatagcaactgttacaaaagaaaaatacagggaagctttacttgaacgtctgcacctgttcgacaacaatcccaagaatgcctttaccggaaaaaacgccttggacaagaatcccgtttggctcaatgaagaacacacgcaagccgttcctatgaaggtgaaatgcctccagatgaaaaccgtctataccaaacgcgtggccgtcaacgaagatttgaatgttgagaatgttgtcaatgaggagatcaaacaaattctcaaaaaaagacttgccaaatatggagggaaagccaaagaggcgttctctgatttggaagaaaaccccatctggtttaatgaagaaaagggcatctgcatcaaatccgttatagtgaaagctgctgatgttaaagacccggttccgctgcataagcaaagagacagaaggggacggatcatttctgacgctaatggagagtcggtttccgtagattacgttaagcccaacaagaaccatcatgccgacatctacgttgatgccaacggagagttgcacgagaggctcgtgacgttcttcgaggctgttcagaaagccaacaggctgcaacctttggttgatactgactataacgccaacgagggttggcgacacctgttcactatccagcgatacgactacttgatagttcctgatatagaaaaaggatttgatccgttgacaatagatgtctgcgatgtcgcaaacttccctgttatcagttctcacctgttcagagtccagaaaatgtcttcaaagaactacgtgcttaggctacatcatgacacatcaaataaaacgcctgatgggctgaaaggcatcacctcaatagaaatcagaagtctcaacagcttcattggatgtgtgaaggtatctattgacagattggggcgtatttcttcaccgcaaccaatcgtcctataactacaaaacaaaaaatcccaccattgcggtgggatttctgttatcagaagcatttttgcgatcttgtcttatttataaacttcagagatttaaggctttcaaaagtctctgatgtttctgataataatttgagagtcattcacaacacttccaggcgcgtacattggggcagcggagatgtttctgataataatttgagagtcattcacaacagcagctctcgcttcatgtgtccgtggcccgatgtttctgataataatttgagagtcattcacaacaccttttgtctcgctatggtgagacgattggatgtttctgataataatttgagagtcattcacaacgtcgtagttgaggatgcggaaattttgtccgatgtttctgataataatttgagagtcattcacaacgtgaatcttctcggagaagattgtggcctgtgatgtttctgataataatttgagagttattcacaactgcacctattcaggactatgacagagaacagatgtttctgataataatttgagagtcattcacaacatatctacttccccaacccgaacggacgccgatgtttctgataataatttgagagtcattcacaacgcagcgtgcaggtggaaacactcaacgttggatgtttctgataataatttgagagtcattcacaacgtgctgctggtggagagcgagaagaccgccgatgtttctgataataatttgagagtcattcaatacagatggtactgagaactctaaaatgatgaagtgttatttttactataacaatgtcaaagaccgctcttgcgctgcaaagatacgagatttttttgaaacagccaaattttactctctcccatgtgcgtttcccacccatcgttttttctgctagcctttcgcagagaaagagtaatggcccccaaacggaggccattattcagtttatcaaggtctcaatttctcagaaactatttcatcacaatcttgacagacttttctccaatctttacgatggcgatggagccaggcaacaggtttgtgttgatttgagcagaattatcagtagcagcggcagaacctgccattataccatatactgaatatactcttacttctgtgccagagttaataccatttacgctgatgacaccaccctcgctctgtatcaacaccggcaatgcacgaacttctgcaacatcattgataagaccctccgtttctggttcctgatcaatccagcaaagtgttgccgttactatctcggagtttttgtaattgggctttgtggcataagcgctgatatgatatgtggcagtcaggctcacagaattgaaatgggtatttacatcctcatccgagataatgattacacactgtgcgccctccgtttcgctcgttgcctccaaattcccgtccttgtatgttaagacaggctttttgcatgctctagttcctgtcccggaagatattccaactacatttttaaacgtactccaaggtgctactgccttataattacccacatagtcatcaggaacatgcaaagtaatatagtctggatatgagttctcaaaagcatctatagaagccaacggatatcttgtcgcgtagcagtagacgtcgtttatatttccacaattagcaaatgcttttgtaccgattgtttttagtccacttccaatagaaatcgtggtgaggcctgagcagccatagaatgcttcatcttctatagattcaactccattaccgagtaccaactcattgagtgaagtattttctttaaagtaactacccacatttttacacaaaattgtcagctgggataatttatttaaactatcgaatgtgtattctcctacagtctgaacaccactaccaatcgttaaagaggaaagactaaagcactcgaagaaggccctatcgccaatgtttatcacactgttgggaatggtgatagatgtgaggcctgagcaaccagagaaggcccaaccaccgatacttgtcacactttgaggaataacaatagacgtgaggccagagcaattacggaaggtactgttttcaatgctcgtcacactctcgggaatgttgatggatgtaaggccggaacaatccgcgaaagctaatttatccatactcgttacactacttggaataaatatggatttaaggtccgagcaataagcgaaggcttcagcaccgatacttgtcacggtattaggtatgaatgaatttctgcatcctgttatcaataaattagaggacttctctataagagcgttacaattatttctgctatcgtacaccgaattttttgcatcaactgtaatgcttgttaaacttgggcagcggcaaaaagcatatgcgcctatcgttttcacaccctccggaatgtgaatagaacttagacttgagcatccataaaatgcctcattttcaatgctatttattgcatcaccaatagtaacagatgttaaatcatagcaataagcaaaagcataactaccaattctcgataccgaatagttcttatcattatatgttactgaagaaggaattacaacttgaccagaataagcaccataactcgaagtttttgtaacactaacacttactccatccgagttcttgttgtagtaaatcccatcaacctcaaagtcatacgcccacgagaacgtggtcataaacaacagtacgaaagaagcgagaagtcgattgaaaaggtagatttgtttcatggtatcacgacgctattaaatattttcgccacaaagatacaaaaatcttccgacttaatgcctctaatcccagaaaatatttccgacacatttgtgtaactgcctaaaaatcaaaatctatgagttatgaccaaggctaacgttgtcatttgttgtcattgtcatctattgtcattaacttttttcatttgagtggggcagtattttctggttcatagtaaatataaataattatttatattatactatggcccattttcgccccgatttcaatttcttaatgacaactaatgaccatgacaattagtgacaagatggtgtgccctaaaaaaaattgaaaaaagttgctcaaaaattttagaccgcaatgtcgctgtcgtacctttgcaccggatttgaaagtcaaggccccgcagactgtcgtcaggctgtcgtcaaactgttcgagagtgaacagcaaaagccccctccgactccccctttgggggagtgagcaaggccgcaaatgaaaaatgaagaatgtaggttgaagaatgtagattgaagaatgaaagagttattagcgcgcaataacctttctctcctgaccgagaatccaccgagttaataattttcaattttcaactttcaattttcaattaccaacatggcaaatcttaaaatcgattggttcggccgctctctttctcatcgcgccgacaagaccagcaacacctacgccaaggtgaacagcatcacggg

SEQ ID NO: 454 - DNA, 23354 bp, synthetic construct
  misc_feature 1..23354: note = Synthetic
  source 1..23354: mol_type = other DNA
tcgccagaagctgtattcgcgctggaaaacgtggccgattcttcaacaccgtcgagctcgtcaaccggctcgagagcgaagcgcgaggcggtcgtcagggacgctttgcggactatctcacgagaatggacttcatcatactcgatgagctcggctacttgccgttcgcgcagtcgggcggacaattgctcttccatctgatcagtcggctctacgaacgaacctcgatcatcgtcaccaccaatctcgctttcggcgaatggccgagcgtgttcggcgatgcgaaaatgaccagcgcgctgctcgaccgcctcactcaccattgcgacatcgtcgaaaccggcaacgaaagctggcgcttcaagaaccgcgcctgacgctcccgatcacatcccgaaccgaaacgcactcgccccggctgcgctatcccgccagctccgcaggggcgagcgctcacgttccgccctacgacaaatgggggtcaattttgaacgccgatcgggggtcaattttggatgccgattgacaagggtgagtgaaaatgcgaatgtaaaacaataggttaagttgtagcggaggaacgataccgactttccccacaacacccaaatatacgctattgcctccgttgctgcgcttgaacgcgcagcctcgatagggtgaccttcgaaggcgtcgattggaaatgggccgctcccgactcgataagggtcaagccgcagagaggcgaacgtgaaacttgctccccgtcgcctcggcgaagcgcaaaagagtcttcgtgctcggcaacgtttgcccgctctccagccgagcaatcgccgactggctcgtgcccatgcgtgtcgccaattcggcctgagagaggccggcacgaaggcgagctttgaccagctctgcggaaatctcgaattcgggagcgagcgcgtcgtattcggccttgaccgcggggttggtcataaggcgagctttgatcttttcgaatggaatcgtcatatcacctcctttgctcgacgtaacgcaagctcgatttcggcgcgtggcgttttttgggtcttcttcacaaaggccctgagcaccacgaccttgcggccgaccgtcgtgacgtaaagcgctcgggctattccgtctcggcccgttaggcgtaattcccacagtttcccttctaggtgctttacgtgtggctcgctcagactttcgagaccggccgagtttatgcgctcggcaagccggagaaaccgcgcctgcatgtccgccggaagggcggcgatttccgcgacgactgtctcgttcaggatttcgacgcgccaagccatgatcgctattatctcatttttgagatgatggaaagatccttcgcaaaatgcgcggagagccggaggctccggttggttccgtgagcagcttcccggaagccagccaggaccggcgcgtccactctgggcctagatatcggaagcgtatgaggccgcctggccagcatcggatccacagcccgcaaacaaatcctgtgtatccgcgggcgcaatctattgcggaggacatgcgagggggaccatagatggacgagatcgtagacggtcgacacagcggagcggttatgcccgagcgtcgtgcgttttagcaaccgagtgacagagactcgaaatgtcgagacggacgaaagccgagaacctttcaccgcgcaaggaggcgggcaaggccgcccgaaagaggaaagccgccgccgtgctcgaacgcaaacccgctctcggttggcgcacgagcgacgaggacgagatcgatctgcggcgctggcggggcagcaccgaaatcctcgatgtcgtcgcgcacgattcgagccaggaatttttcggtgatttccgggtccgctcgacgagtggcgccgattacgaggtggagataagaagcctcgacggcctcacgaattcctgcggttgcatcgaccaccgggtcaacgcgctcggtacctgcaagcacatagaaggcgcgctggcggcgctccggcgtggacgggcgcgggtttttcgcgcggcggcggcgcaaggcgggccgaggatcgagatatttctcgatcgtcgcggcgaggcgacgccggccatcgcctggccgacgacggcggaggcgaaatcgctggcgaaggcgcgcgaatggctgcgcccatggctcgatgaagacgggacgttcgccgcatcgccgcagcggatcgaggagctgacggcggctttggcgaaggcgcagcccgccatgcgcgcgaccatccgaatctcccgccatttcgctccctggctggagcgggcgagacgccggcgcgaacgtgtcgaagcggccgccgccttctccgccgatgttgccgctggccgcgcgacgctcgacgtcctgacccatccgctattgccgtatcagcgagagggagcgatgcatctcgccttcggcgagcgcgtgctactcgccgacgacatggggctcggcaagaccattcaggccatcgccggctgcgagctgctggcgcggcgcaagggcgtcgagcgggtggtcgtcgtctgcccggcgtcgctgaaggcggaatgggaagagcagattgcctgcttcagcgctcgcgcgaccgggctcgtgttcggaccgcgcgcccagcgcctcgcggcctatcgcgcgccggccttcttcaccatcgtcaattacgagcaggtgctgagcgacgcccccgacatcaacgagatattgaagccggacatcgtcgtgctcgacgaggcgcagcgcatcaagaactggcagacgaaaacggcgcgccgcgtgaagtcgctccgctccccctacgccttcgttctgaccggcacgccgatcgagaaccggatcgacgagctctattcgatcgtccaatatctcgatccggagctgctcggcccgctgttccgcttcaaccgcgaattctacgagctcgacgagcgcggacgtccgatagagtacaaaaatctcgccgcgctgcgcgaccgcatcgcttcgctgatgctgcgccggcgcaaggccgatgtcgagaaggagctgcccggccgcacggtcaagacctatttcgttcccatggcggaggagcagaagcttcgttacgaggattaccgcgcgccagcggcgcgtttgatcgccgaagcgcagcggcgtccgctgcggcaggatgagttcgatcgactgcagcaattgctcgcctgcatgcgcatggtttgcgacacgccggcgattctcgatccgacctgccgcatcagccccaagcttgaggagctggagaaaatcctcgccgatcttctcgacgagccggaacggaaagtcatcgtcttctccgaatgggaacggatgctgacgatggtgcgtgaactcgccggcgagatgggagtcgaagcggcgtggcacacgggctcgctgccgcaggaacgccgccgcgccgagatcaaccggttcaagcgcgatcccgcctgccggctgttcttctccaccgacagcggcagcgtcgggctcaatctgcaggtggcgagcgccgtcgtgaacgtcgatctgccctggaatccggccaagctcgagcagcgcatcgccagggcctggcgcaagaaccagccccgctccgtgtcggtcgtcaatctcgtcacggaaggcagcatcgagcacagcattcttcacctcatcggccagaagcaggcgctcgccgatggcgtgctcgacggcgccggcgatatttcggcgctgaaaatgccgtccgggcgcggcgccttcatcgagcggatgcaagcgatgatgggcgagcccgcgcgcggcggaccgcggatggcttcggcgcaggacgcattcgtcggggatctcgtcgaacgtctcggtgaaaaggccttgctcgtcgaagagcgccgcggcgccgatggaaggccgcatctgctcgtcgttctcgacacggatgacgagggattggcggccgaagccgcgcgcgcggcggaagccgacgccttcaccgcagaattcgtggacgcggccgcatggcgcgccatgcggcgcttggccgccgcgggtctgcttcaattcgccttcgaagcgcgggagctccatcgagcgcgcggtctgcctgcggaatcgcccgtcgccgcgagcgctgggccccgagaggccgaagccatggccgaggccgatcgcgcgctgcggatggcgaagaccttggccgacggagggtttccggaggaggcgccggcgctgctcgccaaatcgctgcgcgccatggcgacggcgttgctggcgacgcggggagaggcgcccgtccacggccagagcgctgccgatagcgacatccgccgcttggtcgattgcggggcgctgccgtcggaagccatggcccttctcgaagagatgcaatcgctttcgagtggcgccgcgatcgacggcgtggcgccggctctcgccggggcggcgcgaatcctcgcggcgatcacgcgcaacgaaccgcgtctgaccacgcaaacggtgtagtcgtagcggcgcgaacgtcggatcgggagcaggttgcgctagtgaaatcgcgcagctcggcgtcggccgagcacctcgacgagtagcgcgccatcttgcggtcgatggcgacgatccggcaggcccgatgttccgacacgcccatcacgacccgaaggtgcgcgacggcgtcgcgtttgacggcaggccctaccactttttgccaagagttggcgaagcgccgccgcgtcaagcatctgatcggccatgagcttcttcagacgtgcgttttcggccgtatctgcctccgaacgtcaatgccgtcgaacttggccttccaatagtagaacgtcgtttccgaaaccacgtatttgcgcgccgtgtccgtcctgcatccgcggaggcgtttctcaggctaatataccaacgctacaaatataatgggcacgaaattcgtctccaaatcagtgagatcattgcagatatccacagcgccgttggcgaggcgggaagtcggctagaccagcgccattacaatgttccattcacgtcttgtcggatcgatcgcggattcctgactgcgtaacagtcgcctaccgtaggcatctcgcgcgcccttgctcgcgagtttttaggagatcgaccatgacaattcagaaacgcatttgcatgcccaatgatgtacgcacttgggctaacaatggcgccccgatacctgactgggtgcgtgcacacatggccggtaaagtcgcgtctaacggcactttcctcatctctacgccagttggaaccgcccgggttcatgtcggcaatgtagtgatccaacattgcggcgaactatcatcccgaactcctgatgaggtaatcgaattcatagaagggctcaaagcggaaactgcgtccgtagtgaccgcgatcggacccggaaagtccgcccaattcggaaccagaaccaaatctgggagaggcaagaaacgcggcgtcgcgcgcaaaatcgcctttcgcccagcgataggctccatgccgagcatcgaatgggtgcacacactcgagctaacccgtcttattcatgaaggcgctgttggaagggtggcgagcgtagcatagatcactgaaacggcgtaggatttggttgttgacaccaaccctttcccgctgcaccggcctgccacgcccgccatgacagacgatacgttccccgccttctcgtttccagccgtccagggcaagaaaatcacagccgctttcgacggcggccgcatctcctcggacggcggcgtcatgctgctcgccatggcggagcgccggctcggcgtcgccgaacggctggcgcgctgctttcccgatcgccgcgatcctgcgcgcatcacccacacgctcgccgatatgatccgcgcccgcatcttcgcgatcggctgcggctatgaggacgccgacgatctcgattttctgcgctccgatccggcgttcaagctcgcctgcgggcgcctgcccgacacgggccgcgatctcgcttcgcagccgacgctgtcgcggctcgagaacgcgccggccctgcgcgacgtgatccgcctgacctatgcgctcgtcgaccaatggatggcctcctacgagaagccgccatcttcggtcacactcgacatcgacgacacctgcgacatcgcgcatggccatcagcaattgtcgttgttcaacgcccattatgacgagcgctgctttctgccgatccatgtctatgacaccgagcagagccgtcccgtcgttatgatcctgcgcccgggcaagacgccgtccggcgtcgaggtgagagcgcatctgcgccggctcgtgcggcatatccgcaagtcttggccgacgacgggcatcctgtttcgcggcgacgggcattatgcgcggcccgaggcgatggcctggtgcgaggatcacggcgtcgattacgtcttcggccttcccggaaccaagccgctgtccaagaaggtcgaggagacggcggacgccgtccgcgtcgagcgcgccctcgacgacaaggacgtcgtgcgaggctatgccgagacgcgtcaccgggccaagtcctgggacagagagcgccgcgcgatcgcccgcatcgaggcgacgcggctcggcctcgacattcgcttcatcgtcaccaatcgcgcgcatggcgcgccgcaatggctctatgagagtctctactgcgcgcgcggacaggcggagaatctcatcaagctgcacaagacgcagctttgctccgatcgaacctcgtgtcgttcggcgctcgccaatcaggtgcgcctcgtcctgcacaccgccgcctattggctgatgctcggcgtgcgcgacgcgatcccgcgcccgcgcgacctcgccaaagccgagttctcgactctgcgcctgcgattgctgaagatcgccgcgcgcgtgatcgagaccgcgagccgcgtgcgcctcgccttcgccgccgcctgccccgaggccgatctcttctgctccatgccggcggcgctgctcatgcccgcaggaccatgatcgacggggcggcgcgccccctctcgtctctcccattcctcccaacgcgttcccgaaagtgcgatcctcgaagcggtgaaaaagccgaacgcccccgcgcggcccgcgagccgaacggcccgacgatgcaaaaaatcggaccgtcacgaataagaggggctaaccgttgatcaatcctatcagcgctcgatcgacaacgaaggatcgcggcggctgattaccagcatagcagccaacttcgattggcggctctgcgcgccgctcgtcgtctcgcggcgtgcggacagttcaaaagttatcatagatgggcaacatcgttgggctgcggctgttcgccgtggcgatctgcctcagctaccgtgctgccttttcacttatgacagccccgaggacgaggcccgcatgttcatcgttgcgaacagggcgcgcaaaccgatgaatcgtttagacgactttcgtgcggcgccggctgtgggcgatgaggatgcattgagtatcttgcgcttggtgacagaggctaagctaaagatcgcgcggaacacttcctcaacggcctggacaccaggagaggtagccttcacttcatccattgcgatcgcgctcaaccggcacggtgacgcggtggtctcggccgcgttgacatgcatggccgaggcattcgaggggcaacccctgacgcatggcgcgtcggtgtttggagccctaatccggatcttcgctaatccacctgagggcttcgacccagacaccctcgtgcccgcgttgcgtaggttcaacatggcgagcttgggcgaaatcgttcagaatcagaaaggagggaacgcacggacaactgccgtatacgcggctattgtcgacagcattggtgtcttgatcgagaactctgcgcaaagaagatagacaaggcgccgtgtcctggcgttgtccggggcacggcattcacgaatgcgccatgacgacgacgtcgccgttcgagaacgtgggaacggaggtatttttctacccattcctcgaacagagcggcgtgataatatataccttcaccacgacgagcccgccaacagcggatgccggccatcaaagtggccgtcttgcgatggccgttcggcacggcgacgcacagccgtcgcccgcggcaacgacaaccgccttcctgcttacgcctgaaagtccgccagcttgaggaggcggtagggcatcggggctgttgctgtcgcgatgacggcaaggcgcgggatcatgttggcgagatcgtatcgccgattgaagcggtattcgaattcggcgaggtagcgcgggacatgtttttccccgacggctcgataggttccgacgatcgccgccttgatattgccgagggcggtgttgacccatttgaaggctggggttttcgcggcttttgctcccgacccggtgacgatcgcgctgtgcgtgtcggagacgacagccgcgccactctcgagcgcggcgccggcgagcttgcgcaactccgccttgctgaacgctttcacgcgccgcaggatgatcttgtgcggcttgtcgtcatccgtcgtctcgacggcggcgacgaagggcgtcttgccctcggctccgcgccccacggcgcccgagcgttcgccgccgagataggcgtcgtccatctggaccttgcccttcagccgcttcgtcgcgttgcgctcgagcatgacctgcgccagcttgtgcttcaacttccacgcggcattgtaggtgatcccgagacgccgcgacaattcgaggccagagattccctgcttggattgcgtgaggtgatacatcgctttgaaccacacgcgcagcggcaatttgctcgatgcgaaaatggtcccggcgcgcaccgacgtttgctttcggcaggcgtcgcactgaaacagcttgcgcgcgccgcgcgtcaccacgcaatgcgccttgccaccgcaatcggggcattcgaagccatcgggccaacgccaggcgacgagcgccgcgtggcattgctcttcgcttccataggccgcctcgaatgcactttcgctgaggcctttctgaaattgcactttgttgcgcgccatcgcctcgtcctcgccaaatcagtatgttccttgtttgttctaacctctaaaacttggctgatcaacaggcgtaagcaggaccgcctttgttcatcagattggccgagatcagcgtgtcggtctaccagctgctcaagcctgggccggtcgtccgggcgctgcgcttttgcaaactccgacgaaagaggtctccatcggcgaactcgcattattctgcgagcgcgtacgccacaataagaaaagtggtagcggcttggtggtggaatcggcggcgcgccatctagcaatatattgattatattgcaatatttatgaattggtagcggaggcccgctatctcgaaatcccccacgaaaaaacgtcgttgtttccagtgtgttgggcgtcatgatacggggggtgctgggtaacagtggcccgtgcaggcgtattaggctgaaggccatctcgcgttcttccattatgcgcggttttgcctccgcccgtcccttcgtgtggcacgagatcgatataatccttgagcatacccgggagagcggcctccgcgccgcatcgcaatctgaaggcgataacgggcgccgtgaacgcaaaaagcccggccggcgtgacatgccgacattttcccttctccatcaaaactgttccgaaaagtgatgccataaattgagatggtctttgcaatgccggtagatgggcttccggaacgtgaggaggccgagtccgcgccgcaaggagccgtctttcctgttttcttggcagcctgcaaccgaaccgttgtgagcggcgatgcggaaagggagggagacgtgaagaggagctgccgcagtcggtcaagaagcgcccatctgacctcatgctctgccaccaataggaatccccccgccacatttctgtgacgagggtaatccttcagtgatttctatgaaaccaccttgccgtggcttcccttccgatttcccatactcatagaagcagcttggcctcagcgcgtcaatcggcttttatggcggagctggtctttcgaaggaaccaaatttatgcgagtcttggggcttgacgctggcattgcctccctcggttgggcgttaatcgagattgaagaaagcaatcggggagagctttcgcaaggcactatcattggcgcgggcacttggatgttcgacgcgccggaggaaaagacccaggctggagcaaagctaaagtccgaacagcgccgcacctttcggggacaacggcgcgttgttcgacgtcgacgccaaaggatgaacgaggtccgccgaattcttcatagtcatggactgctgccatcgtccgaccgcgacgcgttgaaacagcctggattagacccctggcgcatcagagccgaggcgctcgaccgattgctgggacctgtcgaactggccgtcgcgctaggacatattgcacgccatcgcggcttcaaatcgaattccaagggcgcaaagacaaacgatcccgccgacgacacgtcgaagatgaagagggccgtgaacgaaacgcgcgaaaagcttgcgcggttcggttcggccgcaaaaatgctggtcgaagacgaaagcttcgtcctaagacagacacctacgaagaatggtgcctccgagatcgtacgccgcttccgaaatcgtgagggtgattattcgcgctcgctcttgcgcgatgatcttgcggccgaaatgcgggcgcttttcacggcgcaggcgcggtttcagtctgccatcgcgacagcggatctccaaaccgccttcacgaaggcagccttcttccagcggcctttgcaggacagtgaaaagcttgttggcccctgtccattcgaggtagacgaaaagcgcgcgccgaaacgcggctattccttcgaactatttagattcctatcgcgattgaatcatgtgacgctacgtgacggcaagcaagagcggacgctcacgcgggatgaactggcattagcggcggccgatttcggcgccgccgcgaaagtttccttcaccgcgctacgcaaaaagctaaagctgccggagacgaccgtcttcgtgggcgtcaaggccgacgaagaaagcaagctcgatgtcgtcgcgcgttcgggcaaggccgctgaaggaaccgccagactacggagcgtaatcgtcgatgcgcttggcgaactcgcctggggggcgctcctctgctcgcccgaaaagcttgacaagatcgccgaagtcatctccttccgcagcgatatcggccgcataagcgagggcctcgcacaggcgggctgcaacgcgccgctcgtcgacgcgctcacggcggcggcctccgacggccggttcgatcccttcaccggcgccggccacatttcctcgaaggccgcgcgcaatattctctcgggcctgcggcaaggcatgacttatgacaaggcttgctgcgcggcggactacgaccacaccgcgagccgcgagcgcggagccttcgatgtcggaggtcatggccgggaagcgctgaagcgaatacttcaggaagagcgcatctcccgtgaactcgtcggcagccccacagcacgcaaggccctcatcgagtctataaaacaggtcaaggctatcgtcgagagatacggcgtgcccgatcgtatccatgtcgaactcgcgcgcgacgtcggcaagtccatcgaagagcgcgaggagatcacgcgcggcatcgagaagcgaaacagacagaaggacaagctgcgcgggctattcgaaaaggaagtcggccggccgccgcaggacggagcgcgtggcaaggaagagttgctgcgcttcgagctttggagcgagcagatggggagatgtctctacacggacgactatatcagcccgtcgcaactcgtcgcgacagacgatgcggtgcaggtcgatcatattctgccttggagtcgcttcgccgatgattcgtacgcgaacaagacgctctgcatggcgaaggccaatcaggacaagaaaggccgcacgccctacgaatggttcaaggccgaaaaaaccgacacagaatgggatgctttcatcgtgcgcgtagaagccctggctgacatgaagggcttcaagaagcgcaattacaagctcagaaatgcagaagaggcggcggcgaagtttcgcaaccgcaatctgaacgacacgcgttgggcttgtcgccttctcgccgaggcgctgaagcagctctatccgaaaggcgagaaagacaaagacggcaaggagcgccgccgcgttttcagccggcccggcgcgcttaccgaccggctccgtcgcgcatggggcctgcaatggatgaagaaaagcacgaagggcgaccgcattcccgatgaccggcatcacgcgctagacgccattgtaatcgcggcgacgacagaatccctattgcagcgcgcgacgagggaagtgcaggagatcgaggacaaaggtctccactacgatctcgtgaaaaatgttacgccgccatggccgggctttcgcgaacaggcggttgaggccgtggagaaagtcttcgtagcgcgtgcggagcggcgccgtgcgcgcggtaaggcgcatgacgccaccattcgccatatcgctgtgcgcgagggtgagcagagggtctatgagcgcaggaaagtcgccgaacttaaactggccgatctcgatcgggtgaaagacgcagagcgcaatgcacggttgatcgagaaactgcgtaactggatcgaggcgggaagccccaaggatgatcctccgctctcgccaaaaggcgatccaatttttaaagtgcggctggtcaccaagagcaaagtcaatatcgctcttgataccggcaatcccaagaggcccgggactgtcgaccggggtgagatggcgcgggtggacgtgttccgcaaagcgagcaagaaaggtaaatacgaatattacctcgttccaatctacccgcatgatattgctacaatgaagacgccgcctatacgggcggtgcaagcatacaaaccggaggacgaatggccggagatggacagttcctacgagttctgctggtcactcgtgccaatgacttatttgcaagttatttcaagcaagggagaaattttcgaggggtattatcgtggaatgaatcggtcagttggagcaattcagctctccgctcatagcaatagctcggacgttgtgcagggaatcggggcgagaaccctaaccgaattcaagaagttcaatgtcgacagattcgggcgcaagcacgaagtcgagcgagagttgcgcacatggcgtggtgaaacatggcgtggaaaggcttacatctgagccgaccggcgcggctcaacttcagcgataaccagatcgtcgtcgcgcaggacgacggagaggcgcgtcttccgctggaagacgttgcttatatcatccttgacgcgccgcatgcgacgctcacgtcgacgcttatctctgcttgcatggaggcgggcgtcgtcattgtttcggtcgatgcgcgccatacgcccaacggtctcgcgctgccatttcattcgcaccaccggcaggctggcgtcgcggcgaagcaggtcttgctgagcgaacctttcaagaagcgttgctggcagggtgtcgtcgtcgccaagatagacaatcaggcggcgcatctcgaaagtctcggcagaaacgctgaggcgctgcgggccatggcgaagctcgtcggctccggcgatcctgacaatgttgaggcgcgtgccgcgcgtgactattggcgcgcgctttacaaggattttacgcgcgacgacgcctgcgatctgcgcaataagatgatgaattacggctatgcagtggtgcgcgcctgcgtggcgcgcgcgctcgttgcctacggcttgctgcccgcgctcggcctgcaccatgtgagcgtgacaaacgccttcaaccttgccgatgatattcttgagcccttccgtccctttgtggacgcgattgcagtcgcacgcgcggagaaacgcaagaaaacggacgatcttacaatcgacgatcgccgtgccatggcaggagctctgcacgtaaacgcacgcgttggaaaagaaatcgtaagtcttctcgtcgcgagcgagaaggccgcagaaggcctcgttcaggcaatggagagtggaagcgcggcgattctaaaactcccgttcttcgtcacgccgaaggggagttccccatgaaagccgaggaggtgcgttatatgtggctcttcgttttcttcgatctaccggtcaagacgaaagtcgaacggcgcaatgctacgcgttttcgaaattttctcaaggacgatggctttttaatgctgcaactgtcagtctacgcgcgcgtgatgcgcggggaagaagctgtggaaaagcatctcgttagggtcactaagaacctcccgccgaaaggcagcgtacgcacattaagcgtcaccgagcggcaatacgcgcgcatgaaactcctgatcggcgaatcgccgaaaaatgaaaagatagcaccgcaacaactggtattattgtgattttagtcccggcaagagaacgaaaatcacagatttttcatttcgttacgtcaaagcgagcctaccacagggaaatcggcagggaagccacggccattcgtcgggagctggtttcattcgattaagcctaccacagggaaatcggcagggaagccacggctcatgtgatgctcacgcgttggcggtgacgagcctaccacagggaaatcggcagggaagccacggccgatcgagccggcggcgaaggccgtggcgaagcctaccacagggaaatcggcagggaagccacggccgcagacgccgccgcgaacgagctgctgtaagcctaccacagggaaatcggcagggaagccacggctgggaaattgagctgatcgaagaactcgacagcctaccacagggaaatcggcagggaagccacggcgcgcgcctctgggtgcgtcacgatccatgcagcctaccacagggaaatcggcagggaagccacggccgctggcgcgaactggcacgagcaagatagagcctaccacagggaaatcggcagggaagccacggcccgaattgcaaatgacctgagaaagcagccagcctaccacagggaaatcggcagggaagccacggcccgcgccctctcacactcgcgcgcgccgagagcctaccacagggaaatcggcagggaagccacggctaaggaaagcgggacgcagcgccgcttgcaagcctaccacagggaaatcggcagggaagccacggcgcgccgtgcctaagcgcgccggcggcacgcagcctaccacagggaaatcggcagggaagccacggccggtcccgccgacttgtcgagcccgccagaagcctaccacagggaaatcggcagggaagccacggcacgccggcgccggtgccgtcatgtcgtaaaagcctaccacagggaaatcggcagggaagccacggcgcgatgtggtcgcgaatatgcgtgcggatcagcctaccacagggaaatcggcagggaagccacggcccatcgtctccatgatcagcgtgcgccgccagcctaccacagggaaatcggcagggaagccacggcgtcgttcttccccgatgcgcagacggtcggagcctaccacagggaaatcggcagggaagccacggctcatcatcctctcacttccgggcgaacccaagcctaccacagggaaatcggcagggaagccacggccctcggatgcgcgaatgcggctcatctatgagcctaccacagggaaatcggcagggaagccacggcgcgatgccgcgcgtgatcgagctcggcgaaagcctaccacagggaaatcggcagggaagccacggctttgtcgtagctcatgcgcagcatagggccagcctaccacagggaaatcggcagggaagccacggctcgggcgaaactattggaagcgggagccggagcctaccacagggaaatcggcagggaagccacggcgcgtccgatccgatcggcgtcgtcgccgcgagcctaccacagggaaatcggcagggaagccacggctgttctgctgggcgacggcgccgatgctgcagcctaccacagggaaatcggcagggaagccaccgcagcaatgtcgttcgcgagcctaccacagaaatcggcagggaagttagcttaccgaagcgccctgtcgagcagttgcgaaagcctcgcccccgcaagcgccacctgctgttccgcgaccctcttcgcatccgcctgataggcgtccgtgagcgcgaaaggccccgcgccatctccgattggcccggcatagacgaactgctccgcaagccgctcgctctctttcacccaggtcgcgggatcgtcgaccgccgccgccgtcgcatcgggcgagggcagggtggccgcgagcgcctcggcgtccgacgggcttccccgatcgccgagcagcccgtcccaataggcgtgcagcttcgcgccgcaggtgaaggcgaggcagacggtttccgtgttgccgcctcgatcgccgttgggcaggccccgggaaaagcgcgaggtcgcgtgcagcggctggtggacgtcgcccaccagatgcagcagccacacgagatcgtaggatttcacgtcgtcgctggcgtccgaggcgagtgtgcgccgaaacgcttcgatctgcgtcaacgcattcggcgcctgaggcggttcgccgggcgtgccgtcgggcgagtacgggaggtcgacatagtgccaatagtcgtgcgcgagatggtcggcgtaaccgatgttcgcaacggcgtcggcgccatcctgagcgatcgagctgcgccgatagtcgcggcttctcttgatgtcgtccgcccaggtcgccgcgtggacgaaggcggcgcggtcctgctcttcgggcggaacgccgcgcgtccaattgtcgaatttcgggttgagccgcagcagcgccgcagcgcgggcgcgcgccgcgggcgtgaggcgctcataggcgaccgcggcgacggtcatgtggcccatatcccaccacgcgcgggcggtgggcgtcgacagcgcgaggaatgtgacggcgacggcggcttcaagcaatttcctcattgtgatcacctcatcaaaaaaatcgttcccgaaagagccggccctcgatgaggcggatcgacaacagccggatgacagcctgggcctcgccagcccggcggcgctcttcccttcctctccttcttagcgtaagaacaaaaaaagaacaacggagccctgcaatggcgcgcccaacctcccggtccgacgccttcgtcgacaagccgcgcctcctcgaggagctgcggcggtgtcgcgaggcccttattcgagagcaggccaggatgcgcgtcggcgggccgctctattattccgcgcagactgtcaccgccgcgatagacgcgctggcgttgatgctcaccgggacgcacaattatttctcgacgcctttggcctcgagttggcccgcaaaagcgccggaagatgatcgtccatgaacgcgggagagggctcgagccacatttcgccggaagcgccgtcggcctcccaagggcgaatcgcaacggtgcgaaagttcgacagcgagcgttcaataatggcgatagcggcgatatctacgccaaccatgacggcgcggcgcggtggccgcaccgatgatggcgccgcctgcagccccgactgccgcgccggccagcgtcgggccgagcaagcctcccgacgccagagcgccaattccggcgccgccgacgccgccgatgatggcgccgcctgtcgcgcgttgtccgggggtatagcagccgccaagaggcagcgccgcggcgagcgcgaccacgagaatcattttccgtgggagccgttcatttgcgagagcagtcatcccaacaaccttcctgtctttgaaccgtcgctgcgcaacgtcgcgcatcggcttcgcgtcttctgtcggcctcgacgcgaaacgtcggatcgaaatgcgccgattgagtggagcccaaggtcgaagatgtcgcctcgaagggctatttttcgcgcctgtgacaaatccgcgacactccctcattgcgtgacaacaaaaagccccgccggacgagccagcggggcgcatatggaatcatctggttgtagtctcagtgtctaccacgctcgtcagcacgcttctgttcggcttcgagcaaagatgctttcgccagtcgtaagaagtattctgtcatattgtccattttgcgcgtctcatcgattaatgaatcgatcactatgatgattttgcaaaactgatcgatattcgctatcggtttttcctgttgcggctgccgcaattttcgagtcgccatgattccctccgtcatcaggagacgtacggagacgccgctacagctgggctgcaagcaagcgtaaaaatcgactcgtcacaaaaatccctaatgggcgtgaccgcgaagccaatcggaaagccgcgcctcgatccagtcgctgtgccctggatagcgaattttcaggtcggcgacgaccgtccggacgccctcgagcgccgtgtcccatgacgcgtcgccctgcacgagcagcttgtcggtctgctggaatgtctgttccagcagatccaccagtatttgatcgacctgcatgtcgatgcaccgttgcgccgacatggcgctgccggaaacatccgagacacatgctgagatttgcttaaatcgatcactcgaattgtgagagagccgggtctgatagtctcattatttcatatgcttgctgacgtctggccaaaagaaagcgacggcctcggttccgatcggtcgacgcgagccccgtcggcggaccggcggggcgaatggtcgtcgacgaaggcgcgtcacggcgaccctacctctcatcaacgccagccgcgccgctcggctcctcgacatcgcattcggtcagccatccggccgcgcgggtgagtgtgtgggtgaccgaggcgatgcgataagttccatcgatccccggccggacgccggagaccacgagcggggcctgcggctgcgcggccgggtcgccgtcgatcgccacccagccgccgcccttgccgcgcgcgatctcacgcgcattggccgcggcgcgggcgcgcgcctgggcgtaattcggggcccgctggacatcgacatgcgcggccggcgccgagtcgtctcccgtgccgacctcgatgttctcgaattttcccgtcttcggattgaagagcccgacgacggccttgccgaagcgcgggcggctctgcgtcggcgcgaggtcccattcgacgaggttcttgccccattccgccttcaccgacgccagcgcccgcccgctgaccgactcgccgccattgcgcggcacgaacaccgcgcgagcgtggccgcctgcattaccgccatcgagaccgccatagagcttgaacgtcgcaccaatttcggcggcgatgcgcttgccccagccggcgaacgactcgttctggataccccaccagtcccggtgaacgccggcgagcgatggatcgaccttgacggtgactccggccctggcgccgaatttctgcgccgcctcctcgaaagtcgaatcgtcgacatgcccttgctgcttttgcttcaggctcgacagaaaatccgtgccgctcgccgtgagcgccagcagccgtccttcggcgcgcccgccgcggctgcgcggctcatccgtcttgccgacgaaattcagcgccgagccgccgcccctccacgagagcgaggccgagagactcgcgccaatgcgcggcaagcgcaactggccgcggctgtcgtcgagcaggagctccagcgtgtcgctttgcccgccgtcatagaggcgcagagtcagcgcctcgagaaaaggcgtgaagcggcgcgtcacctcggttccgtcgaccgagatcgaatagacggcttcttcagtcatagaggctcgtcactattgcggccgccgaatccgtcgccagcgccggagcttgaacctgcacgacggttccgatcggcaggatcgagccgagcgcggcgaggccggggttgcgcgccagcgtgtcctccacgaggcccttcgcctcgcggcgatagcgccgccacagcagcaggtcgagcgtcgtgtgatccgtctccacggtgagcgtgtcgatcatccgatcagcccatagaaggttgtgagcgcggcctgcggcgatggcggctcgtcgctcttggttaaaaacagatcgaagccgatcttgcgcccgaggccggcggcgtcgagatagtcatggttctcgaccattcgctcgagcacataaaagcccatgacgacaaagtcgccgcgcaccagcttttgcgggtcgccgccgcgcgccatatcgcgcagatcgtccaaggtgccgattccgccgaacttgtgcggccagagcgtcccggtgagcaatatccgatcgtccgcctcgcccatcttctcgcgtggcttcctcgcgccgacgatcgccttcgccgcgaagtcgtggcccgtctcgcgcttcacgctatcgacattgaccggcgtgacctcgaaggtcacgattccgagctgatagagcatcaccaatctccctgtccgccgccggtggagtagccgccgcgccggatttggtcgaacgattgcatcgagacgcggccggattgcgcgggccggccggcgccgctcggagcgccgccaccgccgatattgtgcagacgctcgcgcaaccggatcgattcacgcaaggcgtcattcatcgcgtggatttccgagatgtcggcgcgcgccttgatcggcgagccccacgcgtctcgggcgccgcgcgattcgccgagcgcgccatcgatctcgccgtcgttgccgcgcgtcgacaggctcgccggcggcgtcatcacctcctgcatcatctgcgccgacgtgcgcgctttcgccgccacctctcgcgccgccttccgatcgccgaacaggtaatcggtcagcgcgcgctgatcgagcggcggcggcgccggcgccggcgcgtctttggcgatgacgccattcgccttcagcgcctcatgcgccgcgaatgcgtcattcacctcgaaatgacccgcatccgggctgcggaaattcgcgccgctgcgcaggccccatttcgacgccagccggttctctacctccacgggcagcgtcacgccgccggcgcggatgttgcggccgatctggttgacgtcgatcgcccggccgatcggatgataggaggcgttgcccggccgcacgccgagcccgccgctattgggcccgacgacgccgcccgccgcctcatagtcgttcagaaagccgcggaaattctcggcgtagcgcgcgtcgacggtgagcttgcgcccgcccttggtcacgacggtcgtcgtcccctcctgcacgggccgcgttcccgccggcgccggcgcgtcgctggcggcgcgagcgcgataggccgggcgccagccctcatgctcgcgcatgatgtcgagcatatgctcgcgctgctccggcgcgagatcggcgagccgcgcctcgggcccgacgccgaggccattcgtcacgcgccgaacataggcgccggtgtcgttctccgcggccggcgcatatttgccgatcgcctcgcggatcgagagcccggcatattgcggagtgtcgaacaagaggctgcgctgcgccgcgcggcccgtctcggcgtccggaaagacggcgaagcctttttcatccttgcccgtcgcgccgtgagcggccgcgaattcgccatagcgcagattgcccgggttgttgttgcgccaggatcgcgagccgccgaagccgggaatgtcgctcggcgcgaccggcgacgtgattcccggcacggtctcgacgagcgaggcgagctgcttgcccgcgaccttggggaggcgcgggtgctccgcatccgcacgacgaatcgcctcgacgctgacgctgcccgcgccgatatgcgcatgacgcagcagcgcattgcggccatagccgggacgaaagcgcaggctgtcggggagggtggcggcatgggcgccggagaccccgaaggtcttgccgaagccatcccatgcctttttccagaagtcgctccagaaatcggacgactcgatcttctgatccttggcgtccttcgctggcgtcggcttttgctcagcggtagttggcgacgccggcgtggcggcggggtgaggcctgaaacggaaatcgatctcgcgacgggacgattcatgtttctgctcagagtgacgatatttgtcgaatgcatccttgaagctggtcttgtcgaacccgtcttcatattcatgaagcagatcgatcacattggatttgcggccttcctttctcgctttttgttccgcgcgctgcgacgcatccatccatcgcttcggttccatcatgtagtgatcgacgatcgccgccagcgaacgcaagccctcggcgagcgcgtgcagaactccgcccaccggcgcggacttcagcagcgcagcagcgaaatcatcccatgccgccgccagctccttcagcgccgccttcggatcgccgtgctgcaattcgagcgaggcctccaagcctgtggcgttgtcgagattcctgccatgggcttcaatcgaatgctgctgctgcaaaaaaatgcgcacgacattggcggctgtggatggaaggattttggtcagcagctcgatttgctgcgcgagcgtccggtagccggcgcgctcggccgcaggcttgaatatcttatacgcccagagatcggggtccgacgccagcagctcattacccctgatcttgccggaatagcccttgatctcaccggagccctttgctttgacgatcttgtcgggctcttcgagcaggccgagactgttgagcaactgcaccgacaaatgccggttttgaaggccgccacgcagcgtcttcccgagcatcgaaagcgcagtgcccgccggcgcgccgtgcatctcctgaatgagcgacggcatggccgcatttagaaatcgatctgacaatgtcgcgccggcggatttcgaataggtcgccgcctcataaatttgttcggtcgtgatcgtgcgaccgaaaacctgcatggccttgacctggccctcgaggaatgttcgaaagcgcttcggatcattcatcaacccgaggctttcaccggccttgatgagatcggcgatatgcgcgttctcgacgcccatccccttcaacacgctcgccgcctcggccgccggcttgatcagctcgaacatctcctccgggtgctgtacggccgagcgcccttccttgaacagctccagcacttc

SEQ ID NO: 455 - DNA, 23243 bp, synthetic construct
  source 1..23243: mol_type = other DNA
  misc_feature 1..23243: note = Synthetic
gcgctctagcgttccgcacggacattggaaaacgacaaccttcgtcgccggtctgcgcctctgtggcctgacggcaccgatggttctcgatgggccgatcaacggccaatggtttcaggcctatgtcgaccaggttctcgtcccgacgctctcaccgggcgacatcgttgtgatggacaatcttgggagtcacaaaggcgctggcgtgcgaaaggcgatcgaggccgccggcgcgacgctgctttacctgccgccctacagcccagacttcaacccgatcgaaaaggccttctccaagctcaaagccttgctgcgaaaagccgccgagcgcaacgtcgacaccttgtggaacaggatcggcgctctactcaatgagttcacgccaaccgaatgcgccaacttcttcgccgctgcaggatatgagccgctttgagtggaaaccgctctaggagcgtgtcggagaaatctttaattttggaggcgcggcgagagcgcttgtgattctgcttgtccatgagcaacacatttcgctcctggaagatcgagcagccattactactgcctgtgggagcaggaaaaggtcccccagcatcaagctcgtcgacgacagcttttatttcgtcgtcagtaaactcggctttcgggcagaacttcccaataagcctaccttactccaagattcttgcgatggtagacgagataaatgtttcgtcgaacagcgatgcccacgtatgcgtcttgggaatgtaagtattgttccatcgcgactgaaaattctcaaccttttcaagtgcataaataattccagctgacagtcctcgtaaggtcggttcaacagagataatattcgtcgaaattgcagtgaaaaactctttcggtcgattatcgtaggtatttgttaccaccacggctccggtcgtagccaattcaaatggaacgacgcttggatggggggctagcatcagactaatccctagatcgatcgtcgaagcgaaacgcttgtattcgtcctcgggcattttttcgataaactccagatgatggccgccgcccaactctaccggttgtaagggcgataggcatcccaaacctacaaatcgccagttcgctccgaagtgcccggcctggcaaagttgcttcagcgtaatttcgataaattcatagagattgcgagcggcatgcgcctcggggcgagcatagaccacacacagacgttccttccgtgcccgcatggaatcaagtgactgcctcggaagacaattcaagacatgctcaaatacagcaaagtcttttttctcaactgcattggctttgtgtttgaatatccccaatttgtggcttcgaaagtacgatgcaagcgcagacgaattgaacacggggtacgagggcacatcgaagcctgagctacagagcgcatatattgcggaatgttcatggaaaattggttcatattcctgtacgagtgcaaggacccttggttcatcagtcaatgcggccaaaggggaagcgatcatagcatcgaggctcgaataacacaggaaccgatctctgggacccaacgatagataactcctctctctaagcccataaacatcaacgtcgataaacagctcttgtaaatgactgccttccgttcgccataggaaatattgcttattagctgccaattctgcagtaacaacgatttcgattatcaaattcaacttttcgcaataacgcgttagcccacgcaacaactcaaacaatgctcgataacctccaaaggctatatcagggttaaaattgggcatgaagacgaaaagtttccgaagtccgtcctcccgtttacgcatagtcaccggcttgattcgtgcctcaatatctgctgcgcgagcacgcagcaggggttgtgtaacccccggaagcgcccactcaagcgcttccgaaagcttgtgccgacaggatctgccctctttcttcccggtggcaagataatgccaaaacccgctacggatttccttacgagcgatggcctcgcgcacatccttgtaaaggttgacataaaactcctccgagaacgagtcatttggcgagtagccgtgtcgtgctccaatgtagaaataatgcaaaaaaggccaggcacgccatttcctattttcaggagcatttaagtagcgagcgatgtaaaattgcttatcgaattctttgcgtataattccgagtgggcatgccgggtcaatatctggccgtgagagtaagcggtgatatgaattataaaaaaaatcagggatgcctggatcgtctccaaaggagggggaaggatctctaccttctgtaactccagagagatagtaatgttctaatggatttatcagactcgcgcgaacatcggcatattcgcgtaaataccaagccgagtcgaagagagggttaggattatagccgctaaaccccccaattcgtaaatagtgaaagtacgggtcaaggccaagttcgcgaatctcggggtaggtactaaagtaccacggctcgttaaatagtgggttgacgctcttgcgctgccttctgggcatcagataagaaagtacgcctgcaaccatgctcgacactgactgatcgatcatcactgtatggcgcgtcagtcgctcgatctcttcatcccgagtgataagtgcgcgctccagtatttcaatttgcctttgcaattcgtcttcgccgagagccccttgggatcgcgccggctccaatccgatcacgttgcattcttcccgtgcgtcgaacggatcgacacgcgcagccgactcgtctgcttcgaacgcgaccataggcattagggggtttgatccaatcgcgcattcctttggctggccgtcggagatgttttcacaagctgctggatccaatttattgacgcttaatcgattatgcatctcaagatttctctatctgcctgtcgccgcgatgccttatgacatttacaatgttatacggataatgtcacctgtggtcgaactcaactgatacgccagaccctatcggttagaggtgagctttctataggttgtccttccggcccagaccaagcaaagccgcgctgcaaagcttgatttttcgcggaggtcgggatgtatatcttcaagcatgcccgtttgacgccgcttggtagagcggaattggcgtaccgtttgctggacggcgaccaatcgatttcgcaagtcaccaacgcctttcacgtttacgccaacaacgcccgcaaatggaccgagcggctcaagcaggcctgcgcggaagggctgtccgatcgttcgtcgcgcctgcaacggctacggaaacccacgccgcacgccgggatcgatgagatcgtggcgctgcactgtcagcgcttcaccggaaaagcatatcgccaaggtctcagtcgtcagcgcggcaacaccaagccgcgttctcaaacacgcccaggaccaacggcaacgccgagcgtttcattcaaactgcctcacacgaatgcgcttatgcgacccgcctatgcgtcattcgatcgccgcgtcgatgagcttcccgtctggatgcacagttacaaccggcatcgcacgcatggcggaataaaatatcaaacgccaatcagcccccctcggtctttccgaggacaacctgctgaggcttcatagccagagcgcgctcgtgattttctgattcggtaggaggattccccgtcgattcgatcaatcagttcggctcaagatttacagcgacataaattgtgttaccatccgcagcggtcagcgtgtttttagcaattgcacttgagcggccggataaatctccgtgattgaaacgcggtgtaactgggcacgagtgctgtttctggagcgaacgctgaaaggcttcatgggttatctgtagtgtcgctggcccgcctactacattttgggttgcgcgggaaaagatggtcgcaatcgggtgcaatgatggatttggacgttagacaggcgatatcgaacgcgtcggacaaaggccgtgctttgtggccatctagaaatgggccgaatcgtttggagccccaatgctggccagtgttgcagcccaaatttaagtttgatcctggttctcgtgtattcacaatcggtagctgtttcgcgcgcagcattgagcgagcgttgtgcgatctaggattccagatcccagtctttgatttctacggccagcatccggacctatttgtcggcaacggcataaacatgctcaatcgctacacgccaccttcgatttttcaagagctcgaatggacccgcaagattatggaccgagatgacaccgtgcatctcgatgacatcgaaccgctgcttttagatgccggaagcggccttgtctatgatctatccagattgacaccgaaagagtatgggatcacacttgagcaagcattggcggaacgacgtttgatctatagcctttatcagagtgcttttgattgcgatgcggtggttattacgcttggccatatcgagtgctggaaagatacagagacaggcatgtacgtagaccttagtagaggcgttcttcgaaaccccgaaagatttcaatttcgacggatcgattataatgaagcactgcagtgtattacagatgcgattgaaattataaacagggataatccgacgaacattcttttgacaacatcgcccgttccgctggcgcgaacatttacaagtgacgacgtaatagttgctaatacctattccaagagtgtcctgagggcggtcgcgggttctgtttcagaatcaaatccgaacgtagactatttcccatcgttcgagagcatcatgctcactaaagaacgtaaggtgtggatggacgatctaatacacgtcgatcctagctttgtcggttctataatggtgcgagtaaccgagtcttacgttcctgacgcagcgcgagatttttcgttaatagaaaagatgtatcgcctaataacgctggcgaacgcgggggattgggaaaacgcttgttccgtcttcgaaaaattgccgattgataatttgccagatcaaccccttgagttttttgtctgtgcggctgaattggctgcccggcgacaggacgtcgatttggtcagggccatgaatgcccgtgctgtaaatgtcgatacagatttaaatttgcgactctctaaaggactccgagctgtcggattggaggacttggcgtcgcgccgtcaggaagaggcactgaaactaggtacgcgatcgacggacagtctgtcgagttggatacatgtactcgatgtttcgggtcgagtggacgatttagattggctccttcacaaagccgaggaggttatgccggtagacgtatccacagcatggatgctcgcgagcgtccacgaaaagctgggacggagcaaagatcaagagcgtctcctacgaacggtgctcagagaggatccgctgcatgaagatgctaggctgaagttggcccatctccttattgaaggcgaatgccgtgcggaagggatgcaattgcttcgatcgctcgctaccgatggatccactagcgaatatttgcacccattggttagcgagcttttgactctaggcaggatccgagatgcaaggtcgctcgtcgagcgtcttgtggcggctaacccagagcacggcgggttgttgcaactcgcttcgacttgccagatggcagctgcgtgcaattcgggcgatagaaatcccgatcctgtcgacagagggattgaacaggatgttccagttgcatccgggtcacaataaagccggcacccaatcccttcgaaaataaacttagagcataaaaaatgatgaaagatccttctgtctctgtggagcgttttgatagcactggcgcatccggctttgttccgcggaatgacggcgacacgaccgtcattcttcgtcttgttgacgacaagaggattttgagcgtagcaagagctgaactgtttaggccagatgttgtggctagtggaaagtcatcacatccatactgtggttttgttcttcctgttcccgtaagcgaggtggtaccagctttcggtaaaattaatgtcgtgacggaagacgggaccattatcgcgagcggtgcggaaaggcagaaactggctatcaatagtcaatcaattccggcgggcgagatcctagatctatgctcggatatattttgcggcgtggatggattcgagttccaacaaggaatccttgctatttcgggcatcgttctaccgccgaatgggcggtatcaggatttggagtgcatagggcaaaatggcgtcgcttttaaatggcattggccagtttacacgccgagcgcggaagaattctattggtattacccaggttctccctacatagggttccgcatcgacattaacctcgcccaaagcgcggatccttcgtcatttttcgagttttattttcgcgtcaaaggcgaagaagaggcgcggactaaattgcgaaatatttccctgccgaaggatttgcgctcatttcagaattttcctagtgatttcagcgtgaaacgagtgcaacaattgagttcgaccatcggtgcaatgatcactggtttcactgactatcgacgagtgattaatctggcatctcgctatcttcatctgggatcagctacccgagttctggattgggggtgcggttttgggcgcgttgttcgacatttccataaagatttccccgacagtcgagtcttcggagctgagattgatgatctaaatttgaattggatgcgcgaacacttgccttctatcacgcctattaggacggaccttgacgcgaaaattgacttgccggatcaaagtgtcgatctcatttatggcatctcagtaatgactcacattcgcgagtctcagcaggaagcatggcttcgagagcttgcgcgcattctctctccggatggtgtcttgatcctcacgacttgcggcagtggtgcacttgccttcggtagtcgctggatatcgcgaaagcacctcaatacctggcgtgaccgagggttcgttgaacatgagcaggcttctgagtatgaccgcgacataggtggcgacgggtattatattcaggcgaatcagagttctgaaaatactcgacggcgctgggggcgaattattgatattgtcgacatcataccttgtgttttcggttaccaagacgccgtgattatgcgtcaccgtaaggccacgaagtagatttcaaagtggggatgtcccgggtctggaacgatttgtataaagcaaggtcgcagccttgaacgaggtcggcgcgcttcgtgcggtccttctactcgccgggacttcttcgggcgaacagaggcgggataaatatcaacgagttccgctacccagcatgtcctcggttgcgaaatgcagccgggagactgtcaggatttccgtattcctccggcggcggccgcctggcgttgatcgcagtttttgagatagctgcctggcaggtggcacgatgatcgtgtccacttctattacaagcggacactatcgccgatgtcccgcaacgatgacgatccgccagctcgccggcaccggtccttgtctctcgatgagaagcggcggatcgtcgacgagtgcctcacggacggcgcttcgatcgccgagatcgcgctacgctacgacctcaacaccaaccagctcttcacttggcgtcagcagttcggcgtcgtcccgaccgcaccgcaggaactcgcgccgaccctgcctgttacgatcacgccggacacgacgacagaatgttctcctccagggccgaccgcccagatggagatcgtgctcgccgagggggatcggatcatcgtgtggtccgatgtcgagacagcagcgctgtcgcgggtcgtgaaggcgctgcggcgatgatcccgctgccggcgggctgccgggtctggatcgcgaccggccacaccgacatgcggcgcggatgcaaggcttggcgcttcaggtgcaggagcagttgaagcgtgacccgcacgcgggcgatctctacatcttccgtgggcgccggcttgggcgatctcgccaaaatcctgtggcatgacggcgtcggcctgtcgctctacgccaagcggctcgaccgcggaaagttcatctggccctcggcgagcgcgggcgcggtgtcggtctcggccgggcagatggcctatatgctcgaggggatcgactggcggaatccgcaactcacccggaggccgcaaagcgccgggtgaggccgaaaaaagctggggtcggctgcattttggggcgccacaaaccgcgcgatttgtgattcacttcgcctcatggacgctgtgaaccaagcccttctcgacgaaaacgcggtgctgaaagcgcagcttgccgtcgcgcttgcaaaggcgtcggaagacatggcgctgatcgcggcgcaagagctccaggtcaccaaattacaacggcatatctacgagcggaagtcggagcgctcggcgaggctgctcgatcagttgtcgctcgaactcgaagagctggaagcgaacgcgaccgaggacgaactcgcggcggagcgcgcagtcgctaaaagcgacgacgatcgccagcttccagcgcaagcggccgcaggagcgcgacacctttcccgagcatctgccgcgcgagcgggtcgtgatcgaagctccggcgactagcgcctgctgcggcagcgcgcggttgcgcaaactcggcgaggatgtgacgcggacgctcgagacgacgccgcgtcagtggaagatcgtcgagaccgtgcgggaaaagttcacctgccgcgactgcgagaagatcacccaggcgccggcgcctttccatgtcgtcgcgcgcggctgggcgggtccgagcctgctggtgagttcgaccgcgagatcatccgggagcacacccaagccgccttttcccgccgcgtaccagcgcggcgggaaaaggcgggcgaaaaaaggcccgacggacttatggaacgataaaaattccacgggcgcgctacccgcacacggaaaaattcacattttgaccacgttcaagctagctgacgcaacctgagtcatatcagggcataccctgatgcgacgtcacgcgggctcagcatcgtcatgtaacatctgggttgacagcgactatttgtgacaatgtagggtcgggcctaaaccctgaggtgacagccatggcccgcattggttacgcccgcgtcagcacgattgatcaggacctcgacacccagctagcccggctcaaagctgaaggttgcggcgtcattcgctcggaaaaagcttctggcggcagccgcgaaggtcgcgctgaactgatgacgattattgaattcctgcggcccggtgacgaactgatcgtcacacgccttgaccgtctgggtcgggacactcgcgacgtcctcaatattgtccacgaatgcgaccaacggcaggcgttcgtaaccgttctcgacccacacgtgaccacgcgtggcgaaaccggccgaattgtcatgacggtgctcggcatggtggcgcagttggaacggcggttcatcaaagagcgtcagcgcgaaggcattgaaaaggccaaagctgaaggcgtctatcggggaggcaaacgacgcattgatcgagtgcagcttctcgccatggccagcgccggccaaggagtcggcgctatcgcgaaagcgctaggttgttcgcgcatgcacgtatatcgtattctggcggaacctgacgcactccagaatgctttggagagtaagtcgaaagatcgttggtgaggcgaggacagaggccgaatggctaagttgaatatttgagctgagcaaaaccgacaccaaatacttcgatcaaaacggaatttccccgccatgttgccatagcggggatgatccttcgatagtttctaaagaaaccaccttgccgtggcttcccttccgatttccccaaaatattaaagcagcttggcgaatcttcgtcaatcggttttgatggagttccgacgatttgaagggagccatttatgcgtgtcctgggtttggacggcggcatcgcgtcgattggctgggcgcttatcgaaattttcgaagatcacgagccttcggacggtcgcattatcgacactggagcctggatgttcgatgctccggaagaaaaaagccagactggcacaaaacttaaatcagagttgcgaagaatctttcgcggccagcgccgggttatcagacggcgtcgccagcgcatgaatgaggttcgccgcatactgcatcgccatggcctgttgtcttccgacaatcgcgacgcgttgaaacagccggggctcgacccgtggaagatcagggccgaagggattgatcgtctgctgagccccatcgaatttgcagttgctcttggacatatcgcgcgccatcgcggattcaaatcgaactccaagggcgcgaagacgagcgatctggacgccgagagctccaggatgaaaaaggcggtgggggaaacgcgcgaaaagctcgcccgcttcggctcgccggcgaaattgctcgtcgaagacgaggggttcgtgctacgtcaaacgaaactgaaaagtggtgcgcttgaaaccgtgcgccgtttccgcaatcgtgacggcgactattcccgctcgctcttgcgcgatgatctcgcggctgaagtccgtgcgctttttcgcgcacaggcgaggcttcaatctaccttcgcgaaggtggaacttgaagcggagtttacgcaggccgcattcttccagcgtcccttgcaagacagcgagaggcttgttggcccctgtcccttcgagcccgccgagaagcgttcgccgaaacgtggttattctttcgagttgttccgctttctgtcgcgactgaatcatctgacgttgcgcgaagggagcgaagagcgaactctcaccgtggaagaactcagaacggccgcggccgatttcggcggagtcgccaaattcaccttctcgacgctccgaaaaaggttggcgttaccggatattgcgatctttgtcggcataaaggccgacgacgaaaagaagctcgatgtcgtggcgcgctctggagaggccgccacaggaaccgcgcgtttgcggcgcgtcgtaatcgacgcgctcggcgaactcgcctggggcgcgctgatcagcgcgccagaacggctcgacaagatcaccgagatcatcaccttccgcagcgatctcgaccgcattcgcgccggtctgattgaagcgggttttgacacgccgctcattgaggcgatcgtccgagccgcagccgacggaaagctcgacgccttcaccggcgtcggccatatctccgccaaagccgcgcgcaacatcattcccggcctcatgcgcgggatgacctatgacaaggcttgcgcggccgcaggctacgaccacacggcaagtcgtgaacgcgacgccttcgatgtcggcatgcacggcaaggaagcgctgaagaaaattcttcaggaagaacgtatctcccgagaactcgtcggcagcccctcggcgcgcaaggcgctgatcgaggcggtcaagcaggtcaaggccatcatcgagaaatacggcgtccccgaccgcatccatgtcgaactggcgcgcgatgtcggcaagtccattgaagagcggcgcgacatccatttcggcatcgaaaagcgcagccgacagaaggacaagctgcgtgaacttttcggtaaggaggtcggccacctgccacaggacggcgagcgcggaaaggaggaattgcttcgtttcgaattgtggaatgaacaaatggggcgctgcctctacaccgacgaatatataaatccgaagcagctcgtcgcctcggacaattcggtccaggtggaccatattctaccctggagccgctttggcgacgactcctatctcaacaagacactctgcacggccaaggccaatcaggataagaagggccgcacgccttacgaatggttcagggcggataaacccgaagccgagtgggatgccttcgtagcccgcgtcgaatccattcaatttatgaagggactgaagaaacgaaactacaagctcaagaatgcggaagaggcggcggaaaaattccgtagccgcaatctcaatgacacgcgctggacatgccggctgctcgccgaggccctgaagcagctctacccgaagggcgaaaaggacaaggacggcaaggaacggcggcgcgtcttcacgcgaccgggcgcgctaaccaatcgtctgcgccgtgcttggagtttgcagcggagaaagaagagcgaaaagggcgaacgcatcgcggacgatcgccatcatgcgctcgacgcaatcattgtagctgcgaccaccgagtccttgcttattcgcgccacccgagaggtgcaggacatcgagcgcaaagggcttcattacgatctgacaaaaaacatcacgcaaccatggcctgggttcgcggacgaagcgctggatgcggtcgaaaaagtcttcgtcgcacgcgctgaacggcggcgggcgcgcggcaaggcgcatgacgcgacaatccgccatatcgccgtgcgcgacgacgaagcgaaggtctatgagcgcaaaaaagtcggcgatatcaaactcggcgatctaatccgcgtgaaggacgccgagcgcaacgcgcccttgattgagaacctgcgaaaatggatcgaggcgggaagccctagggacaatccgccgctctcgccgaagggcgatccggtttcgaaggtgcggctcgtcaccaagaacaaggtcaacatcacactcgacaccggcaatcccgagcgcttggcaactgtcgatcgtggcgagatggcgcgggtggatgttttccgcaaggctaacaggaaggggaaatacgaatattatcttgtaccgatttatccgcatgaaattgcgacgatggaaacgccgccgatgcgggcggtgcagggcggcggcgacgatgataaatggccggagatcgattcgacgttcgaattcctgtggtcgattaaccagctatctctacttgaacttacaaagccggatggcgaagtcatacgatcatacttccgcagcctcgatcgcaataccggagcgcttacggtttcgggcattgcaaactcgacagcgacaaggaaagggataggaacaaggacgctcatcgacttcaagaagcttcatgtcgatcgcctcggtcaaattttcgaagtagagcgtgagttgcgtacttggcgtggtgaaacatggcgtggaaaggattgcatctgagccgaccggcgcggctcgctatcgccgataatcaaattgtcgtggcgcaggacgacggcgaggtgcgcgtggcgctggaagacgtcgcctatgtggtgctcgacgcgccccacgccacgctcacctccaccttgctctccgcctgcatggacgcgggcgtcgtcatcgtcagcgtcgatcaacgccatacgccgaacggggtgacgctgccctttcattctcaccaccgtcaggcgggggtcgccgcaatgcaaatcgcgctcggcgagcccttcaagaaacgctgctggcagcgcatcatcgtcgccaagatcgagaatcaggcggcgcatctcgaaagtctcggccgcgacgcgcaggcgttgcgcgccatggccaagctcgtcggctccggcgaccccgacaatgtcgaggcgcgcgctgctcgcaactattggcgcgcgctttatgaggatttcacgcgcgacgatgctcgcgacttgcgcaacaagatgatgaattacggctatgccgtcgcgcgcgcgggcgtcgcgcgcgcgctcgtggccttcggcctgttgccggccttcggggtgcatcacgcgagcgtgacgaacgccttcaatctcgtcgacgacattcttgagcctttccgccccttcgtcgacgcacgcgcatcgctgcgtgcgaaagaccgtgaaaagaacagcgaactgacgatcgaggatcgccgcgccatggcgggtgttctgctcgccgatgcggttgtcggaagggaaacggtgagcctgcttgtcgcgagcgaaaaggcggcggagagtctcgttcgggcgatggaaggatcgagtgcggcgttgctccgcctgcccgccttcttggcgaaaaaggggttgccgccatgaaaaccggggaggtccgatatatgtggctcttcgttttcttcgatctgccggtcggcacgaaagtcgagcggcgcaacgccacgcggtttcgcaatttcctgaaggacgacggcttcctgatgctgcagctttccgtttatgcacgtgtcatgcgcggcgaagaagctgtggaaaagcacctcgccagggtcacgaagaaccttccgcccaaggggagcgtgcgtactttgagcgtcaccgagcgccaatacgcccgcatgaagctcctgatcggcgaatcgacaaaaaatgaaaaagccgcgccgcaacaactcgtcctgctgtgatttccgtcccggcaagaggcgaaaatcatccgcatttcaggtgcttgtgcgcgagctagcctaccacggggaaatcggtagggaagccacggcagaggttcagggcgtgcgcgcgttcggctcagcctaccacggggaaatcggtagggaagccacggcacgatggatgacgaagatgcgatcgctgcgagcctaccacggggaaatcggtagggaagccacggctgtccatcgcttgtttcgtgtcggcggcgaagcctaccacggggaaatcggtagggaagccacggcgtcaacgtaggaatatgatttttagaacgaagcctaccacggggaaatcggtagggaagccacggcgtttccaatgcgcagccggcggcggcggatagcctaccacggggaaatcggtagggaagccacggcgagtctctgcatcgttttgaccgaagtccgagcctaccacggggaaatcggtagggaagccacggcccccagcggcgcggatggcggcggcgatggagcctaccacggggaaatcggtagggaagccacggccagccgggctcccacctgatgatttcacccagcctaccacggggaaatcggtagggaagccacggcaggagctgctgcaggaggactgagcatgctagcctaccacggggaaatcggtagggaagccacggccagggcgagcgcggcgagaagggcgaccccagcctaccacggggaaatcggtagggaagccacggcaaaaggtccgcgcgatgaagcgccggctggagcctaccacggggaaatcggtagggaagccacggcaccgttttcgcgtggcgccgttatcgcgccagcctaccacggggaaatcggtagggaagccacggccaccactgccgaagcgctcccccacgacgaagcctaccacggggaaatcggtagggaagccacggccgcctcgggcgcaggcgttttcggaggacgagcctaccacggggaaatcggtagggaagccacggcctctcgtcatgatggagacgaaacaccttgagcctaccacggggaaatcggtagggaagccacggccacgtcatccgatcaggcgcgtctcgcgcgagcctaccacggggaaatcggtagggaagccacggcgtgcgccgagaacgcgaaaaacaagaatgtagcctaccacggggaaatcggtagggaagccacggccatagtggtcagtccatgccgagcgcggcgagcctaccacggggaaatcggtagggaagccacggcacgatcgaggatcgaaatgcgccgctcccgagcctaccacggggaaatcggtagggaagccacggcccgcgagggccgccgcgtgggccgccgcgaagcctaccacggggaaatcggtagggaagccacggcccacctggtatcggctcatgcagcggctcgagcctaccacggggaaatcggtagggaagccacggccagcatggccaggtcgccaagcccgccgaaagcctaccacggggaaatcggtagggaagccacggcctgtccattgcctgctttgtgtcggcggcgaagcctaccacggggaaatcggtagggaagccacggcctgatctgcgcgccccatttctatgcctgtagcctaccacggggaaatcggtagggaagccacggcaaaaggtccgcgcgatgaagcgccggctggagcctaccacggggaaatcggtagggaagccacggcaaaggtcatgaacctttccgacgctgtggaagcctaccacggggaaatcggtagggaagccacggcgacgcggcgagcgaggtcttgccgatgcctagcctaccacggggaaatcggtagggaagccacggcactcccgcgcgacgcatccggccgttgcaaagcctaccacggggaaatcggtagggaagccacggcgctcgagcacgtcgccttgaaggccggtctagcctaccacggggaaatcggtagggaagccacggcaagtcaatgctcgacccgttccagaccggaagcctaccacggggaaatcggtagggaagccacggcaagcccgatgatcgtgccggcggcaaggacagcctaccacggggaaatcggtagggaagccacggccaagacgcgctccggtgacacgccccgcacagcctaccacggggaaatcggtagggaagccacggcaaccatggaccggcgagtgctttcgccgacagcctaccacggggaaatcggtagggaagccacggcttccttggccgcgtcctcgaaacttccgtcagcctaccacggggaaatcggtagggaagccacggccctgacttcgacgctaacggtcaaattgatagcctaccacggggaaatcggtagggaagccacggctgaaaagtgcgatgatatcgccgcagtgcgagcctaccacggggaaatcggtagggaagccacggctcgttgacggctgcatggcgtggtgctgcgagcctaccacggggaaatcggtagggaagccacggcgccagacggcgacctgtctcacaacgaagcagcctaccacggggaaatcggtagggaagccacggcttccttggccgcgtcctcgaaacttccgtcagcctaccacggggaaatcggtagggaagccacggcagcggcgataatgtcgcgcacggcggccggagcctaccacggggaaatcggtagggaagccacggccttgttgcccttgtcgtcgccacgcgcgcaagcctaccacggggaaatcggtagggaagccacggcagtttcgacgtgctcgacttcggctccatgagcctaccacggggaaatcggtagggaagccacggcacttgaacccgtcgccatcgacgaacggggagcctaccacggggaaatcggtagggaagccacggcctcgccgcctctttgaagggcgcggcgaacagcctaccacggggaaatcggtagggaagccacggctcttttccgagtctctggtccggccgatgtagcctaccacggggaaatcggtagggaagccacggcgctatcggcgatgtgtccgtcgaaccttcgagcctaccacggggaaatcggtagggaagccacggcaagttccttgagggcctcgtcttttccagcagcctaccacggggaaatcggtagggaagccacggcgctcacggcggacgctggcgccgcggtcggagcctaccacggggaaatcggtagggaagccacggcgcggcctcgctctcactgcgatgtcagcaaagcctaccacggggaaatcggtagggaagccacggcctcaacgacggtcagcatcgtcttcatgcgagcctaccacggggaaatcggtagggaagccacggcccccatacggtgaaccgcctaaccacgttgagcctaccacggggaaatcggtagggaagccacggcattgttgatggcgttgaccatgttctgccaagcctaccacggggaaatcggtagggaagccacggcggcgatcgcgaagggtccggagaccgcggcagcctaccacggggaaatcggtagggaagccacggctgcgccgtccgggtatggtgcaatgggttgagcctaccacggggaaatcggtagggaagccacggcaggaacgcgcacacccgatctgccgcaggtagcctaccacggggaaatcagtagggaagccacggctggcataggccgtcgcgctcgtgcatgtctagcctaccacggggaaatcggtagggaagccacggccttacctccagtggctgtcgctgttcgccaagcctaccacggggaaatcggtagggaagccacggctggacccgccaagctccagcggggaaagccagcctaccacggggaaatcggtagggaagccacgcaggggaatcgggtgaaggattaagcggcgatcaggcttgcgagaaagtcgtcatcccatgcggcggtcacgccaaaccgctccttcacgcgctcgacgccgcctcatgcctctacgccgaaccaacaggcagcccctgtgaggagctgtccatcgcgcagatcaatattcgtccgcaaacatgatggtgaggacacgaacggtctgcgcagggtcggcgggattctccgagccgcccaccatgtcgagcgaatagtagtcgattttccagaagaggtttcgacggttgtgctcgaacgccccaaaatcgtgctcgccgtacgggtcattctcgggcgtgaaggcattgaagctcatcaccttgcgcatgatcgcagcttggtcgcccaaaggcaggctggcgacgcctgcggtcatcatgaatttgccagcaacgctcccttggcgcctgaaggcgtcgttgaggtggcgaatgcgatcggtctggtcttcataggtttgggtcggcatgggggctcctcggtcgctccgcatgcgcaagccgagcaacgctgcctgtgttggggtttggcgagatttgcgggacaacgccagccctcggcgcgacaagcgcgcggccgatcgtcaccggccgatttgggtgatttcgacccggaacgttttttcatcatccgagcgcgtcaccatgtaacgaaccgggagggtgaaggcggtctggctggatgagccgatgctgcattggcacaatgatcggtttccggtttcattcacggtcgtgatctcgcgcgccttgaatccggtcccgaacatttcggcggtgaaaggaagggcgcgaaggccgctttcgatttgcgcgataacggctggatggccacaaccgactttcgcgccgccgcgcgtcgcgatcagaaagatcagcagcaggagcgccgcaaaaccgaacaagattttcttggcgatgcccatctcaggtcccctcggtcaaaacgttgtcagtgaatttctgggagcgaggcccggccgtcagcgaaacgcccgggcccttcgctcatgcggggtcgtgcggcagcaacccgacttgcgaaattttccgcgcgaacagcggttcgtcgggccaggaccaccactgcagtttcagcaggtcgccatgaacctcgatgacgaccgcctcgtaccagccctcgttcgggccggtggtggcgagcacgaggctacccgccccgatatcgccccagcctttggcaggcgttgcctcggccgtatcgggcggctggtcgccgcccccggcccccgaatggccgtcaagcgggcttgccgtggccatacgggcgggcttggggcttttggctggtaagccggcggcggcgacgatcgacgcatacaggctggccttgacgaagggcacgaaagcccggccgctggcgaacaccttgccccggggcagcttggccgcaagcgcctttaactcggccgtttcgagcttcaccacccgcatgcccatcagccccgccgccttgctggccaattttgcgtcggctttgtcgaagattgaggcgtgcggcttgcgggtgtcgtccagccccatgaccacgagtacgggctcaccattgtcttgggctgagtgttttggcttggcgctcatcgtgaccccccagaaacgacgaagggggccagaggcccccgtttcggttgaatgatcgatggcgcgtgtggtggccgcagcggcggccgacaagggtttgtcatgagttttcccaaaagctgagccgtggccacaatggcccggcacggccattatataggactattttcctattgtcaagatcaaggcttaaggcgatcttcgccgccccgccatcgtctgaaaccggcgcaatgtcggcgagcaaaacggccgggaaactggacagctctttgcgctgtccggcgtcaacagcccgcgcctttcggtcgggcctaatcgcgagcgtccttgagcggcacgcgatcgcaattggcaaaggagggacaatgagtgttttcgcagcgacgacggtcgtcgatccggttgccgttgcagatgtcccaaccccaggctgcgcagaagccccaaagcgcgtgctggacgaagcgcgggaagatcgcgggatttgcagggttgaattcgcgggtgtcgatgcgctgcgccaagcccatgataatctcggcgcagccgttcggcgcatagcagccgggaccgtaagcgtgttcggcgttgaaccgccgcagaacgcctgccctgtgcaggaaattgtgaacgagggtgtcgatggcgatcatgtttgcgccggtcgtcatccatcgttcccgctcagggtcgcccgcgaggagaaggtcggccagcatcatgttccatagcttcgggccgacgccgtcgatatggcgcagcggatcgaggagagaggcttgcatgagcgcggcgcgccctgaaacgccgacgccggggtcggcagccgccagcctttcgtcaatccagccgacaaaatcgccgtcgcaaacgtcccgcatgaaaaggaacaggctgtaggcggcgacgttcagcgcgcctttccgcaatggatgtttgggaagcgggcaaaacggcaggaggccaggctcggcgcaggttcccgcccccttccgatagccgcaagagccgaaggcccagtagcagcgcagtcgcggacagatcgggacgtggcgaagcgccctttcgacgccggcaaatcgaacgccgccatgccgggcgtcgaagccgaaagcaaccgcgtcggtgatcccttggagcgagatcagcctcgtcagccaatcgaaaatcggccggctatcgcgctgcttcaccgcgtgctgaacgcccgcttcgcgcagaccggccccgatttcgtcgagataactgcgtggcgccagtaacaccgcggggcgcgtgacgtgaaggacgaacctccaatcaggattgaagcgtcgcattcaatttcgcctttcgagcacgctcgtagcatcgcccgaatagcaggggtcaagggtgtcgcggatcgacgtcaaaccgtgagccgtaaataccaattgtagtcgtagctaaccggcaggcagtggatgcgcctcgcatgtcgaagctacctcatcggcactaaccaatacggggaccgtgaaattcgggactcgtagttggacccccatgcccgaaaggtgattgaacgatggtagaccaacatacaacagtcaaatcgaccagccatacccatagatacgatcacgcgaacagttgggcgtcggcagcaggtagacgggaaattgtgactcactggggtcgctatatcgagaaccaagtaaatgatggctggacgccgtacttgctcactttccaatatcggcagataggaggctctcgtcggcgaatgatcgatgaaatgagcaaagaggtagagcgggtttatgcgaccttgctcacacgcgtagttcggagacctgcttcgccccacagcttaggcaagcacccggtttggatcgtctgcccagattacccggtttggaaacgggaaaaacagctcgtaagggatgtcacggtgaacgacggaatccattttcagggcatcggtctgatgccgccgaaatcaaggctcgcgcagcctctggacgagcattttgatgaaaacgcggctttctacgtccggggaaaactcccccttatccgggcacacgccaagccgataactgaaagtatcgggcgcgcgaccgattacacaatgaaggctttcaagaccggtcgcgtttcgcatgacgaaatgctaatccttccgcgggcgctcagcgaaatcgtccgcagataggacaggatcgcgaggcagctatctaaagctgcctcgcgatacgcgccaggttattttatggccgcccccctactgacttttagaaccgctatcttcaaaccccgctccgttcgcccaaggattttgatcttgagcaagggttgagatccgatcggcaagctcagcaatctttccccttctccctccaatgtcgcttttagcgttatgccaatcccgccctggcggagaggcccttttagaaccactgcgttatctgctgttgccttcgacactgttggcatatgtgttgcaggcaacgtcggaatattttcgctgcgtctggaactcttctccttcgcgttcctacgggcaagtgcttcaatacctccagcccgcttgatagccttgggaatgtctgcaggtcccacgcccattttcattagggggccgaccgcgcagtaccacttgctggctcgttttttttccttcgacatccatagcaagacgaagcgcagcgcttggctaggctttttcgggtcgggctttctgtttcgagatttccacatgttagcgttacagaatttgcgccagtgccatatatgtttctccaggaagcacgcgaccgcgcacccccgagcgatggctgacctaatagcgcgacgatggccttcctcgctctttttgacgtcgcgcctcaggtcgtccagcaccgcaaaaaaatcggtttttagcgtgctcgcgttcggtagtattctctctgacgcgggcgtaacgatggcctgcgccggcgtgccctttttcgctttacgcgattttcgggtggcgacgggcttttgaacgccgcacttcgccgactgctcgggggctttcttcttttgggcttgcaacctgctcatgctcagccctccccaccactgattttctcgatcagcgctcggatatcctcgaccgaccaaacggtggtcctgggcccaagctttagcggtttggggaaccttccctccttcaccccagcccaccaagtcgaccggctcaccgggatcgggcctttcggcgccaggatagaagag

SEQ ID NO: 456 - DNA, 15405 bp, synthetic construct
  source 1..15405: mol_type = other DNA
  misc_feature 1..15405: note = Synthetic
ctgcccccgcaaccaaagccggcataattccctcatcacagcgatttgagccggccggtaggctcggcatggcaagcctcacgcgcaatcacctagccgttcccgatgcggaatggctacctgcttcaatccagattctttgtcatgaaaaccgataggggatcgagttgataagcgccaaagggcgaacagtaggaatagccaaacttctcatagagtgccctggccgccagactgtcggtgccagtctccaggttcaatcgtgctaggccggcttctcgagcccttgcctcaattgtttgaaggacttcgtcagataagccgtgtcctcgccaggccggccttatgaacatgctcttgatctcgccagtgccgtcatgttcttcctttaaggccccgcagccggcaagggcaccatctactcgaacagtccagaacgtgatgtctggctgatcaagctgagaaagatcgaaagtatgaatgctctggggcggcagtatggcccgagagtgagccatacgctcttcaatcagcgccgtaatctcaggcccggcaggcctcaccgtgcgaatatcaattaccattcaagcttcctgagctaagcgggtaaagcctctactcaatcgtacccaatcggaaattcaagtgcggcctcaaggcgaatatggcgataagatgatccgattaggtcgttcaaggacgatagagcgttttgctccagaccgctacgccgtttccagtctgtggatttccaaaagttgggccacgttcaaatccagcctttgcgaacatgtttccgctcggaacgtttccagcccatatcgtgcattgaagcaaccgcgtcccatcttgacgcgcgtgttgttctgcaaccgtaatcaagcgagcaccccggccctggcgaacgaaatcttcatgggtggtcacgtgagaaatctcggcttgataccattgcacgcgcttgagttgacaacaacaaaccatgcgaccgtcttcagacaggtcgacgagatactcggtcgcatggtcaagaacacgctgtgtgtcgtactgtattgcgagctggttttgtttgttgagcagctcggcaatctgcgaagcgtgtgccagttccatctctatggtccctgctttccaatattcgtaaatcgtcttggggcgagcaaacgcctcagagccgttttccatgatcccaatgatccgtttctggcaggcggcgtcgcgatactagccgaggaacccacaatccgaccgtacgttccagtgccgcgatccgcgcctcgtactcaacgataacgctggcctccgcctcttcatcgttcagtttgccccggtcgaactgtgttagccacaactagatgacgtttgccgaaacgccgtaagtgcgctgcgcatcgcgccgcccgatgacaccgtttcggatatcctgacaaagctgcagcttgaatggggtcgaatgccgtcgatatggacttcgagacttcatgagcctcctccagtcgaggcctgcaaagcgtatcggtttttccgtgtcccgtggtccagcctgagagattcactccaatgggcaaacgaacatagctgcagccgaaaggccacatagcggtgcagtcttggcctaacagcaaatctctcatgccgtcatcaaattctttcacatcgtaatgtttgattttgtacagcttgtggtggcaaatagagccaaacagtaattttgagaatgtttatatgccgaaaagaccgcttatccagaagggcgtagcagagcttgaaaagctgttcgatcaacggcgcgatgatcccggctttctgaacgacctgcttgaagagctttccgagcgaaaaacccagcgtgcgcaggagctacggcagcaggcgatgcaggctagaggaacaatcgctcaacgatttgcctcgcgcgttgatacccgcgagtctgccgcggaaaggccaactattgccgccgtaaaaccggttgaacgcccggcctctcctgtttcccgagtagcgtccgctccggcaacaacaatccgtcctactcttgaacgcccccctgtcggccatgatcccggaagcattctttctgcgtggacggcgatggaggtcttgtctcctccgtcgttccgaaagcccgaggatctggccggcggcgctcgacatcgtatcgcccaaatcgataaggacgcgctgccttgggagaacggtggcgagagaagccaccccaagcaaaagctttactaccaagtcattctcggctccatcgacatggaggccgccgtctcggcgttgctggcggtttataccgacagccggccggagcgcccgcaagcgcgcggcgaggctgtgctcgccacgatcatggtggaccgggaggggcgtcccgtcgagagtgaagccgtttccatttccagcttcggctggggaatacccgtggcattgggtggcaggctgagtgctctcggacaatggtcgcaggcggaaaagtcgctcgtggagggattggcggcaaaaattttgattgccgacaaggacggaaatccactgccgctcacccgcaagataattcaagacgcttatgattggctggtgcagaccataggcttggctgcgcaattcgccaggccaccggcatttgccgttcggtcgtatcagtatttcaagctgcaggacccgcctgaatccattctgctcaattcgttcttcctggatgatctggcagcggcacgcgctcttgttgcttccggcaaggcgacccccaacctcaaacgctatctgggcgtccttaagccaggcagccgccgaaaccttatgaaggacaacgaggcgctttcagaagcactcgagcctcggaaatttccattgggatcatggccgggcgacggccggcatccgctcgcactcctccagcaatgcgcggtcaatcttgcccttcacgacctgaagaccgacggcattcttgctgtgaacggtccgcccggcacgggaaaaacaactcttcttcgcgacgtcatcgcagcgcttgtcaccaaacgggcggaaattctttccacctatgacgagccggaaagcgccttcatccattccggtcagaggctgaagaagggagcttccttcgttcacctctatcgcctggacaacaagatcaggggttatgagatgattgttgcctcctcgaacaacaaagccgttgagaatgtcagcgccgatctgccagccatgcaagcgatagcaggtgacgccggcggtctgagatatttcaagaccgtatccgacgccctgttggaacgcgacacctggggtgcggtcgctgcagtgctcggcaatggcaagaaccgaagcgatttccggcaaaccttctggtgggacgacgatgtcgggctgcagaggtatttgcagcaggccagcggtaatcctcaactgatcactgagaaaacagaaacaggaacgaagcaaagaccgcctcatgtcatcgtcaaggaaaatgcaccggaggatcatgacgaggccctgcggcgctggaaaaaagcccgtcagcatttccgcaaggtagcggcatcttcgaaatcggcattggcggaattgcagaaggcccatgaccttttgcgatcgatccggcaaaaacaggagacggttgatggtctcgccgtcgaaatcgaggcgatgcagccggttttggcgcaactggcggaaaacgccggaaaagcggtgtccgcttttaatgtccagaagcggaatgtggaagcgctggatcagaatcgagccgctttatggagcatacggcccggttttctcagccggctgtttggcacgcgggtttatcgttcatggcgtgaggcatatgatatcctctcgaagaaactgacctcggagaaggtagagctttcgcgtctgtcggcagatgccgagacgaaaaggtcggaatatgcgcgggcgaacggcgagctgaagaaaatgcaggcttcagtcaccgaactgacagagacgctcggccgcgaacgagttgcatgtgaggatcttgcccgccgatatcccggcacgttcatttcagaagagtttttcgaccagcgccatcaggataaacagaaaagcgcgccgtggctggatgcggccaccgcgcgtttgcgcaatgatgttttcgaagcagcgatggcattgcataaggcgtttgttgactgtgctgcaaagccgatccgacataacctcaacgttctgatggatggctttggcacacgttcgctgggaagtccggagaaggacgcgctgatcccggatctctggtcgaccttgttcctgctggtgccggtggtttccaccacgtttgcttcggtttcccgcatgttcagtaaaatcggaccggaatctttcggttggctgctggtggacgaagcaggtcaggcgttgccgcaggcggccgtgggcgcattgatgcggactcaacgggcaatggtcgtcggcgatccgatccagatcgagccggtcgtcgttctgcccgaccagttgaccgaagcgatgtgccagcaattcgggatcgatccgctgatttacaatgcgcctggggcttcggtgcaaacactggccgacagcgccacggaatactacggaacattcgagaccaagtttggaacccgtgaagttggcgtgcctcttctcgtgcatcgacgctgcgccgacccgatgttcagcatttccaattccattgcctacgaaaacctcatggtgcaggcgaaagcggccaaaccctccgcaatccgggagattctcggtccttcccgatggatcgacgtcgagggacgagggcaggaaaaatggtgtccacaggagggcgaggcactgctcgcccagctacgtcatctgcgagatcaaggatgcgctcccgacttctacgtcgtgactccgttcgtcgtggtgcaagatcgcatgcgggaagcgctgcggaccagtggcttgctcgaggggtgggtcgaaagcccctatcagtgggtcagggatcgtgtcgggacggtccataccgttcagggccgcgaggcggaggccgtctttttcattctgggagctccggacgccccgcagcgaggcgcgagaggctgggccggcggtcgtcccaatctcctgaacgtcgcggcgacaagggctaaggaagctctttacgtggtaggcaatcggagcctctggaaaacggcaggcgttttccagtcacttgatgatttcctcggatgataaggagcccatcgggaaatggtcgctgatcgctaggctgataaaacacttgtcaggaaagataatcgcgacgaatggaggagagcatgactgagggctatattgaagaattcgagactgtctctttgcctttagggtccagttacaaaagcagaggtgtcgatggtgcgccggttatgatgctgggcgaacggcggccttgcgcagttcccgggtgggttcaaaccgctactgtctggagtctgctttaaagacgggtaagtcacgtctattgcaaaggcattatgcgcccatcaaaacgatgtccgcccaaatcttctattctatcatctggccatccaagcccatgcattacttctctcaggtgaaatttactatgattttcgactcttgattgactaaattgattagttgtacaattttattgtgcttttcctgtatagcgtaggttttggtggggcatgaattctgatttcggcatactcacacccataacacctgtgtctttcatccaaaaatggaggaaagtatcgcttaatgagcgtcaagctgcacaggaacatttccttgatctatgtgcattattcggccatccaacgccaagtggctctgatcctcacggtcgatccttcgtcttcgaaaaaggtgcgaacaagattggtggcggccgtggatttgcggatgtctggaagaaagatcattttgcatgggagtacaagcgaaagagcggcaatctcgatgatgcgcttctccagcttgttcgctacgcggcggcgcttgaaagtccgccgctgcaggtcgtctgcgacatggagcgcttccggattcacaccgcttggacgaatacggttccagtagttcatgagatacgtctcgatgatttggccgagcccggcccacgcgagatattgcgcaatgtgtttttcgcgcccgagaagctgaagccggcccggacgcgcgctgccatcacggccgaggccgccgacaaattctccacgattgccctgcgcttgcaagggcgcggtacaccggaagaaattgcccatttcatcaaccagctcgttttctgcttcttcgcccaaagcgtcaaactcttaccagacagtctcttcacccggttgcttagacgttcattgcagagacccgagggggcgaaagcctatctggacaggctgttcgaggcgatggaaagcggaggggagttcgatctgaccgagatcgcctggttcaatggtggcttgttcgaccggcgccgggctctccatctggacgagggtgatatcgggcttcttgtcgccgccgatagcctggattggagtatgatcgatccgacgatcttcgggacgctcttcgagcgttttctcgaccccggcaagcgcacccagatcggtgctcattataccgacagcgacaagatcatgaaactggtcgatccggtcgtgctgcgcccactacgggcagagtgggaaatcgccaggcaacggattatggggcttcttgacggtacggttacgccaccaatgcgcaaggctccacgcaggcgaatgacggcgatcgaggcggcggaggaagcgcgctccggatttggcgagcgacttcggacactacgcatactggatcccgcctgcggatcgggaaatttcctctacctagctctgcaaggggtcaaggacatcgaaaaccgcgtcaacctcgaatgcgagatgctcggcctgcatccgcgactgccgctcgtcgggccggaaatcctgcgtggcatcgaaatcaacgccatggcagctgaactggcgcgcacgacgatctggatcggggatatccaatggcggctgcgcaacgggattcattcgaaaagcatccctatcctgcgcaaactcgaagccgtcgaaacggcaaatgcgttgatcgcagaggcgccgggacgtttcggcaattccaatcagaccgcggaaaacagagaacttgatctggggtcggcgacaacgggccgtgatggaaccgaagcggtttggccccaagccgaattcatcgtcgggaatccgccctttcttggcgccaaacttctgcgtcagaatcttggcgacgagaccgttgagatgttgttcggcatctatgacgggcgtgtgccgcgggaggcggatctagtgtgctactggttcgagaaggcgctcgcggccatcgaatccggtcgctccagccgtgtcggactcgtcaccaccaattcgatccgcggtggcgccaaccgcaaggttctcgaccgcatcggtgcgcgaagtcgtattttcgaagcctggagcgaccagccatgggtggtcgacggtgccgccgtgcgcgtctcgctcgtttgctttggtaagggcgacgatgcgctgcgattgaatggccaggatgtgatcgcgatcaacgcggaccttacggcgggagcgacggatctaactcgtgcccggaggctgacggaaaatctcggtattgctttcatgggagatacgaagggcggcgccttcgacgtgacgggcacgctggcgcgtgcatggctgaagctgccactcaatccgaacggccggcccaatgcggatgtactgcgtccctggcgcaacggcatggatgtgacgcgccgcgcgcgggacatgtggatcgtcgatttcggctggaaaatgtcggagcgggatgcctcgctctacgaggaaccgtttcaatacattaaggaacatgtgttgccggagcgagagacgaaccggcgagatgcttatcgggagaggtggtggcggcatgtcgagccgcggccagcgatgctggcgaaattgtctatgtcgaagcgttacatcctgaccccgcgtgttgcgaagtatcgggttttcatctggatggactatggcgtgttggctgatagcgcagcgatcgcgatcgctcgtgatgatgacagtactttcggcattcttcattcccgctttcatgaagtttggtctgtccgattgggaacatcgctcggtgttggcaatgacccccgttatacgcctacgactacgttcgaaacctttcctttccccgaaggcctaacgcccgatattccgtacgtgcgctacgcgcgtgacccccgtgccgttgccatcgccgaggcggcccggcggcttgatgcgcttcgaaatgcctggctcaatccggccgatctggttgtcgtcgagcccgaagtcgtggccggctatccagaccggattctcccgaaggatgctaccgccgcagcggcgttgcgcgagcggacgctgaccaacctttacaatcagagcccacaatggctgatggatgcgcatcgtgacctcgatgcagcagtcgctgcggcctatgggtggccggccgacatttccgaggaagacgccctggcaaaattgcttgagctcaacctttcacgcccggcggcaaaagccgcaagtgctcgggagcggtcagccaggaaaaacacaaggcataaaacaccggaacaacggcgagcagagccggagtttctgttaccgctttcaggtgggcaattgcaggcaggggcgaatccgtccgctgctcagagcaaggaggaggaacaggttgaaggtagcagtggaccggagaatcttcgccgtccggcatgacaggagcgatgatgggtgggtgcgatgaaaattccagataggaatctccccgataccgtttccaatatcggggataatccttcagtggaataccactttgccgtggcttccctaccgatttcccgcaatcatttagcgatctcgcctcgcgcatgtcaatcgaattcaactgatttttgcaaattgggggtgcctgtgcgtgtactggggcttgatgtcggcattgcgtcggtcggctggtcgatcatcgatattgtgtccgattcgcgttccggaacagttgtagccgccggcgtctggatgttcgaaccgccggaggagaagggacagaccggatcgaagctgaagacggagataaggcgcatcgcccgagggcagcggcgtgtgataaagcgacgccgccagcggatgaatgacgttcggcggattttcgcggacgccgggttattgccggacgctggtaaacacgctcttgccatacccggtgccgatccttggaagctcaggcggcgtggtctcgatcacgcgctgacggcggctgaatttgcaatcgcgctcggccacatcgcccggcatcgcggcttcaaatccaatgccaaaggcgagaagaagaacacgagcggcgaggacggcaagatgaaggccgcaagcgaaaagacggaggagaagcttgcacggtatgcaacgcctgcggtcatgcttgctgaagacgggggctatatcctgcgcgaaacgccccgaaaagacggcagttgcgaacaggttcggcggttccgcaatcgcgagggcgactacagccgttccctcctgcgtgatgatcttgtctcggaaacccggcaattgttgaaggcacagcggcggctggggcgagattttgcgacagaagctttggagaaggcgttctgcgacattgcgttttttcagcgtcctctccaggacagcgagatccttctcggagactgccctttcgaacgcgatgagaaacgcgttgcgcgccgagcgccatccttcgagctttttcgttttctctcgcggctcaatacgctgtccctgatcgaaggttcccgtcagtcacgccgattgagcgtggaggagatcggcaaggcggcagccgacttcggagcaacgggaaaggtgagttttgcatccctgcgcagcaagatcggcttgtcccaggacgttcgctttaatggcgtaaagcccgacgaggaaagcaagcgtgacgtcgttgctcgttcaggagatgcggccgccggcacggcgaaactgcgcaaactgattgctgggcaccatggggaaatgacttggcaggctctctggcagaaaccggaactgctcgatcggatcgtgcaggtcgtgacttttcgcgacgacatggatcggatcaggcttggtctggcggagatcgatctcgacccggccattcgcgagacgctcatagaggcagccgatgacggcgaattcgacggtttcagcggtgccgggcatatttcggccaaggcggcgagggctatcattccggggctgctgcaagggctgacctatgacaaggcgtgtgccctcgtcggttatgaccatacggccagccgcgagcgccatgccttcgacctgaaggatgccgatggaaagcctgttttcggcaaacaggccttgggacgcatcttgaaggaagagcgggtttccacctccttgattggcagtccgacggcgcgcaaggcgatcatcgaggcgttgaagcaggtgaaagcattggtggaagcgttcggtcccccggatcgtatccacatcgaaatggcccgcgacgtcggcaagtcgatcgaagagcgcggcaagatcgatcgtggcattgaaaagcgcaacaggcagagggagaaaattcgcgaggattttgccgagaaactggggcgccttccgctcgacagtgcgcggggtgtcgaggaattgctgcgcttcgagctttggtgccagcagaatggtcggtgcctttatacggatgagtatatttcccccgagcgtctcctcgacggcaacaatacggttcaggtcgaccatatcctgccgtggggccggtttggcgacgacagtttccataacaagacgctatgcacggcaaaagctaaccaggacaaaagggggcgaacgcccttcgagtggttcctggaggagaagacgccggcggcgtgggacgccttcgaggcaaggcttcgcgaactcccctatatgaaaggcttgaagcgccggaactattcgctgcgcaatgctgccgaggtgcaggagcgcttccgcaacagcaacctcaacgatacacgctgggcctgccgggttctggcggaggccctgaaacaggtgctgccggatgaacgagacgacaagggcgatcttcgccgccgtgtttttgctcggcccggtgcgttgaccgacaggctgcgccgagcctggggcctgcagtgggtgaagaaggacaaggacggcaaccgtctgcccgacgatcggcaccacgcattggatgccatcgtcgtcgcggccaccacggaatccctgctgaatcgggcgacacgggaaatccaggaactcgagcggcagggcaacaagaatggcgacttgctcaagaacatcaattcgccatggccgggcttccgcgatgagaccttggaacgggtcggaggggcgtttgtcgcgagggcgccacggcaccgcgcgcgcggcaaggcgcatgatgcgaccattctccaggtcgttgaaaagaatggtgagaaagtgacttatgcccgaaaagacatcgacaaactgacgatggccgacctcgacaaggtcaaggacccggagaggaacgcggccaatatcgccagcctgcgggactggatcgttgccggcaagcctaaggaagcagaacatctgccgaaatcgcccaagggcgatccgattggaaagatccgcgttcaaagcaaggccaaggttaacgtgctgctctaccgcggcggccataacaatccaccgggaacggtggatcgcggtgatatggtccgtgtcgatgtattccgcaaggccaatgccaaagggatctggcaatattatctggttccgatctatccgcacgatatcgcgatgctggatagtccaccaatgcgggcggtgacggccaacaagccggaagaagaatggcctattatcgatccaacctacgaattcatgtggccgctggtgccaatgactttgcttaaggtaatcgacaagaacggcacgatcttctttcccgatcagatggacggaaacctcggttactttcgtggtctcgaccgcaataccggtgcgatcattttatccagtatcgtcgaccagacgaatatccgcaaaggcattggcgcaagaaccctcgataccctgcaaaagatgacggtcgatcgccttgggcggacattcgaggtggcaaaggaaacccggacatggcgtggaaaggcgtgcatataagccgtccttcacggcttaatacggcagatgggcaacttgttgtcgcacaagacgatggcgaggcgcgcatcccgctggaggatttggcttatattgttctcgatgcgccgcacgcgacgctgacatccaccctgctttccgcctgcatggagagcggtatcgtcatcgtatcgagcgataagcgccacacgcccaacgggttgatgcttccctttctgcagcaccatcgtcaagcgggtgtcgcagcagcgcagatcgctctgtccgaaccattcaagaagcggtgctggcagaaaatcatcgtccagaagatcgaaaatcaggcccgccatctcatcatcaccggccgggatggcagcactcttctggccatgggcaggcgggtcggttccggagatccgcaaaatctggaggcccgtgccgctcgggaatattgggggcaactctttgaaggttttatccgcgacgatcctgctgatttgcgcaacaaattgctgaactatggctatgccgtagcgcgggccggcatcgcccgcgcgcttgtatcctatggactactgcctaacttcggcgtcggccatgcgagcgtcacaaatgctttcaatcttgcggatgacattttcgaacccttccgtccgcttgttgaccgtctcgcctataggctctgtgaaggacgctctcgtgaagaggatctgacggtcgaggaccgacgcgccatggccggcattcttatgatggatgcaagggtcgtcggcgaaaaggtgagtctgctggtggctacggaaaaggcggccgaaagctttgtgcgctgtgtggatcacggtacgcctgcgctgctggcgcttccaacattcgtcgatgaaggcttcgtttcatgaaagccgaggaggttcgctacatgtggcttttcgtattcttcgaccttcccgtcggcacgaaggtggaacggcgcacggccactcgctttcgaaaattcctcaaggacgatggctttatcatgctgcaattgtcggtttatgcccgtgttattcggggcgaagaagctgtggataagcatgtaagccgcgtcgtaaaaagcatcccggcaaagggaagtgtgcgtacgctgtccgtaaccgagaggcaatatgcgcgaatgaggctattgattggcgaatcatcaaaaactgaaaaagctgcacctcaacagcttgttctcctctgatttccgtcccgaagaaggacgaaaatcagagttgaaacaatcatttatcgccaaggtagcctaccactgggaaatcggtagggaaaccacggccagcgcgtcaacgatgacgacattgcgcacagcctaccactgggaaatcggtagggaaaccacggccgtcaggaaggcatggcgctcctgcaggctagcctaccactgggaaatcggtagggaaaccacggccaaacttcgcggttctctcggtaactccacagcctaccactgggaaatcggtagggaaaccacggcggctcttcgaacggcttcaatatcggctcaagcctaccactgggaaatcggtagggaaaccacggcgcgcggcggtacgttgcgaggtcaactcggagcctaccactgggaaatcggtagggaaaccacggcacgtgcccgcgccgatgatagttgaagttgagcctaccactgggaaatcggtagggaaaccacggcctcgtacatggcattcatcgtcaacgcgccagcctaccactgggaaatcggtagggaaaccacggccttgtcgcggctacgaccatcgtcatgcagagcctaccactgggaaatcggtagggaaaccacggcttcgagattatctattcgggaaacaagttaagcctaccactgggaaatcggtagggaaaccacggcgacaccgcgtgtgtgcccgtagccgaccgtagcctaccactgggaaatcggtagggaaaccacggcccgaccatcaataggtaacttgctataaccagcctaccactgggaaatcggtagggaaaccacggcctatatcacgaaggggaatgatgagatgaaagcctaccactgggaaatcggtagggaaaccacggccgtcctcaagatcgatagcgccctccatagagcctaccactgggaaatcggtagggaaaccacggctgccggcgacggcctatcaggtgcgcggcaagcctaccactgggaaatcggtagggaaaccacggcttcaccgttgacggtcagaaggacgcgcccagcctaccactgggaaatcggtagggaaaccacggccatgtctcagatgggtatcagccgtgaggaagcctaccactgggaaatcggtagggaaaccacggcgccagttttcgttggaaagaagtgttcgccagcctaccactgggaaatcggtagggaaaccacggcatgacagtctatcgattcaccatgtctgatagcctaccactgggaaatcggtagggaaaccacggcgcaaatatgagcgccaattccaaggaacgtagcctaccactgggaaatcggtagggaaaccacggctggaaaatataaccctcttgaggatagtagagcctaccactgggaaatcggtagggaaaccacggcaaccagaagctgctctggtcgcaccctgaaagcctaccactgggaaatcggtagggaaaccacggcaggcgatggcgtcggggcaacgcgcggtacagcctaccactgggaaatcggtagggaaaccacggcctgatcggcatgatatggcaaccaacggtgagcctaccactgggaaatcggtagggaaaccacggcccattcaacgacggtcagcacggacccatcagcctaccactgggaaatcggtagggaaaccacggccggacaaggcggctaatatcaccggcacggagcctaccactgggaaatcggtagggaaaccacggcctccttctgcgccgcctcctgaagcgatgaagcctaccactgggaaatcggtagggaaaccacggccgaggaccattacgggatatcgccgggcatagcctaccactgggaaatcggtagggaaaccacggcagattgaatagccccgagtttcgt

SEQ ID NO: 457 - DNA, 15134 bp, synthetic construct
  misc_feature 1..15134: note = Synthetic
  source 1..15134: mol_type = other DNA
ggatgcgagcacgccgttattgatccagtcggtgatcagattcaccgcctcccggcgatccacgccgtattggcgaatgaggtatgcgccgaggtatcgagattgagattgggcggatgaagagaaggctgcgcccgtgtcaaaccgacgctgaacttctttcagcacctcccgcgcctgctcgatcttgaagttggaggctctggttttcgaggcgtcgatcccgatttcgacctgcttcagcaagccgctatcttcccgcaaataaacatgtgtggagtggtcggtttcgtcgttggatttgacgacggcgccacaaacaatccgaccgcgttcaaatgcgatcgcaagcttgtcgcaaatcggagacgcagcctcttcatcgagtttccacagcgcgtaggccagccttgcgccatcgacgagcgcggttgtgccacggatcgcttcccgcgcatcatcgccattagaaatacgcagcatgccatccttgcgcatgtgatgggtcaggagaaccgtcgcacctgtagacgccgccaattccgctatagccgaccacaggaattgagcggcggcgggatcggcgttaacatcggccagagcgaaagcctgaagcggatcgatcacgacgaggcgtaaatcttcgattgctgtcagctggcgtttcatctcctgaaagaagggcgtgcgaatgaattttttgccgtcgctcgcaatcagcggctgagttccgccggcatcagacattggcaggacgatcaggcgtttgggatgtctcagccgccgcgattgcgggtctatcctgttcagacgacggtgaatggcgtcgaagctgtcttcggctgtgaggatgaccgccgcgccttgaacggcgatcctcccgccaagaacgagcacatgctgttcgaaccctgcgatgccggctgcgatattcagcgcgagatcgagtgcgaggaagctttttccaaggccgcccattgcggcgaggatcgccgggacgccaagcgggatgacgcctttgcacaaccagacgattgggcgcgcctcgccagcgtaacggtcggcggtccagtccatcaaattgatgactggggtggcgtttttttcgtcgatcgagatgatcggatttggcgcgttccatttggcgcgaccgccggcgatcatggtggtcacgtcgcgtcgggtctgcgcggcggtgtagccaggcaaggtcatggattgggcggcggcgttgatctccgtatcgctccagccgcgcgagacccaatgaccaacaaggcgcagcatgttgtcgtgccaatgatcgccggcacgaatgcgcgtgatgcaggcgtcgaccgagacgccattggtcccgatgtggaggtcgctgccgatagcagcttgcatcggcgcctcaatggtcccagacgcgggcgcgggagcggcatgatcggttatcggcgcggacaagatatgatctatggccgagatattgtcctggcccgccgcctgtggcgttatggtctgtgtccgtgatgcagtgacacccgaacgcgccggcgccagttccggctgcgtgataggaaaagcctcggcgattctttgcgggctatatgctgtgggtccgcctgacttgttttcgtaaaactccgtcagttcaagaatgcgccccttcttgcgtggccacgcaatcgatccgccaagccgcatgacgcggcctggattgacgaccgtcacatcgccgcccagcgccagcgccagtgcactgttctggacgcggcatagattgggatctgtaacgggacgatcgatacgccaaaggatctgcgcgcgcggatgcggcgtgtggccggtgaagatgacggccgtcggcgggcagccgcgcgcgcgatatttttgggccgcctcgcgcacgatatcgtcgtcgatatcgacatagaaggcagtgagggcgtaaaaatccttgtcgctcccccggccaaagggcgcggtatcgggatggcgaagggcctgaccgatgtaaacattctggccgggcttgctgttctcagtgacggcgcgcgccagaagcttgtccagcgtggcgatggtgaagatttcggcgtggctcagacgaccgtcgcgaccgtctgtccatgccagttcgaccctggcgtcgtcataggcgatgtcgagcccgccgaagagatgctgcaggtgccggcgcatcgcttcgacgttcggctccagcaggggcgcaacagtcgtcgtttccatcgcgggctcgcggcgggatcagggtaaatgggagagcagaagctctcccggttttgcgaaaaggatcagaacatcgtttccgacaacggcgctgtcgcggctactgacggcgcgggcggcgcgacatgctgcgcgggcgattttgccggcgtttgtgtcggaccgccgcgccagacctcttccgcctcaaccggggtgacgtcagggagatcgttcggacgatcgacccactgcacgatgacgagctttgggcgatagttcgtcccatgcttgtctttcatcggctcgacgctgtcgcagcgaatgaccggcaactttccgcgattattgccgcgcccggcttcccattcggcgtagacatccttgaaggcattggcgagatggatggagttgccgccaaactccgccgcgccgccaaaaaacctggcgctgaacaccatcatcacaaagccgcgcttgaagccttcgcccggcgagggcgccggcgtctgcagatcgggatcgaagcgacgctgcggcgcctgtccttcctgatatttcatccagcccgtagcgatattatccatgtcggcgacaaatccgagcggcatcgggatttccttgtcgccgtcgctatcgtgcaggaaccatcgtccggcttttgcattgtattttatgaatgttttgaagacgccgctggcgccgatattgagacccatgtccattctccttttgatgctggatcagaagccgaaaaccgttgcgccattggcgcgtgtcgtgggattgctccagtagaaagactcataatcgggaacgagcaggctgctcagttcatgcgggtcgcaggagagacccaaaaatcgttccagacgtagcgcgatctcccgcaacgctgtgacctgctgatcgatctcgctgcgggaaagttcatagacgcagaccgcgcgaccatctttcttgctggcggtcggtttgacgtaggcgaagcgcatcccgtaattgccgtgcgcgcgagcgtagatggcgccctggcgcgcatgcgcggcagagatggcggcaggcaaacgctcactggtttttaggtcgacgatcagaccatgctgatcgaaacgccagtcgatgaagccgatcaccgggaccggcacatcgtcgagacgatattcaacgcggtcctggtaagcggtcggcgcgccatattggcgaagctcgacaagcgcatggtcgacatagcccgggatctgcgcgcgttcactctcgcgtttctcgtcggggatcagcgccatctctttgtcataggcggagagcgccagcgccgcgcagtcctttggcgtcttcaacgggtcgatcagtccggcgtgcacgccttcctcgaccgccttgccgcgcgccatcatggcgttgccggggctgcggcggccgagcaatcgctccatcacccaaagcgccggagaggatgcgtagagattgagcgaggaggccgagaggtgatgtacgccatgcgtctcgaaagcgttcatcgcgtcctccgcttgatatggatggatgctcgcaccatcagataaatgtaatcctcttcgccgagacggcgctggacgagatgaaccagtccgttttcctcctcagtcagcgcacgtttggcgatggcgatcaggcggcggcgcttgtgatctggatgcacgcgggtggattcgcagcgatcataggcaagatggccacgataataggcggcggcagcgccgggctcggcgtcaagaatccagtcaacgaagccattgtcatcgaatggaatgctggcgtagtcgatgtttatggaaatggatgctctcaccttgaaaaacctttcccgttcgtccgaaagcgcgggcttccgggcgtcaaacttcagcgatgtcggcgatgtgggcgaagccggtttttaaggccgctctacaccctgctatgaaggtagcgatttagcctctggattttcccaggaggtctaacatcgcttcttccttctcttcttcacgcaacgccacgatccgatcttcggattttccttgaggcacggttccggctggaacatcgccccatacaaagaaggtagggatcaaggcgtcgttttttcccgggaggtcttagatcttcgacaacaggcgatgcggcgcgagcgacagggagatgaggcgcagacgtaattcccggagtcgtcggtaaaactcgctcgtggacaagccggtcgcacgctgcgcctcggccagatcgccgtcagcctcaagcgcaagttcagcgacaatgcgtaattccggcggaagccgccggatcgtcatgccaagaaaaaagcgaaataaatgatcgctttctgtctggcaggcgtcgtcgggatgcatgtcttgtgcaagggtgtcgccatcctcacccacaaaatagcgatcatcatgatcgctatcgaacatccgcccctcggccgcgagccggtcggcgatctgttgggcgccctggcgcgcgaccatcaggacaaaagccgtccatggaccacggtggggatcgaagtaacgtcggcgctcgatcaggatgagaaggatttcctgttcgatgtcctcgacgagactttggtcgagacgcagctttcgaacaatccgccgcgcctgaaagtcggcagcaagcatcatgacatgcaagtcgcgcgggccgatttgcggctcacgccaatcgtcgtcttcccaaagcgccagcgccatcgaaaatctccaaaaacaatcgcccgatcgaaaaaaacaaacctctcctcttcgcggaatcgcttccgcttcgaagagccctgatttatgaaaaggcgcttggctttaggcggcggagcgggtcctgaactcccgatagactgaaatggccatctcgagattttcctgaatgtccggcggcaggcgctgcgcctcaaggaaggcccgatccgtcgacaggccaagttccttgcaggccgcgatgatcaacgtgtcttttggagcccgctcgagaccccgctcgatgcgcgaccagtagggcgtcgagatactgatgcgccgcgataggtccttcagcgaaacgccagctttctcgcgctcttcgcggatccagtttccaaaggccatagtcttgttccttgattatgaagggaatggatttcagaggggtgcacggctgcgcagcaggtcgtaacgctcaagccgcacgcgcataaaactttgggagacgccgtaaagctcggccagtgagaacacggcttcctgcacggcgtcggcgtcctgaaggtcattatcgtaagccgccgcgccccggatcatcgcggagggatagcgcgagggttgcagacgatgtcgccgcgccgcgcgcatgaagtcgacgcgaaccagcgccggcggaaccaggagcccgcccatgaactcattggcgcgcacctcgcgcgggtcgtatttagcggcgtgggtttgctcgccgccgaaaaaggctggcgcgggcgcaggtccaagccgaatccagcgcggcgcatcgaaaatcacatggccaagttcatgtgcaatcgtcgagcgcagcaaataatcgaggcttgagagtttcggcccgttgatggcgaccatcacgcaatctggaacgctctcgtcatattcggtaacgcccatcaccggcttgcgggcggggtttaaaacttcatgctcgaggtcccaagccacgccgaaggatacgccgttgacgttcacctgcgcgacctgctcctcgatccctgagaagtcgagcgcgcgggtaagggaatcggagacgagctgagcccgcacatcgcgtccaaccgcccatatttcctgagaattgagctgttccggctccgccgagaaaggcgaatggcggtagctggcgacaatctccgacatgatggctgctcctaagatgttctatatttgttctcacatcgccagaggcttgtcgagagggattttgcggtaacgcaaccgcgttttttaaccctttgacgtcaggggagaaaggctctctgaatttcgaagtggagatagatcgcgtggcctctaaacctccagatgagcgtcagtgttggatattcgggaaaggagtttgtcgacgaaagcggccatcaggtgctgaatgagattgtataaaatgattggcagcatgaccccagggtgatcagcaagggtcagcgaggcaagcaccagacccgcgccattgttgttcatgccaaggccaaacataagcgacgctgttcccgagcgatccacgccaaaagcgcgagcaatcaggtagcccgagccaaacatgattaggcatagcaggccgacaatgatgatcatgatcgcgatgaagtccaggtccggcgaggtgaacatggtcggtagactgatcgaagcgtttgagtaattgagtaaaagcagaattatggagttcgcaaactttaaatatggcgacgccaacgctgcggattttgcgccaatagcccaacctgatgctattcccatgatcgaaggaaggataacccaggcgccgaggaaaccgattgcgccatgcgctgcgatctcatggagatcctccgaataatccccgctggtaaacaagcctccagtatgcagggcaagaggcgtcagggctgggctcagtagagtcgtcatgaggacgagacccaaactcaatgcgagatttccatttacattttgggaccatgccgtagacgcgcccgcgattggcatggacgcaatgagcgcgagcccggtgaggatttgctggacttcgtccgggttgtgccaaagcttcattgtgaagctaatgatagcgatgaaagctagtgggacactcaaattcccaaggaatccaactaggagaaggcgtgagtaatgcagcagatccttcagttcactcgtcttgagtcctattcctgcattgaataggagaaggccgagaaggataggcgggagcgagaagtgtaaatctgcgccaaatagatgagcagttccgaaattaacctcgcggatccaaagcccaggctgtggaaagaatacagccacaacatatgatgtgatcaccatccatataaaatacttatgaatggcatgttggatgtgtgcaatcgtgcggctcacattgatgctcatctgtttccggcgtctgaaattagcgattggatcttcttgatacacgcaaatccaacagttttcgatgatttccgcttggattaggtcgggatgctagccccttgggaaaatcagcgggttcatctcctaccttcaggatatgaacccgcttcatcccgatcatctcagcgccgccgagcgtcttgcagaagtccgccaaatcctcgcggcgggtctcgttcggctacgggccaaacagtcaactcataaatctgcggactatagagaaagttccctcgccttagagccaaaacagagccgtcatgcgaaccgcaactcacggagattgcgatgacacaatcggttctaaagcgcctcgcggcgctgaaaactctaccaacggcggatttgaaaaatcaatggcgagagctgttggagaccgaaccgccgactttcaatcgcgcctatctcgaaagcaggctcgcttaccgtattcaggaactggcctacggcggcctgaaaccccatacgctcgcacggattgaagccctcggcgaacagctcgagcgcggcaagggggcggttcgaaaggggaaattgaacgatcgcccgatcgtcggcacgcgtctcatccgcgaatatgaagggatcgaacactgcgtcactgtgcgtgccgataatttcgaatatcagggccgaccctataaatccttgtcagctatcgcgcgcgccatcaccggcacgcagtggaacgggcgcgttttcttcggtttgaagagccagcggaaagcctcatgatgaagccaaccatccgaaaattgcgatgcgcggtctataccagaaaatcgaccgacgaagggctggatcaagattttaacagcctcgacgcccagcgcgaatcctgcgaggcgttcattgtcagccagaaggctgaaggctggacacttgtgcgcgaccgctacgacgatggcgggttttctggcggtacgctggagcggccggcgctgaaacgcttgctggccgatgttgacgctggcaggatcgatgtgatcgtcgtctataaaatcgatcgcctgtcgcgatcgctgatggacttcagcaaactggtcgaaaccttcgaccggggcaatgtgacctttgtcagcgtcacacaatcgttcaacacgacaaccagtatgggacgtctgacgctcaacatactattgtccttcgcacagttcgagcgcgaggtgatcggcgaacgcatcagggataaattcgcagcctcccgcaagcgcggcatgtggatgggtggcgtcgtgccgctcggctacgacgtccgggatcgcaagctctggatcaacgagccggaagccgagaccgtgcgcatgatctttcgccgcttcatcgcgctgggctcggccatcgtgctggtgcaggagctgaagcagaaagaaattcataaccggcagggcaagccgatcgacaaatgctttctctaccgcctcctcaacaaccgcatctacatcggcgaggccgttcacaagggcgaagcctacaagggggaacatgaaccgatcatcgacgccgaaacatggcgcaaggtccacgcaatcctgaatgaaccgccgcgccagcgcgcagcccggacccgggcacaaacgccggcgctactcaagggactgatctatggccccgacggtcgcgccctgtcaccatcccacacgcgcaagggcgggcgtctctaccgctactatgtcagccagacggttacgaaaggcggcgccaatggcgcactgtgggcgcgtgtgccagccggggacgtcgaggccgtcgtcgtcgaacagttgcgcgaaatcctgcgcgccccggagatgatcattggcgcatggcgggctgcacaagaggaggagcctgacctgacggagcgcgaggcccgcgacgcgctcgttaggctggacccattgtggaatgagctattcccgtccgagcaggccagaatcgtccagctgctggtcgagcgggtcgatatctcaaccgaaggggttcggatcaaaatccggaaagacggtctcgaagggctggtcgatgaactctccgccatcgccgccgagccgcgcccaggaaagaaagccgcatgacccgcaagatcgtcgccgacgacgcccgcacggtcaccgtttatatcccgtggcggctgaaaaagcgtggcggtcggaaactggtcctggcctcggacgggtcgccggtcgcgccgaccgatgcgccacgcatcgaaaacgccatgatcaaggttctcgtgcgcgccttccggtggcggaagctactggattctggcgcatacgccttggtcggcgaactggcgctagcggaggggatcgacccctcctatctcgggcgcgccctgaggttaacgctgctcgctcccgatatcgtcgaggcaattcttgacgacaggttgccggagaatgtgggggtggcggagatcttggggccgtggccagcggagtggggcggacagcattacgagttacaaaaatataggaatccccctgctgcagttaagcagcaggggtaatccttcagtggtttctacgaaaccactttgccgtggcttcccttccgatttcccaagaaccataaaagcatcttggccttttctcgtcaatcagctttgataagtttgtttcaatacagcaaaggagccgtcgatgcgggtactaggccttgacggaggaattgcctcaattggttgggctttaattgagatcagtgccgccgacggtgcgtcagatggtcgaatcatcgatgccggcacatggatgtttgacgcccccgaggaaaagagccaaacaggcacaaaactcaaatcggaactgcgtcgtcagtttcgcggccaacgccgtgttgtccgccggcgtcgtcaacgcatgaatgaagtgcgccgcatactgcacaatcacggcttgctgcagaccgctgatcgtgacgcgctgaagcaaccgggcctcgatccgtggaagatacgggccgatggtcttgatcgcttgctaacgcctgtcgaactcgccgtagctctcggccacattgcccgccatcgcggctttaaatcaaattctaagggcgaaaaatccaatgaggccgatgacacttcgaaaatgaagaaggctgttggcgagacacgcgaaaaactcgcgcgttatggatcggccgcgaagatgctcgtcgaagacgaggcatacatcatgcgcaaaacgacgatgaagaccggcaaacaggatgttgtgcgccgcttccgtaatcgtgaaggtgattattcacgctcattacttcgtgacgacctcgcagcagaagtccgcatgctcttcagcgcgcaggcacgactgcagtcaccggtggcaacaccaggactggaaaaagccttcaccgagacggcgttcttccagcgtcctttgcaggacagcgaaaatctcgttggctcttgctcattcgagcccaccgagaagcgcgcgcctaagcgcggatattcgttcgagttattccggctcctgtcacgcctgaaccatctcaccctgcgtgacggaagcgacgagcgcactcttaccgttgacgaacttgcgaatgccacggctgaattcggcgtaacagcgaaattcagtttttcggcactacgcaagaaactggcactgcccgtttcaacgaacttcgttggcgtgaaggctgaggaagagggcaaacttgatgtcgtcgcgcgttcgggtgagacagccgccggtacggcgcgcctacgccgtgtcgtcatcgaagcacttggagatcttgcgtggggagcgttggtcaatcatccggatcggctcgacaagattgctgagatcatctcttttcgtaacgaccttaaccgtattcgcgagggcctgactgaggcgtcgtttgaaccagcaatcgtcgacgcgctcgttttagcggctactaatagcaagctcgacgtttttaccggtgccggtcacatatcctcgaaggcggcgcgcaacatcatccccggcctgcttactggcatgacctacgacaaggcctgcgcggcggcaagttacgatcacacgtcgagccgcgagcgcgatgccttcgacgtaggcgtatacggcaaggaggcgctgaagcggatccttgccgaggagcgcatcgaccgaactttggttggtagcccgacggtgcggaaggctctgatagaggcattgaagcaagtgaaggcgatcgttgataaatacggcaagccggaccggattcatgtcgagttggctcgcgacgtcggcaagtcgattgaggagcgacgcgagatcgaaacaggtattgaaaagcgcaacaagcagaaagacagactacgcgacctgttcgccaaagaagtcggccggcatcctcaggatggcaaccgtggcaaggaggagttgctgcggttcgagctgtggaacgaacagatgggtcggtgtctatacacggatgtatatatcagtcccacacagctcgtcgcgacagacaattcaatacaagttgatcatatcctgccgtggagtcgcttcggagacgactcctacctaaacaaaactctttgtacgaccaaggccaatcaagaaaagaagggtcgcaccccttatgaatggttcaaagccgacaagagcgaagcggattgggatgccttcctcgcgcgcgttgaggcggtccaatatatgaagggcctaaagcggcggaactacaagcttaagaacgctgtagaagctgccgagcgatttagaaaccgcaatttgaacgacactcgttggacgtgccgcctgctagcggaggcacttaaacaactatatccgaagggcgaaaagaacgatagaggggtcgaggcccggcgcatcttcacgcgacccggcgctctgaccgatcgactgcgccgcgcttggggtttgcaggggttcaagaaaaacgaaaagggcgagcgcatccctgatgatcggcaccacgcgctggacgccatcgtcttggctgcgacaacagaggccttgctgcatcgcgccacaggcgaggtgcaggaaattgaacgcaaaggcctgccctacgacctcacaaagaacattacgccgccatggccaaatttccgtcaagacgcactggagatggtcgaacgcgtcttcgtcgcacgcgccgaacggcgccgcgccaggggcaaagcgcatgacgcaactgtccgccatatcgcggtacgtgagggcgaaaagaaggtatacgaacgcaaaaaggtgacggacctaaaactagccgaccttactcgagtaaaggaccaagaacgtaacgcgccacttattgaaagtctacgcaagtggattatagcaggaaatccgaaagattcgccgccgctctcgccgaagggcgacccgatctcgaaggtgcgactggttaccaagagcaaggtaaacatcactttcgataccggcaatccggatcgcctcgctaccgtggatcgtggagagatggcgcgtgttgatgtgttcagaaaggccaataaaagagggaaattcgagttttacctcgtgcccatctatccacatgaaatcgcgatgatggaagctccgccaatgcgtgcggccgcatcgtcatcgccagaggaaaactggccatatctagacaattctttcgagttcctctggtcgattacgccaatgtcatatattgaggtcattaagaaaagtggtgaaattgtcgaaggctattatcggagcatgaatcgttggactgcaagtgtatcagtctcgcagcatgcaaatgcaacttctatagtcgaaggaataggagtgaagaccttaacttcattaaagaagttcacagtggatcgtctgggtcgcaaatttgaagttgagaaagagctacgtacttggcgtggtgagacatggcttggaaaggattgcacctgagccgaccggcgcggcttagtgtttccgacaatcagatcgttgtcgaacaggatgacagcgaggtgcgcttagcgctcgaagacgtcgcctatgtcatcctcgatgttccgcacgcaacgctgacctcgtcattgatagcagcctgcatggaggcaggcgttgttatcatttcagtcgacgtgcgccacacgcctattggtgtaactctgccctttcattcgcatcacaaacaggccggcgttgccgccaaacagatttcactgggtgagcctttcaaaaagcgctgctggcagcggatcgttgttgccaagattaataatcaggcagcgcatctcgaaagcctaaacaaaaacgccgaagcgctgcgagccttagcgaaacgcgtgaactctggtgacccaaataatattgaggcgcaggctgcgcgcgactactggcgcactctattcactggcttcactcgggactcagcaaatgatctacgcaacaaaatcatgaattacggctatgccgtcgcgcgctctggtgttgcccgtgcactcgtcgcctatggcctattacctgcattcggcttgcatcacgccagcgcaacgaacgctttcaaccttgctgacgatcttctcgagccttttcggcccttcgttgatgcgattgcagcgttgcgcacaaatgaccgcgacaagagtgaggaccttacggtcgacgaccgtcgtgccatggcaggcatgctgctcgctgatgcgcgagttggcgcggaaaaggttagcctgctcgtcgcaaccgaaaagtcagcacaaagtcttgtacaggcaatcgatgcgtcgagtgcagagttgttacaattaccagtattcgtcgcgccgaaaaggtcaccatgaaggcagaagaggtgcgatacatgtggctcttcgttttcttcgatctgccggtaaagacgaagatcgaacggcggcacgcaactcgcttccgaaattttctaaaggacgatggttttctgatgttgcagctttctgtatacgcccgtgtaatgcgtggcgaagaagctgtggaaaaacaccttgggcgcatcacaaagaaccttccacctaagggaagcgtgcgctcactagccatcacggagcggcaatacgcccgcatgaaattactgattggcgaatcaacaaaaaatgaaaaatccgcgcagcaacaactcgtgctactgtgatttcttccccgatagtagggaataaattattttataatcaacgttttacgcgccgtcgagcctaccacagggaaatcggtagggaagccacggcctactggactatcagtggccatggggctctagcctaccacagggaaatcggtagggaagccacggcaacataagtgatcgtcgcgtcgccagaaccagcctaccacagggaaatcggtagggaagccacggcttgacaacttccttcgccaagcggcgagctagcctaccacagggaaatcggtagggaagccacggcgcagtcggaacggtcctgtctaaagctgacagcctaccacagggaaatcggtagggaagccacggccccttaacataccggaagggcggttgcaacagcctaccacagggaaatcggtagggaagccacggctggacgcggaaactatcatgttcagcatgaagcctaccacagggaaatcggtagggaagccacggcagacgccatcttgctgcgcttcgccttcgcagcctaccacagggaaatcggtagggaagccacggcggcagtccagacgttgttggcagcggcgtcagcctaccacagggaaatcggtagggaagccacggccggcgcatcgttcggcgcagaggcgccgtcagcctaccacagggaaatcggtagggaagccacggcaa

SEQ ID NO: 458 - DNA, 11803 bp, synthetic construct
  source 1..11803: mol_type = other DNA
  misc_feature 1..11803: note = Synthetic
gtgaggggtagcggcgcttggggctgcttgcaactaactgaaagtattgcttttcgcggggtcacttcgggctggcggagacggtgggattcgaacccacgatagagtttcccctataacgatttagcaaaccgtcgccttcagcctctcggccacgtctccaccgctgcgcgccctttaagacgcggccgggcctatatgccgtagcgcggcgcgcttttcaagccggggaatttcaacgcgctgaagtttcgacgccctgcgctgcggcgcgcgccgggccggagccttcgtcaaaatggcgcttccttgccggcggccacataggcgtccgcgtcttgcggcagcagcaggcgctccttcaccagccggtcggcgaccgagcgcagcgcgccgacgaaataggcgcgcgagccatagcgctccggcagcgactggcgcggatcgccgctcgcctcgcgcgccgcgcgggatatggggaacggaagtttcgcgccggaggcgcaatcgcccttggtcttgtccttgacggcgttccagccggtgaaggtcgcgatgggcagggcctgatccggcaggcgcaggccgctggactcattgccgtccacgtcgatctttggaacgagacgcgcgccccgcggcggcgcggggaggccggggactttgggccaagccagtgattcggccggcgcgagatcggcgcggcgcgacgccggcggcggcgggccgcccagtaaaaaatcgtcgagcgcgacgagaagcgcgcgccgcgccggttcggcggagcggtcgttgaccggcgccgagcaattggtttccaattcgccagacgccgcgccgccggccagaaagaacacgcgccgattgcccggctcgcccgcgcgcggttccggcgcgcgcgggacggatcgccaataggcgtcggagccgaatatctcgatggtgaaaggcgcgtttttaccgggcggctttgatggcgcggcgtccagcagcaacagcgcgtcgagcaatttctcggcgccttcgcctgcgattcttctcagcagatccccgctttgaccgacgcccgcgccgatcatccgtttggtccgcgaggccgagcgcaatcgcgcgatcgtctcgcgcagcttctccggggcgggggagtccagcgccgcgcccaaaaacaggaccgtcatttttttcgcgcgggcgatttgcaacaaatcgcgcggggcgagcgccgcgagcgaaggctcgtcctcggcgtcgatcagcatggtcccgcccgcgaccgctgggcgccagacgacaagtcgcgcggaagggtctccggcgacatccacgaggtcgcgcgcataaccgtccggcatcgccggcggaggcggggggccgtaaggcgcgacggtctgcgcccacgcgaaatgcacggagagcgaggccagcgcgcaaagcgcgatgacgccgccccgcctcataatttcgcgatgaaattgacgaaggccatcgagccttccggccagggaccatgtccgctcgcgacatttatgtggccggcggctccggcgtccaggaattgcgcgccgagatcggcggccaagtcacgcgcgaagggcgggtcggcgtaaggatcgtccttcgcggcgacgatcaccgcgggaaagccgaggcgcgcgcgcggatagggcaaaaaatccttgtcgacggcggggatttcgcgcagcgcgctctcggacggcggcgcgaccagaaaggcgccggcgatcttatcgccgacccgcgcggcggcgtgaagcagcgcgatcccccccaatgaatgggcgacgataaccggcggacgctccgccgcgagaaccgcgcgctcgatcgtctcccgccatgcgtcgcggcgcggggcgttccagtcctgctggatcacccgccacgccgtggagagtttgttttgccaccggctttgccaatggtcggggccggagtcgctccagcccggcaggatcagaatatcggcttcggcgacgcgcatgtttgttcaaacgtccttcttggccaaaaaatcgccggcgagcgccttggcgatcagcgcctgcgtctccgccacgccataaagcgcgacgaaggagccaaagcgcggtccgcgcttttcgccgagcagcacctcatagagcatgttgaaaaaatcattggagacgccgggccgctccggcgtcgcgtttttggcggcaagatcctgatagcgcgggacggcgcgcgcgacatcgtaaagcgcggtctggatcgtctcggcggtggcgtccgcaggcaacgcgccgagcgtgtccgacagcttcgccagcactccgcgctcgacctcgtcggcggcgcgatattgcttttgcgggcggacgaaatcgcgaaagtaagcaacggcgtagccgacgagcttgtcgaggcgcgggtgattttccgatgaggcctgcggcgcgtagcggcgcaaaaagccccatagcaccgccggatcctcggcgttggcgacggtcgcgagattgagcagcatggcgaaggagacggtcgtgcccttggcgtttccctcgccggggtgatgcagcgtttccggctcgggcggggcgccgttgtgaatgtgccagacgggattgccgagccgctccttccagccctggcgctgataaacctctaaaaaggcgaggtaatcgtcgacattacggggaatgacgtcgaaatgcaggcgcttggccgccgagggcttttggaacatgaactgcgccagcgtctcggggctagcgtaggtcagccactcgtcgatggtcaggccattgcccttcgacttggagattttctggccggcggcgtcgagaaaaagctcgtagttgaagccttccggcggcttgccgccgagcgcgcgcacgatggcgccggacaccttgaccgaatcgatcaagtccttgccggccatttcataatcgacgccgagcgcataccaccgcatcgcccagtcgggcttccactgcaatttgcagtgaccgccggtgacgggcgtggtaaagttctcgccggtctcggggtcgcgccagtcgatcgtaccggcggcggggtcgcgtcctgtcagggcgacctgcatgaccaccccagtgcggggatggatcggcaggaagggcgaatagctcgccgcccgctcctcccggaacgtcggcagcatgatttccatgatggcgtcgtaatgcgcgaggatgcgcaaaagtgcgtcgtcgaagcgccccgatgcgtaataatgcgtggacgaggcgaactcatattcgaagccgaacgcgtcgagaaaagcccgcaaacgcgcgttgttatgggtgccgaagctgtcatattggccgaagggatcgggcacgcgggtgagcggcttgccaagatgcggggcgagcagttccttgttgggaatattgtccggaatcttgcgcaagccgtccatgtcgtcggaaaaggccagcaatttcgtggcgatccgcccttgcgtcaaaacctcgaaggctcgccgcaccatgctggtgcgggcaacttcgccgaatgtgccgatgtgcggcagtccggacggaccgtagcccgtctcgaacagcacatgggtctggccgctggcctcgacgcgcttgaccagctttcgcgcctcctcgaatggccacgcctgcgaaacattcgcggcttcaagcagttcggcgggaaaagcggacgataagccgggggcggactctgagcgggacatttggccaatctgcgcgagggcgggggcgccgcacagtatggaggcctcgcccgtgcgtcaacgccgggcgaggccgaatccacttattgccgcattcccttcgcgagcaaaacgcgctagacgcgcgcttgagattttcgcggcgccgcgaaaagcgggcttgggacgacagcgaggcggaaaatgacgacggagcgcgtgggaactgagcggctggtgacggtgtttggcggctcggggttcgttgggcgtcacgtcgtgggggctctggcgcgcgacggctggcgtgtgcgcgtcgcatgccgtcggcccgatctcgccttcttcctgcaaccgctgggcggtccggggcaggttatgccggtgcaggccaatttgcgcgacgcggcgtcggtggcggcgacgctgcgcgacgccgacgcggcggtcaatctcgtcggcattctcgccgagggcggcaagcagaaattcgcggccattcacgcggaaggcgcccgcgcggtcgcgcaagccgtcaaagccgctggaatcagcaattttgtccatatttcggcgatcggcgccgatgcggggtcggcctcggcctatgcgcggaccaaggcgcaaggggaggcggccgtgttcgaggccgtccccgacgccgtgatcttgcgcccctcggtgatttttgggccggaagacgatttcttaaaccgcttcggaacaatggcgcgatacttcccgatcatccccatcgtcggggcgaagaccaaattccagccggtctatgtcggcgatgtcgcgcgcgccgtcgcgctcgcgctcgctggcaaggctacgaagggcgcgatctacgaactcggcggcccggaggtgaagaccttcgagcagctggtcgattatgttctggctgtcgccgagcgcgaccgccatgtcgccaaactttcgtttggaacgggcaagctggtcgccgcgatcactcagtttttcgccacattgtcgctcgggcttttccctaagctgttgacgatgaccggcgatcaggtcgaactgttaaagcgcgataatgtcgtgtcggaggacgccagggcggcggggcgcaccttgcagggtctggacatcgcgcaaacggcgatagagacggtggcgccctcctatctctatcgctaccgcaagaccggccagtatcaggagcagcgcagctagatcttaccgcggctcggatgagagcatcttgtggacgcgcaccatgaaggccgtgccgaacaggggcgtcagcagattgagccccggcgtcatgacgaaaccggcgatgaacagtcccgcgaaaaaaatcttggcgctgttgtgctggcgcagatcgtccgactccgccggcgagcgaaagcgcgtcgcggcgagcgcgaaatattcgcggccgaacagataggcgttggcgagcaggaaggcgacggcgttgacgcccggcacgaacagcagcaacagcgccagcagattgacgacggcggagaccagcgaaaagcgcagcgtcatcctcaaggcgtcgagcggcggcgcgggcttgccgacgcggccggcgggatagatctcgcgttcgacgtgcgccgcgaggtcgtcgacgaaaaatccggcgaccaggatcgaaatcgggccgatcaagaaggcgagcgccacgagtagccccgcgccggtggcgaaggcgagaattgtccgcagcagcggatgatccaccacggcgaccgacagcgccagtttgtcgagccccgcccaagcgagcgcgagcagcagcagcgtgaggccgaggcttttataaagcacggaccgaaaaggcggcgtgaggatttggcgcaggctggcgagggcggcttcgagcatggggcttcctgtttaggcgtagcccgcgggaaatggcgccgtccgtcggcgagcgcaagagccaatccgggattcttaacgctgcggccagcgcctctatctacgttaaccgagaatccgcgcgttcactttgaatgaaatccattcggagagccacgaatctgaaaaccacgacgcgagggcgcgtaagccctcataaaataagggaatccccccgccgcatctctgtggcgggggtaatccttcagtgatttcatagaaaccactttaccgtggcttcccttccgatttcccaaagggatgtaaacccactaacccttacaggtcaatgggttttaccgaaacgtcggggggagttttgatgcgtgtcttgggtttggacgttggaattgcgtcaatcggctgggcgctcattgaaattgacgacattggcggtgaggagggagcccgaggcgaaattctcgccgccggagtctggaagttcgattcgccggaggaaaaaactcaaaacggctccaggctaaaatccgagatacgccggaatttcaggggtcagcgccgcgtgctgcgtcgccgccgtcagcgcatgaatgaaattcggcgtgtgttcgcgcgccatgaacttttgcctcgcgacgatcgggacgcgctgaaacagccaggcttggacccgtggaaactgagaacggaggcgtttgagcgcgctttgcgcccggtcgaattcgccgtggcgttaggtcatatcgcacggcatcgcggattcaaatcgaacgcgaaggacgtgaaatccgcccaggccgccaacgcgaattcggcgatgagcaaggccttcgccgcgacgaaggacaagctcgcgcgcttccggactccagcgcatatgttatgcgccgacgaaagttttctcgtttcgggcacgagcgtgcgccggttacgcaatcgcgacggcgatcattctcgcacgcagttgcgggaagatctcttgagcgaggccgccgctctctttcgcgcgcaagcccgcctgcgggccgaccacgcgacgacggctttcgagcaggagttcatcaaggcggcgtttttccaacgcccattgcaagacagcgaacacatggtcggccgctgtcctttcgaactcgaccagaagcgttcccccaagcgcggctattcctatgagcgattccgctgtctgtgccgtctgagaaatctcactctggtcgaagggagcgaaacgcgcgccctttcggcgagtgaaatgaacgtggcgatgttggactttggcgcggatgcgaagttcacctatgccgtcttgcgcgagaagctcgcgctgcccgcgtcgatttccttcgctggcgtcgccatcggagaggagaaaaggctggatttcgtcgtgagatcgggagcggccgcggccgggactcacaagttgaggagcctgatcggcgccgcgctaggtgaaacgacttggcgcgacttgctggcgactcccgagcgcttggatcgaatcgccgaagtcgtctcgtttcgaaataggtatgatttgattcgccaagatttgctggcgagcggtttcgacgaggcgctcacgcggacgctcgtgaccgcggcgaaggatggcgggctcgatctcttcgccggagcgggtcatgtttccgcgaaagccgcgcgcaacatcatccccgctttgatgcaaggactgacctatgacagggcctgcgcgcgggcgggatacgatcacaccgcgagtcgcgcgcgacacgccttcgacgtcggggtcttcggcaaggaggcgttggcccggatactctcggaaaagcgtgtttcacgcgaactcgtcgatagtccgaccgcgcgcaaggcgttgatcgaggcgctcaagcaggtcaaggccatcgtcgagacttatggcgttcccgattacattcacgtcgagttggcgcgcgatgtcggcaaatccatcgacgagcgccgcgagatcgcgcgtcgcggcgaggcgcgcggcaggcgtagggatgagctgatagaacggttcacgcgggaaatggggcgggcgccgcgcggcggcggacacgaggagttgacgcgtttcgagctgtggctggagcaagacggacgctgcatctacagcaacgtccgcatcgaggcgtcgcaactcgtggctggcgacaacagcgtgcagatcgatcacatcctgccttggagtcgctttggcgatgattcctattcgaacaagacgctgtgcctgacgcgcgcgaatcaacacaagaaaggccgcacgccgtttgaatggtttcacgtggagagaggtccgaaggaatgggaagccttcatcgcgcgcgtcgattcgctgcggatagacgggttcaagaagcgaaattacaaattgcgcgacgccgaggcggcggcggataaatttcgcgcgcgcaatctcaacgacacgcgttggacaagccgtctcctcgccgaagcgttgaagcagctttatccaggggttgaaaagaacgccgagggcgacgggatgcgccgcgtcttcacgcgtccgggcgcgctgacggaccgcttgcgcaaagccttcggcttgcaatggattaaaaagaacgagaaaggcgaacgaatccgcgacgaccgtcatcacgcgctcgacgcgatcattgtcgcggcgacaaccgaatcgctgctcaacagagcgacgcggcaaattcaaaagaaagagcgtgaagggcgtcctttcgagttgacggagatttgtgcgccctggacgggctttcgcgaagcatgcctcgacgccctggaaatggtgttcgtcgcttgcgccgaacgtaggcgcgctcgcggcaaggctcacgacgcgacgtttcggcaaatcgcgattcgcgacggcgaacggagggcctatgagcgcaagatggtcgcggatatcaagatcgccgacctcgagcgaattaaggatccagatcgcaacatggcgaccgttcgcgccttgcgcgcttggatcgaggcgggcaagcccgcgggagagccgccgcgctcgcccaagggcgatcccatccgcaagattcggctggccgccaagagcaaggtgaatattttgctgaacaccggcaatccaaatcgggccgccgccgttgaccgcggcgacatggcgcgcgtggacgtgttccgcaaacccaacgcgaaaggagtgttccaatatttcctcgtgccgatctatccgcatgaaatcgcgatgctcgccgcgccgccgatgcgcgcggtgcaaggaggaacggaggaagagaattggccgcgaatcgattcgagctatgaattcatgtggtcgatgacgtcgatgacgctgctcgaagtgagcaggtcggacagcgaaattatccgctgctactttcgaagcctcgatcgcaacacgggcgcgttgacggtttcaacggtttcgagcgcgctcccggtgaaaatgagaattggaacccgcacgctgttcgggttgaggaaattgcatgtcgatagactcggtcaagtccataaggtcgagcgagagcagcgcacctggcgcggaaaggtttgcgactgacagcgcggcgcgcatttttcgcgaaagcgggccacgaccaaggaacaaaggcgcgtgacccggcgcgtgaaatctcgcctcgagcaatgtctcctagtgtgcggcgcgccttgggaaatcggcggggaagccacggcagaggccgtcgcatggctatcatcgatgttagtctatcatgagaaacctgggcgtcgcgtcgctcaccgcgcgatggttaagagcttggctatgcttaactatcgcgccacgcgccaatctccggcgtcgccccgccaggccggcggcgaccatctattcccgcgccgcgtcacttgcgcgccgcgactttcggattattgggcgctttcgccatcagttgatcaatccggtcgcgctcgcgtttgaagtcagcgagcaatttgccgtcgaattcgcgggtgcgcgccagcttgacgcgcatcgggtcgacgaagtggccgttgaccatcacttcatagtggaggtgaggtccggtggacaggccggtcgaaccgaggaagcccaccgtctggccctgctttacgcgcacacccttggctatgtcgcgcgcgaaacccgacatatgattataggcggtaatgtatccattggcgtgctggacttcgacgcgccggccatagccgccatgccactccgccatgatgaccacgccatttcccgccgcgaagatcggcgtgccgattggcgcggcccaatcgacgccagtgtgcatcttgtagtatccgagaatcggatggcgcctataaccaaaacccgagcgcgtctcgcccgtggcgatcggcttgcggaccaggaatttccggctggaacggccgttgtcgtcgtagtagtcgacaagaccgtcgtccggcgtttggaaacggtagtagcgataggtttcgccgcgcgtcgtcagcgaggcgtatagcaaggcgtcccggccgccgctttcctcgctatcgtcataaaacacattcagcgaatcgccgccggcgacgccgcgctgcagatcgatgtcgttggcgaacacccgaacaagttcgctgatgatcggacgcgggacgtcctgcttgagcgcggtctcatagagcgaatcatagaggcgcatgcccccggaatcttcgctgtcctcgccgtcctcgtcctctccgccggagacgcgcggctttggcgcggccttggctgtcgtcttcggggccgcgaccacttgcatgaagtcgccgcgatccgtggccgcgaccatggagtcgagttgctcgtcgttgtacacggagacgcgggccagctgcatttccttgctcgaaccgtcgaaatcggcgaacaaaagcttgacgcgctggccttcgcggacgggctccgcgcgccggcccttatacgcggccatgacgcccgcgactcgggccttgggcacgccattcgccgcgagcacatcggcgagagtctcgccacgccgcgccaccgcgagcttttcctccatttgcgtcggctgcgccgtgacgcgcggcgtgatcgtgacattttcgggcaccatgcgcacttctatcgaggagaagggcgcggacaatgtcgtcggggccgttcctcccggcgcggcatagcccagcgccaaggggtcgagcgtcgcccgactggtccgggaaagcagcatttggcccggcagcggcaacgaagcctttgatccggcgacgagagtcgttttcgactgctccacgacctgggcttggctttcctcgagcgttagcgacgcgctctggcgctcgatcggcgtcgcggtcaaatcgcgagtgacgaacgagacctcggcgtcgtcgggcgcgatatcggattcgctgagattgtccgccgtgtaatgcggatcgctggtcagttttagaggattgaaagacggcacttcatccgcgaaattggttggcgtcagcgtcagcgttgtcgcgacatgggtgaaggtcttggtgcgaaccacttccttgtcgcccgatttcgccgtcgtcgccgtgcgaaaggtctgtttggcggcgacaacatcgacggcgcgcattatgcggtcgccctttctggggttcacggtctggctgtcgcgatcatccttgcgcgagatctgcgcgcgtgtcggcgcctccgcgaagcgcgtctgttgatcgagcgccgtataggcggcggcgctaatcaacagcgctcccgataggcccgtgagaaccgtgcccatcagccaacgaatcgacacccggcgacggtcgtcggccgaatggcgacgaccatcggcttcaatcgctggctcatcgccgatgtccgcccaggctatgctcgttgtcgtggggaagccgaagcgcccattcgcgaaagcggtcattcggcggagtcgcgggttgcgtttagcattaaatccttggcctgatcggttgccgcccattattcgcgcgccgcccatgcgaggttttcccgcgaattgggtgcgcgaatattttattaagccgtcacaaattacgcgacgcaagcccgccaaggaacccgacgagcaaacagatttatgacggaacctccgcattatggctcaattggggcgtcgccgttctcgcgggcatgaccggaccgcgcgaacccatgccggtccagaaaaacggaacctcggttcactttttttgcctcaccgtgttgacaggggcggcatg

SEQ ID NO: 459 - DNA, 23264 bp, synthetic construct
  source 1..23264: mol_type = other DNA
  misc_feature 1..23264: note = Synthetic
catacatcagttcatcaacaaaaaaaacttcgacgccgtaatactcggctggtcgctgtcgcgcgatcccgaccagtactcgatttggcattcggccgagaccggcgaaggaaaatataattttgtctcctacaaaaatccccggacggatcgtcttctggagcgcggcagaagcgtgttcgacaaaaacgaaaggcgccgcatctatcgcaaaatccacgaaataatccacgccgacgcggcctacatttttctgtattatcccgacgccctgccggtagtgcataaaagattcaaagggccccaagtcgcgcccgcgggactcggatggaatttcgtcgaatggcgcgccgccgacggaaaaataaaatactcatcgggagaatagcgcgggacatttcttcgtaaaaattcgcaagaaagcggtttgacataaaaatgaaaaaatattttcttcgacgcatcatcaattccgcgccggttttgttgggcataaccatactcacattttttgtaatgcaggccgcgccgggaaagcccacggatttggtggagttcagcgcaaaggtctcggccgaatccaggcagcgcctcatcaaactttacgaactcgaccgtcctttgcacatcagatacataaagtggctcggacggatggcgcggctggatttcggcaactctttccgcgacgaccgccccgcgataaataaaatcgccgagcggcttcccgcgacactgctgctcaatctgctttctctttcggtgattttcgccgcgggcataggactgggcgtgctgtgcgccgtacgtcacaaaacttttatggacaacctgataacaaccgtcgtcttcgtgggttattcgctgcccgccttctggctggctcttatggcgataatattcttcggaatacatctcggcattttgccgatatcgggattgcgctccctcaattatgagtttctgccgtggtgggggaaaatattcgacgtgacaaaacatctcgttttgcccgtggcaataacatctttcacgggagtggccggtctcacgcgatacgccaaaagcggtatgctcgacgcgcttaaatcggattacacccgcttcgcgcgcgcgaagggagcgccgatgagggaagtggttttcgggcacgcgctcaaaaacgctcttcttcccgtcataaccataatgggactttcactgccgggcatcatcggcggcggtttcatatttgaaacgatattctcttatcccggaatgggcagattgggatacgaggcgataatgtcgcgcgactatccggtagttatggccataagcgtgatagtggcgatacttactctggccggaaatatcatagccgacgccgcctacgctttcgccgatcccagaatcagatattccgacggaaacggacgcggccggaacgactgaacatattatgcttcgttattatttagaaaggttcaagcgtaacaaacgcgcgatcgcgggacttgtcgctatcggcgtaatttttattctgggagccgccgcgccttttgcggctccgcgcccgcccggcgagcagaaccttgccggacgactcgcgccgccttcgcggtcggcgcttttgggcacggacgatctcggcagagacgtgctctcaagaatgctttattccatcagggtgtctttcgccgtgggaatcgcggccgccggaatatctgtcgtcataggaacattcataggaatactcagcggctatttcggaggcaaaaccgacgaggcgattatgcggttcgtcgacgtaatgctgtgttttccgacgttctttttgatacttatggtcatcgcttttcttgagcccggaattaccacggtaatggccattataggtcttacgtcgtggatgggccttgcgcgactcgtgcgcgcggaagttatgtcgattaaagaacgcgagttcgttctggcggcccgtcttttgggacttaaaaagcggcggatttttttcgttcacatacttcccaatgtcatatcgccggttttggtatcggccactatgagcgtgggagcggcgattcttgtcgagtcggggttgtcgtttctcggtctgggcgtgatgcctccgactccatcgtggggccagatgatatcgtcgggaaaagattacatacacatagcgtggtggctgtcgctttttcccgggctggccatactcgccaccgtgttgtcgtttaacactctgagcgaaggcctcagggacgtgttcgatcccaaattatgaaacccgaaaatattcttgaagtccggaatctaagcgtcggatatttcctcgacgagggaatagccccggccgtcgccggagtatcgttcgacatagccaaaggcgcggccacggctttaataggcgaatcgggttccggaaagacgaccgtcgcaaacgcgattatgggattgataatgccgtgggagggccgcatcgccggaggaacctcgcgattcgccttccccgacggcgaaatcacggaaaccgccgtggaaaaacgcaaacgcgcaagaggcggaatatctctggtgccgcaggacgccgcggcggctctcgatccggtaatgcggatatacccgcagatcgccgaggcggtgagatactccgcggataccgtcgaagccggcgcgttgagccgccaagacatccggcgaaaagttcttgacgcggcccgtctggccaaatttcccgaagacgccctcgacgcctatccccaccagatttccggcggacagaaacagcgcgccgtgatagcctcggcgctggccggcgagccgtcgctgataatcgccgacgagccaacgtcgggactggacgccgccgtggccggcgaaattctttcgactctctcagatctcaaaaactcccggagattatcgctccttatgataacacacgacatccgcgcggccgcggcgctctgcgacgaagccgtaataatgtacgccggcagagtttgcgaacgcgcagcgctaaaaagtataatccacgcgccgaaacatccttactccgcgggactgatgaacgccgttctttccgtctcaaaactgaccgaaggagtcgcgcccgtggaaggttctccgccgtcggccggagacctcgcgaaaagttccggttgccgcttcgctccgaggtgtccttacggaatgaatatctgcgaagcgtccgaaccgccgatgttcaagacgccggacggagaggccgcctgctttctttttgggcggaatccggatgtttccgacgacacaaaagtatgaatacttcagtcatagaagccgtaaatatcgtaaaatcttttccgtcatccggcgcattcggcagaagcgtcgcgatagaagcgcttaaaggcgtatcgttttccgtaaacagaggccgcgctctcggaatactgggcgaatccggatcgggcaagacgactctggctcagatactctgcggacttcaaaaggccgacggcggcagaattctcatcgacggtatcgacagagcggatattgccgccgccggaatgccgcgcaaaattcagatggtgtttcaaaatccctacgcgtcgctgaaccccaagctttccgtgggcatgcagataaacgaggcgttgaatgcctccgccccgaagcgcggcgcatggcggcgcggggccgtcgaattgatgcggctggtgggtctcgacggagaattcctcggccgttttccgcaccagctttccggcggtcagcgtcagagagtggctatagcaagggctcttgcgccggagccggaaatacttgtggccgacgaagcggtttcgtcgctggacgtttccgtgcaggcgcagatactcaatctttttagattgctcagacgtgaaaccggcgtcaccataatattcatatctcacgacgcgctggccgccgcttatgtgtccgacgacctcatagtcatgaaagacggcgccatcgtcgaaagcggcgttgcggcggcaatacttgaaaaacccgaaagcgaatatgccgctctgctcgtatcggcggcaaaaactttgcattgaacggaggggataatatgaccgcaaactttatcgaatccctgtctaccctggaaaaatcggcgccgcagggcggctggttcaagggtatacgccttgtctatcagggcttcggcgctatggcggccgatatgttcaggcgctttgcaaccgtggactcagtcgtctctttttattacggcgaggatgtggcgacgcacgttgaaaagcgctggggctcaaaagtgttttcctacgaaaaaaagaagaaagtgagacacaacgccgtcggccttttcaacgaatatttttaccgcgattacggcgatgaaatactcaaacacctctccggcgtcgacggtaaaatagctttcgtgccgttcgctacgactaaagcgctccaggattttctttttgagcgcgggcgcggaatgcatctctttcagaatcccgtaatcgtacagaattatttcgactacaaggcgcggctggcatggcgcgccgccgaaataggcgtgccgatgcctcccgacagcactatatcctttttcggaaggatggattataaggaattgtccgaccgctatggaagtttcgtcgtgcaggttcccatttcacaggcgggcgggggaacggattttattcactcgctcggcgattttgaaaaaatagtgtcgatgcgaaagaatgctctcggaacggcgtttgaaaaaactccggtcaaaatcacgcggtatatggccggccccagcttaaactgcacgggctgcgtcgtcggaggaagcgtcgttctttctcaacccgatattcagattgtgggcgaccccacgataacgaccaatcccgctcaatacataggatcggacttctcgctgaaccctttttcgcaggagcacaagaaccggatgctggaaataaccgccaaaatcggcgtgtggatgggcaaaaacggctatcgcggaaacttcggcgtggattttctatcgaccctgaccgccgacggcaagctcgacgaaatctacgtcagcgaggtaaacgcccgcctcgtcggagaatcgcaataccttgcggattttcagagcatgaaaaatcaggtgccgctgacgtttttccatcttgccgagttcgcggaactcgacatagacccgcgtttcgttaaaacatacaacgacaatctgcccgatttggagggctccgcgataatgatattcaccgaaggtaaaggcatattctccaccgacggggaattcaagtccggcgtctataaaatagaaaacgccaaacccgtccgtctgcgcgacggcctcacgctttccgacacaaaaacacgcgaagagttcgtggtcacgaacggtatcccgtggaaaggcctcacgattggccatcccagatacggcgacgaagacgtgtgtctcggctacattatgacgcgcgaaagcatagtcgacccgaacgactggaaacggataaataaaaaatggaagtcgacaatcgacatggtcagaaaagaaatgaaactcgcgccggctccgaaacgcagtttgaaagattgccggtaaaataaatgttcccgtttgaaaaaaaggaaatcattgtcccgccgcattctctttacgcagaggcgtacttgccgtccgccggacaaaaagaatcgtcgggcgcgcttccttttgtttttgtgggcggcgtgttcgacggctcgtggatattcgccaggcacgcggaatatatggcctcaagaggccgccccgtctacgcgctgaaccttcgcgggcaatacaaaagccgctggccttatgtctcgcggcttacactgtccgactatctggatgatatatcatcgtcgataaaacacattatcaaaggcccatacgcgctggccggctacagtatgggagcggcgctggctctgagatttaccgaatccgcgttcgcgtcgggcggcgctaacgtcgcgccgccgtcgtcgctgattctatacgacccgacttatccccgcgaggccgccgaggccgcgggggaaaaacctccgaaacggcttccccgccttgcgccggccatgcacttcatcccgccgaaatccatagtcgaggaaatgctcgacgagacgattttacacggcgcatatcttagagcggtggaattgttccggtacacctacgcgtcttcgcaagtataccgccagacggaaatcgaacggctgcaatcagacccgtccgcggtgaaatgcccttctctgatactggccgtcgacggaaaaaatccggcttactccgcattcgcccggatgttgaacgcccgtctgattcttttcggcggatactcccacggcagttttcttaccggcagatatttcgagccggtcgcgcggatggtgtcggaatggatggatgagacatccgcaaagacgcctcccgaatccgaaaaaatacgttcgtataattggcatctggatacgtcgttcgaaggaggcaagcacaaaatgctactgagatattttaccggatgggaaaagccctccgtcgagatttattcggcaagcggacaacacgccgcttccgtcgccatgaaaaatatcggcgcgggacgtaaagacaaggaaagaatttacgaggccgaattcaattttaagcgcaacaattcgttcgccataacggaagttaccgacgaagtatcgtcggtgacacctccgggcgccgccacaaccgcgctgccgcgctccatagccgatattccatcgcccggaaggcgctacgccccgctattgtccgatttatggcttatggacggcaaattctatcagaccagaccgacggaggaacccgtcgcgccgaaatatttcactaagtatttcgagtcatccgcgatgaaacaaaaaatcgccgcgcacatccggctgccccgcaattacgaccctcaaaaaaaatatccgctggccgtcctcaacgacggacagaaccagtacaagggctggggaatgcacggcggatggcataccgacgcctcgctgcaatatctttgcgaagccggacggatgcccgacaccgtgctcatagccgttgaaagcccccggcgcagacgcaacgaaacttacctgccgcctccgataggccgcgcggatctttacgtcaactttctggccgacgaactgctgccgtctctggccaaagaaatatcgctgacgacggacccccgccaaacagccataatcggcgcgtcctacggggcgaataattccgtttacgccggactgttccgtcccgatgttttcgggctggtgggatcgctttccttcgcttacctccccaagtgtccggcgcgcacggacatgcgcgcgcgggcgcagcttcccttcgcgcggctttacgccgactgcggcaccaaatgggccgacgaccagccgcgccgcgacgactcgacgccgtcgacgaaagatctggtgaatatcgccaaggaaaagggaatgacggaaaacgagaatctgctcggacttgttttcgccggacactatcacagcgaaactttctggcgcaaaagaataggaatctgcctggaatttctgttggctccgcgtatatgagcgggacgaacgcctattgtcatcctgagcgcagcgaaggatcccgttagaatatgacaaagattcttcccccgccacacgacggcggggtcaaaataacattgagtatgaaatcatccgactatctgaaaataatccttgggattgccggcaacggacgggtatatctcgtcggcggagccgtgcgcgacctgctgtcgggacgtccgtcgagcgacttcgacttcgcaatgagcgcaaatccgtcgcgcatggccgcgaagttctcccgcgcggcggtcgcatccgtggtcgttctcgacgaagaacgcaaaatataccgcgtcgtcaagaaaacgtcatcgggaccgctgaccttcgacttttccgcataccgcggaccgaccatagagcgcgaccttatgctgcgcgacatcaccgtcaacgcgatggccctgccgcttaaaagcgccgccgcgctgctcgacgagacatcggacgcggaaaaaaaaatagccaccgcgctgctggatccgtcgggcggcctggacgactttaagaagcgccgcataaaacttgtccgcgaaaaagcagcgcgcgaggaccccgcaagattgctcagagtgttccgtttcgccgccgaactcggctttgccgtcgagcccaaaacactcgcgtcgtgccggcggctccgcggcaaaatccttgaaccggctccggagcggctgcgcgacgagatatttaagattttcgccaccgaccgcgctttgtcgtcggtaaaaatgctcgataaaaccggaattcttgaaattcttgcgcctgaaatcacggcgctgaaaaaatcctgcaaaagtttctactttcatccgcaggggctctggcaccatctcaccgaaactctcggccgcgtcgaggaatacgcatccgacgtcccgtcgcaatttcccgaggccgccggtgacatcgggcggtatctttcaaggcagatgtcctccggcaacgttaaatcactgcttaaattcgtcacgctcctgcacgacgcgggaaaacccctctgcgcgaaacgcatcgcaaaaagaatgagatttttcggccatgagacagtcggcatcaaggtcttcaacgacatagccgtccggcttaaattctcgcgggacgaaatgaagttcgccgcgaccctcataaaaaatcacatgcggattcttcagctcgtcggctcgggaaatacttcggacagggcggtttatcgtctcagacgcgacgccggcgacacttttccggcgctctgtctgctgtcgctgtcggacgcggccagttacaggaacctcaaaggattcgagaaaaataatgtttcggtcgtccacgatttcgtgagcaaagcgcttaaaaattattttgacgatatgaaaaaaccgccgcgctccaaaataatagacggccatatgattatgcgtcggctctcgataaaacccgggccggccgtcggcgtcatactcaagcgcctcgaagaagaacgcgctgtcggaaccgtaaaaacaaccgccgaggcgctcgaatgcgcgcgcggaatatacagggaaatatccaccggcgcatcgccggagaaacggagacacaaatgactgaaaaatcagcaaaaatgatttcggaacggataccatcgaatcgctctttaggataagttccgagatggtgtccgacaaagtcctcaacgaaatacttcgcttcatcgtcaacgtcacggccaaaatgatgaagtcaaaaatttgctcgatacttcttctcgacgagaaaaagcgcgaactctacatagtggccacgcaatctttgagcgaagaatacatcaacaagccgaaccttaaagtcggcgagggtatttccggcatcgccatcaaaaataactccgtgactacttccgccgacgtaagaaccgacaaacgtttcaaatatccggaaatcgcccgcaaggaaaatatcgtctcaatgatatcggtgcccatttcgattaagggccgagcggtgggagtcataaactcctacactcccaaaaaacacaaacacacgaaaaaagaaataaaacttctcggcaccatagcaaaccaggcggggctcgtcatagaaaattccaagctgatggaagaaatcagcacgacaaaacagattcttgaagtccgcaaagccgtagagcgcgccaaaggaattcttatgcgggatctggcgatttccgaggacgaggcctacaaaatcatacagcgcaagtcgatggacacctgccgccccatgaaagaaatcgccgaagcggtgatactgacgtacgagataaagaagtagtattatttgtttctgccggcgggctggagcgtaaagatttcacttgcgattggcggggaatatacgggaggggaaaatgtctaaggggaatgaactcgtttggtcgtttgatttggggacaggaagtatcggggaatgcgcgcggcgcggcaaagaaattctacatctccattctcttcttctgcccaacgactttgctgccttgaaagatgccagagaaagaaggcgacaaatcagaacgcgcgaggcgcatagaaagcgcgaaaattggtggcggcaacaggccaaaaaagtgggcatagaagttcttgaaaccggccatcgcgcggacgacggaactttcatcaaaccagacgcaagaatgtcacgccaattccccgaaaatggcgataaaactatttacgcctcctgccttctgagaatcgctcttttacaaggcgtacaactcgatggatggcagatttacaaagcgatatggtcagcgatacagcggcgcggttacgacgccgacctgccttggaaaagagaagtcagtcgcaatatcgccgacaaagaaacttcggaaaaaccggcaagcgggaaaaaactcgcctcgcataaagaagctaaaaaagaggacggcgccggcgaaaaagacgaaaaagaaaatctcgacgcagtgcaaaattatcaaaaagaactcgaaagagtttttaaggacgagaaatatcgtttgccctgttactacgaagcgtataagctcggcgtctggaacccccgcaaacccgatacccttgacggcaaattcggcgccaaccccgaacccgccagaaacaaggacaacagaacttcactgattccgccccgcgctctcgtcgccaaagaattactcgttatgctgacgcaggcgtccaaacaataccccaaactcaaagataaagtccgctatgttctatacggccccgccgagcaggaatacgcttcttacaaagatgaaaaatacgctcactatcgcggcacggagtgggactcgcagggtctaatctcacaaaaaattccaagattcgacaaccgcataatatccaagtgcgcgcttatgcctcgtttcaatgtctgcagcgccaagatccgcaaagacaaggccggcaacataattcctgagtcgatgttgccatcggaagttacctttcttctcaaactcaaaaatatacgttacaccgatactacgacgggcgaaatggaaaaaccgctttcaccggcggcgctcaaagaattgttcaacgcatacaacgacaagaaacacatcacgcaaaaacaactcgaaaaatatataaagacaaatctatccggcctgccgcccgcaaacctcgtcgaaatcgaagaacccaaaacttcgggtcgctcccgattctgccgcccggcgttaagaattataaaagaaataatactctccggtaaaagtccgcacgcctaccacgaagaatggctcgcggcaaacaaaaataaagacctacaaaaaggtctcgtcgcggatgatgtcaagtttctgctcgatatgcccgcggagtgggaaaaactccatatacctgaccgtcgcatagaggaatcggaacttaaaaaatcagagcgcgaaaaacgcatcgtcgaaatactcggtggcataacgaatccagtcgtcagacatcggctggaattattcatacagcgcctgaaagtcttaaaaaataaatgccgcgccgagggcgaaccggccaaaataatcctcgaattcgcgcgggagggagaagaaagttttcagggacaaaagaataaaaatcgccaaaagtgggaaaaactccaaaaagaaaaccgggcgaaaaaagacgaggcgtataaatctcttcaaaccgccgaaatccacggcaaacaatcgcttcttaaaatgatgctcttcaaagagcaggttggttatgacttctactcgatgacgcctcttgtcgcctcgcggctggaatcctacgagatagaccacatagtcccgcgcgaaggcggcggttccgacgcttatatcaataaaattctgaccacgcctgacaaaaaccgcgaaaagggaaaacacacaccctttgagtggcgctcgtcggataaggcaaaatggctggacttcatcaaagccgtaggttcaagcaaactacacgacaagaaaaaagctctgctgacatccgaaaatccgcttgaacttataaacaaatacacagacctcgcatccacggcctacatatcgaaactcgcgcaaaaaataatccacctgtttttcggctggcctcaactcatcgagggttcgacaagaaaagtcgtcgtcgcaaacggcggcctcaccgcgaaactgcgcagacaatacaaattagaccgactgcttcaccctggtattcccgacgagcaattctcggaactcgctcaaagcggcgaattggacaagaagaaccgcgccaacccccgccaccacgcccttgacgccctcgtaatatcaatgactcctgaacttaaactcgacccccgaagtaaaaaagacatactccccgactggtttcacaaggaatattgccgtccaatcattgaaaccgtatatcccgagagaatccgttttgaaaagccgaaacttgccaagacgatatacgggttaagaaaaaatctcgaagataaccgggaattctatgtgttcacgacccgcttcggcaccggcacgagaattgagcaatttcgcgaaatcgagaaagcgcggaaatacaccgacggcatattcgatgagcacataagaaacgactttaataaaatgctcgcctcgaagcccgctcagcaggaatgggaaaagtttctcgacgaatatgaagtcgccggctcaaaacccaaaaagtttgttcaaatcgcctcgggagaaattgacaaagaaacaggggagaaattagaaaggggggaactcacgacttacggagagcatgttcgtggcaagatggcagggcaatatttcaagaatgatgtgtctttggggtattttgtctatcagaacgaaaaagacaggtgggaaagagagccgatttatgcttttgagtcgctctataaaaaaatagaagcactaaaaaaagaccctgctgtcaaaaatcccgtattctttcgctcgggtatgctcgttgaaataaaaaacgactgcaaccttcaaaatccaaaacaaaaagttacaaggggattttggtacttgaatacaatcaaagatggtggtgaagtcaaattaacctctattgatcactcacttgaaagaaaagcgcaattgaacgctctaatgaccgacggcaaaatggctccaccacaagaaaatattcgttaaatcacttaacgataggacgcaaggagcggggcgatgtcctaccacttaatacacatacttcagcatcagagccgcctacacattgaccgcggatgtctcgtccttgaaacctccgacggggtcgaaaaacgcgctccgcttgccgacattcttgccgtcatagtcgccgcgcgcggcgtctcattctccggcgacgcgctctcggcaatactctcgaacggcggcatcgtccttcactgcgaccacaactaccgccccgtaggcaaaaccgtgggacttcaccgcgtggttcactccgaaattttcgagcggcaaatcggcaaatcgcccgatttttccggtaaactctggtcgagaattctaaaagccaaaatcgagaatcaggccgtattgcttgattccataaaagccgcgcacaaacttcacgaatatctcgccgaagccgaatgtcccgacgaaggcaacgccgcccgccattactggaagttttatttctccaagttcggaagaaaagcgccccaagaaagagaacacaaagacgccgagcatcccgtcaatcaaatgcttaattattcctacgccgttatgggtgccataatccaccggagcgccatagcccacggtctcaacactacgctgggcatacaccacaaatatcgcttccgctccgagccgctcgtttatgacctgttagaaccactgcgtcctttctgcgacctgatgcttttacgcttcaaaacgagaaacccccgcaaaccgatagaagaatacatcaaatccgtcgccgcagacattgtgggactgcgcgtaagatacgacgcctcaaaaacccttaaactcgtcaacgccatagaccgttacatttcgtccgtaaccgactgcttctactcaggagtagttcaagaaccctttataccccgcatagcggacttgtcataatgtccgccgtaaagagttcctatcgtatgggctggctggtagtaatgtttgacctcccgaccgacaccaacgaggaaaaaagaaaggccgcccgtttccggaacgaccttttggacctcggttatctgatgctgcaatattctatctatgtgcgttgcgccgttactctcgacaagaaaaaacacttggtgttcgaattagaaaaaataagccccggaaccggaagcgtcaagtgtttgttcataaccgacgcccagtgggggcaaatggcgaatatatgcgatgagaggaaatatgggccgaggaaggtggacaaatcatttggcggggaacaacttcaattctggtgatataaataagataaccctgacgtgcgaggcagaggtcaaggtctcttgttttttgttaagacggtgctgttaagattttagcatttaagcgcgaatcatacaaatccgcactataaatcctattataacaaaatcaactttttagcaccgtcaaaacatggcacgcgccccatgattttggaaaattattataacaaaatcaactttttagcaccgtcaaaacggttcccgtaccccacaatcgcaatattaaattataacaaaatcaactttttagcaccgtcaaaacaatacgcgggatgaaccatacaaagaatcgattataacaaaatcaactttttagcaccgtcaaaacagccaattgacccggggcgtcggcggcgctattataacaaaatcaactttttagcaccgtcaaaacaggtatatttatattgatactgttcacattattataacaaaatcaactttttagcaccgtcaaaactcggtgtgcgcctcatcgcggataaatccaattataacaaaatcaactttttagcaccgtcaaaacagagacgcatacgataccgaagaagagcgaaattataacaaaatcaactttttagcaccgtcaaaacacctatattatagcagataaaaaaagaaaaattataacaaaatcaactttttagcaccgtcaaaacgatgccggcgcatacgagacgagagcgttcgttataccaaatctatgagagagggggaattataacggttaaccaccgatatcctttttagattttccctgtcgttcaacaacagtgagattttcgtggtcggtctggtctaccgacttactgcgtttttcagcaacgacggctttgtttcttttcagttgctcaagtccgagataatttacgggcgtcgcgccgtatttccctttttcaaggttgttccatatttcgtcatcgttcaggccatcgatttttgtagtaatgtgtaccataacgggcggctgtccgagttcgaaaatctttttgcgatctaataggtcctcgggtttggctccggtgccgacaaatccaaaatcctctatcgcctttattgctcttttggcattttccggcgtcgactgtattaggacatccatatcgttggtaaaccgggggcaggtgtaatacataacagcataggcgccgacaacacaatagttcacattattggcgttcaacgcttttaataaatcttcgaaatccttttctactctcatttttttataactatcttaaaagaagttttgtccatcggcgccggcggggttcctttgaccttaaaaaactgctcgcgcagatattgggcggcatcgaggcgctcctccggcgtgagggacgagtaatatttcctcatcgtctcgtcggattcttcaaaggattcggagatatgaaaaaaaagtttgtcagccatacagtattatatctttatgctcattgcttttatattatacaaaaaaacacggcgccggaaagacgcaaatacgcgcggatttcttcttgacaagccacgccggattatggtatattccctccgatagttaacagccgccccgacgcaacgacgcgacatcgggcggagcagagaaaaacgaggcgacgacgcccgtgacacggagatttccgtgacgcgggtttttttattttcaaaaaccggcggcaaggccggattgcgggcgaaacaaacattatgtgcggaataataggaattatcaatctcgacagacgccctttttccggcgaggtcatagcccgcgggctatcgcatctgaaagaccgcggcaacggactgggatcgggttacgccggttacggaatatatcccgataacgccgacgactggtgctttcacatattcttctcttccgacgacgcgcggcttaaaaccgaagcgcgcctggacgccgctttcaaagtcgttaaaaaagagccggtacccgtcaaaccactgacatcggtaaagaggcctcccgtaatatggagatattttctaaagatacccgcgctgcgctccacgactaccggcactctcgacgaacgcgaaaaaaaatacatcttcgcgctggtaatggaaataaattcttctatcgagggggcgttcgtagtatcgagcgggaaaaatatggggatattcaaaggcgtgggatttcccgacgagatagccgagttttaccgtctcaacgaatacagcgcgaccgtgtggaccgcgcacaaccgctttccgacgaacactcccggatggtggggcggcgcgcatcctttcggcatagccgacctttcgctcgcgcacaacggcgaaatctcgtcgttcggcatcaacaaaaggtatttggaaagtttcggatatcatcttgcattgcagacggattcagaagccatactctatcttttcgactttcttacgcgcatccaccggctgcccgttgaaatcgcctcggccgcgcttaccccgccgcactgggacatcatagaccgtatgccttccgacgagaaaaaactcttcacggctctcaggatgacttacgcgtcctgccttataaacggcccgtcggcactgttactgggattcgagggcggcctgatgggcttaaacgacaggataaaactgcgtcccctggttgcggccgaaagccggtcatacgcgtatctctcgtcggaagaatcggcgatagcgtcgattgcgacggaaaaattgacaaaaataacgcacccgccggcgggtgaacccgcgatattcaggtatcgcggcgacgaaaagaaaaatcgacacaatgagaaaaacacaaaaactccgcgagtttaaaataatccgcgaccgcgaccgctgcattcaatgcgaggtctgcgtgaggcaatgcgctttcgaggcgcatattttcgacggggaagcccttgcgatggaatccgccgacgaactttgcgccggctgccagcggtgcgtgtcgctttgtccgacgggcgctcttaccataatcaagaatccccaggagttccggcccgattcgtactggacaaaaaatgtcctgcaaggcatatacaaacaggcggacacgggcggagtgcttctttccggaatgggtacggataaagtttataagtcgtactgggacagaatactgctggacgcaagccaggtgacgaatccgtcgatagacccactgcgggagccgatggaactcaggacttatctgggcgccaaacccgaaaaactcgacataaaatactgcggcaaagagcgcaaaccgcgactgtctaccgagctcgcgccgcaactgcggctggaaacgccgataatgttctccgcgatgtcctacggcgccatatcgctcaataccgtgacggctctggcgcgcgcggccgcctcaagcggaactttctggaacacgggcgagggcggctttccgaaatcgctttacgaatacgccccgcacacgatagtgcaggtcgcctccggacgtttcggagttcacgccggatatttgaacgccgccgccgcgatcgaaattaaaataggccagggcgccaagcccggaataggcggacatcttcccggcgaaaaagtcaaccggctcatatcggaaactcggatgataccggagggctcagacgccatttctccggctccgcaccacgacatatattcgatagaagatttatcgcagctcatcggcgccgtcaaagaagccacgcgctacgaaaaaccggtgtcggtgaaaatcgccgccgtgcacaacgccgccgccatagcgtccggaatagtgcgggcgggcgccgacatcgtggctatcgacggtttccgcggcggcacgggcgcggcccccacaagaatcagagacaacgtgggcatacccatagaactcgcccttgcttccgtcgacgaacgacttcgccaagaaggaatccgccatcgcgcctcgatagtggccggcggcggaatccgcaactcggccgacgtcataaaggccattgctctgggcgccgacgcggtttacatagccacatcggctctcgtcgcgatgggatgtcatctctgccagaaatgttacacgggaaaatgcaactggggaatcgccacgcaaaacgattatctcatcaagcgtctcaatccggaaatcgccgcggagcgtctttcaaatctcgtaaaagcgtggtcgcacgaaatcaaagagatgctcggaggaatgggcatagacgccatcgaatctttaagaggcaaccgtctgcgcctgcgcgcggtggatatgacggaatcggaaatgaaaatactcggaataaaaccggccggagaatcgctgtgaaaaacaaaaacgccgacggtaaactcaaaaaaatctacgcccgcccggaatactgcatggcctgccgcctctgcgaaaccgcgtgtttcgtgaagcattcaaaatccaaaaaaataataaaggcattccgcgacgagaggggggatttccgcccgcgcataatcgtggaacaaagcgggccggtgtcatttgccctgcaatgccgccactgtgacgacgcgccctgcatagaggcgtgcctcagcggcgcgatggcgcgcgccgccgacggaaccgtcgcctgcgacgaagacaaatgcgtaggatgctggtcgtgcataatggtctgcccgttcggcgccatatcgcaggacagacgccgcaaaaaaatagcgtccaaatgcgatatgtgtcccgataaaaacacgccggcgtgcgtagaggcctgtccgaacgaggcgcttgtttatgaataaaaaaaagtcggccgaatatcttattatcggagccggtcccgcatcagccgccgccatagaatccataagaaaaatcgacggacgcggaaaaattatagtcgtctcgtcggaaaaagacgtcttttattcgcggccgctcatatcctgcctgcttgctttggaaatcgacaaaaaacatatcgtttaccgcgggcgtgatttcatagagaaaaactctcttgaaataatcgctccggcggccgttacgtccgtcgacgcccgcggcaagtccgtacgcctttccgacggcgcgcggattaagtggaaaaaactcatcatcgcctcgggcggcgaagccatcgtgccggagaatatagccggcgcaaagggtttaaggacatttacatccgtcgaagacgcgcggcgtatcgacgccgacataaaatccggcgcgaaacgcgcggccgtcataggcggcggcttcatcggtcttaaatgcgcggaagcgctcgtcaaacgggtcttaaaggtcactcttatcgaactcgccccgcgcgttttgccgtcgctgctcgacgatgtctcggccgccgtattcacccgcaatcttacgcgccgcggcatagacgtacgcacgggcgctcgcgccgaaaaaatttccgccgacggcaaaaaactctttcttgccgacggaagcaaaatatcggtcgacttcaccgtcgccgccgccggcgttcgcccgaacatatcctttttggcggggtccggcatacgcgcggcaaaaggcgtgatagcaggcggcgacatgcgcgcaaacttccccgatatttttgccgccggcgattgcgccgaaacgcccgattttttttcgggcgaagcgcgccccaaagcgcgccccgcgccgatatggcccgtggcccgtctgagcggagcggcggcgggcgccaacgccgccggcggaaaggttaccgccgaaggcgctctgtcgatgaactccgttgaagttttcggcctggcggtcatatcggccggaattgtcaacccgcccgacggctccggattgaccgtcgagaccgccggactctccgacggcgcgtcaaccggcggcccgcgctacaaaaaactgattttcgacggcgaccgcctcgccggattcataatgctcggcgacgtcctgcgcgcggaaatctacaccggcctcatcagaaaccgcgcgtccgtggcgaactgcaaaaaggaactatccggcgacaccttcggatttatcgccgtcggagaagaaaactggaaaaaacgcatcacgccgatggaggtctgatgctctcgacaagacatcccgcatgaaaaatatccgcattgactcccgccgcctcgattataaaacgctcaacgaacgcatccgcgccgcagtgaccgccggacggggagaatgcgcgtcaaaaatcgtcctcgacggcgtaaacggccagcgattcatcgcggccggtatcgaaagccccgtgcgaatcgaaataaacggaatccccggcaacgacctcggcgcgtttatgaacggacccgaaatattagtgcgcgcgaacgcccaggacgcggtgggcaacactatgtcgggcggcttcatcgccgtcgacggacacgtctccgacgcggccggctacagtatgcgcggcggctcgataatcatccgcgacaacgcgggttatcgcacaggtatacacatgaaagaataccgcgaaagcgttccgaccgtaataatcggctctttcgcccgcgattttctgggagaatatatggcgggcggacggataatcgtcttcggtatcggcgcaaaaaaggcctgcggaaattatcccggaacgggaatgcacggcggcgaaatatacctgccttcggacaaactgccgcctcgtatgcccgaaggtctgaaaatatcgcccgccggcgccgatgtcgtggaaaacgcggccgcaactttcgcccgcgctctgggcataccccgcaaagaacttccctcgacgaaaaaaatatctttttgcgtaatccgtcccgcctcttgccgcccctacggcagcatctacgcttactgaaaaaccggcccgcctttggtataatcatgttatgggacacaaatacgcttgttctttggctgtaattttcgccgccgcgacggtcgcgggcgcattttcagtcgatccgccgtcgcccaaaggcggcgaagcggcgctgttttctttcaagccgtcgccttttctttcatacgaaattactcacgactccaaaacctacaaaccttatcctgccgtcggagggaaaagagaaatatttcttcccatagccattgaagcgtcgggcgaaacctcgattcttgtcgccaaaaaacttttaggcataaaaatcgccgcgtccaaagttccttttataattaccgcccgacagatacccgttatccgcctttcgccgaccagcgagagaatgcgcgactcaaaaccggctctgagcgacgaaagagcgcgtctccttaagtccttgggcatcaggagtccggcaaaattcgcccaaggcccgtttttatcgccgctcgacggcagacaaggggaagatttcggcgtcaaaagagaaggagcgcgttactcctattaccataaaggcgtagatatatccacacgggccggtgttccggtcgcggcggccaacgcgggcgcggtggctctggcctcggaaaacctcaatgtgaccggcaaaaccgtagtcatagaccacggacagggtttagtcagctgctattaccacctcgacaagattctggtgtccgagggggaaaaagtcgcaaaaggccaaaacatcggcttggtcggctccacgggctggtctaccggcccgcatcttcatttcggcgcatatcttcagggcgaagccatagaccccctgtggctcatagaatttacatcttcaacttatcttaaacctcgctaacgccattgtcaggatgttccttcccatagtcattgcgccgccgctctcaccccttgtcattgcgaggagttgtaggggcgtataattatacgcccctacttgatgaacgacagcccgccccgccttggcggggaggcaatctcatcacgcattatggtaggggcgaccccctgtggtcgcccacataacagggcaggcacgggggcctgcccctacaaagtaatgcccctcgcaatgacaacaaagggggattttaaaattcctcgtccgcctcccgcagaaaccctgtaataaatttgacatcatcctgcgttttttatacaatactattgattactacatagtattgattactattcagatattttatgacaaaaaacaacacaccccgcgaaaccccgcacatcgaaaaaatcttaaagggctcgcggcttaaagtcacgccgcagcgaacggcgatactcgaatatctgctttcaacctacgcacatccatccgcggacaccatctgtaacgaagtcagaaagaaacacccgtccgtaagccgaaacaccgtctatcaaactcttgatttttttgaaggcaagcggcttatttttgctataatggatacggaaggggtaagacgctatgacgcgcacaccgacccgcacatacatttgatatgcctggactgcggagccataatagacaccccctacgacgacagacgcatcctcggaaaagtcaaaaaatacttcaaacccgaaaaatccgtcgtttatatttacggacactgcgtgccggggaatcccgccggatgcgccccgcgcgaggacgcgcgcaaggagtaaaacaatatggaaaaatggaaatgtatcgtctgcggttacatttacgacccgcaaaagggggaccccgccgataacgtcgccgccggaaccaaattcgaggatattccggacacttgggtctgccccgaatgcggagcgctcaaa

SEQ ID NO: 460 - DNA, 23081 bp, synthetic construct
  misc_feature 1..23081: note = Synthetic
  source 1..23081: mol_type = other DNA
gggtggaaagcaccctggaatcttatcattacaaaataggcgacgcttttgaaaccgatgccgtgctgctgcaactggatgacgccatctacaagcagcagctggaaaaagcggcggcggcgctggcggaggcccaaagctcctacgacttctccgtcagcaacgtcaaacgggccgaggaactgctggccaaaggagtcggcgggcagcaggagctggaacaggcccagctggaactggaggtcaacaccagcaaattgcaatttcaccaggccaattaccaactggctcagcgggatctcgacgcctgtaaaatcgtcgcgccgttcgccggccggctgatccgcaaagagctgcaggagcacgaattcgtccgggccggacagccgttgctctacatcatcgacgaccgccagctgctggccatcctctatctgccgagtcaattgaaaaatcaggtcaaaatcggtcaggagatcgagatcaccgtcgaagagactcacaccacgcatcgcgccgtcgtctatgaaattgccggtgaagtcgatttcaacagccggacgttcgaaatccgggccctgctccccaaccgggacggcaaactcgccgccgggatgtcgggatatctctccggcgttaccgtgacagccggcgccacgccacagcaactggatgccaagcaggccgggggccgcccatgagcgccgccgatcccgcccgcgaacttttgctggtcaaaggcaaactcaacgcgctgtcggccattctccgcctcggacatgaagcgttcaccaaacacacgctgaaagaatgggccattcatgtcgtcaacaacagtgtactggcaattccgtacgaccgttccagcctgatcgacctgcgcagtgcaatgccgaccgtgctggcggtcagcgggcagagcgaagtcaacgccaattccgaattcgccttgaacctctgcatcgcggcccgtgagttgacttcgttgaaaaaaattaccctgctcgacgaaaatttgcaggagtcattgccgtcgtccgccgccgtcgaggaggcgttcggttacttcaacgaagtttccgaagcgatctatttcgtcccgctgcggccggccggcacggatgaaaatgccgacaccaccctgttgtgggtggtggagttcgccaagaaggagcaagccgtcattgcgccggcactgctggcattgctgagcgaacattatgccgagtcgctcttctatattttaaacgagcggaaaacgacgctggtgcagcaggtgatggaccggcggaaaatgttcaaaccgtcgcgcatttttctgatgctgctgttgctgttcgctctggcctgcgtcatcgtccggattccgcaaaaggtctccgccgaattcgagatcgtgccggaaaatgcctccatcgtctattccccgttcgacggggttatcgaaaagtgctttttccgcagcggcaccctggtgaaacgcggcgagccggtcctgcaattcaacaccgaagaacggcagttcagcctggccgcggcgcaaaatgactacaacaaaacgtcggcccaactggatttgacccagcggatatccttccgggatatcaaccagcggggcaaaatcaaactgctggaactgcagcaggcgaggagcgacatcgaaatcaaacgcaaccaatggtatctgaaacgcagcagcgtcctggccgaaaccgacggcattctcgacatcggcgacgccgataaaatggaaggcaaggcggtgcgggccggcgaaaaattgttcgaggtatccagcaccaccgaactggctgcgatgatttatctcgacgaacgatattcttcggtattgcaaaacggctattcggtcacgttgtatctgcattcccggccggaactgccgatcgcctccaaagtcatcagcatcagtccgaaaccggtattgaccgaacggaaactgttctgttatctgatcaaggtgaaaccggatatcgatgcggccgaactgatctgcgggatgcgcggcatcgcccgcatctccggcgaccgggtttcactcggctactacctcttccgcaatttgctgctctggtaccggcaactgtaatcagctatggacgcccaatctctcaagccggaaccgcagcagccgcacgtcggagaactgcggtatgatttggaactgttgcccggcgaagccgacggcaacggcatgccgagctatctgatcttcgacccggtcgccgacacttatttccggttgacggagtcgaattatcagatcatccggcttttgaccggcaatccgacgttggacgcgtttctggagaaattgaaaagagccggcgtcagcgcctcccgcgaagaggttttgaaactgctcagttttctgcagcagagcaatctgatgaaagtcagctaccagcttaccgaacgcaaggttctacaggcccgggcgttcaagcgcaaactgctgctgcagatcgccctgtccagttacctgttcttccggatcccgctgttgcgcccggaccgtttcctgaaccgcaccgtcggggcagtcaccaagatcttcaaccattggacgttcctgttgttatggaccctggtcgccatcggctatctcggcctgatcgtcaactacgaccgcttcgccgacatgttcgtcgcctccatttcgttgcagggattcattcgttactcgattgccgtcaccgtcatcaaggtcatccatgaattcgctcacgcctataccgccaaaagcgccggctgccgggtccgccgcatgggaatcgccttcgtcttttttctgccgcgtttttatacggatctgaccgacagttggcggattaccgaccgccggcgccgctttttgatcgacggggccggcattttcagcgaactggtcatcggcggcttggcggcgttggtctggagtttttcacgtcccggcctgaccagcacggtttcctactatatctttgccgtcagcatcatcaacaccgtcttcatcaacggcaatccgttcatccgttatgacggctactatctgctgatggacctgctcaacctcgacaatctgcaacgccgcggtacggacctgttgaaatccttctggcggcgccacctgttcgggctgccgctgccggtggaacccatgccggccaaacagcgggccggcttgttcttttacggcatctccgccttcacctatcggatttttctttatacgtcgattattttgattgtctactttaactttaccaaaacgctgggtatagtattgctgtcactggaagtttatctgttgatcctcaaaccgatttacgacgaagggaaatttctgtacatgagccgccgccagatgcgcaaccgcaatgttctgctgtcattgaccggcacgttatgcatcgtgcttctcctggtattgccgctgccctggaacgtcacggcgccctgtgaggtcaaagcggccaacagcatgatggtatacgcctccatcagcggttttctggaaacgatgccggttgaagacggccggctggtaaaacgcggcgatctgctttactcgctgcgcaatccattcctcgagtggcggcatcgggaagcggagctggacgaagcactcagcctgacggaactggaccaggcccagcgcaatgccgaccggctcggggaagtcgatatcatccgccaggcgctggacaacaaccataccatgctggcggagctggagcgcaaggaagcgcagctcaacacgctgagcaatctggacggtgttttcgcgcttcacaaccaatacctcaaaccgggacaatggatcaaccgcggcgaactgctcggcgaagttttcgatccccgggaacgtttcatcgtcgcctatctggacgaaaacgacattcaatccatccgcctcgacgaccgggtaaccgtcgttctcaaccgggagttgacccgttatccgggccgcatcgtccggatcaagccggtgccggaagagtttgcgccgtcaccgctattgagcgtcttcggcggaccggtgttgagcgtgccgaccgaggacggccgttttctgccggcgcagggatgttatgagatcaccgtggcgctcgacaacgcgccggcgctgccgatcggccgtaccggcaatgtctacctgcggaaattttccagcgtcggcggcaatattctccgtgacaccgtccaggttctgcgccgggaactctctttctgaccgttccgggaaccacccggcggtttcagcggcgcgtcctcccccttccgccgcaataaaaatcggcattttccggcttgccgacttgcgaaaacggccattccattctacattaaatgattatgtaaatatcgaaagcgatgttacaaccggaaccgaaaattttatcaagatcaatatattcagggaatgtaaacaagagatggcaatcagcaaaatcaacactgttttcgccaagcacagccgggtgcttttcggtgtcatcaccgtcgttatcattatcacttttgtcggttttctgtcgccgagcggcctgacggcgctgtttcccggcggcgattcggaacaggtcggttccatcttcggcaagaaagtaacctacaaggacgttgccaaagaggttcgtctgatgcagattttctatttgatccagatgggtcaattgccttccgccgaccggttgtccgagcaggccttcgagatcatgtgctggacggccgccgccgaagcccggggtatccggatcagcgatcaggaaatcgccgatttcatcatcgcgcttccgcaattccagaaagacggcaaattcgaccagacgcttttcaataccttcctgcaggagaaaggggtgaccggtgaggattgcgacaatgcgatccgcctgatgctgacgcttcaacgcgtccaggatgaaattttcaacaacgtcatcatcaccccgaatgaagtggagctgtttgcgctgcagcgcaatgcggaattgcacccgctggtggcctatttcaacaccgtcgatttcgaaaaacaggtaaatccgaccgacgagcaactgcaacagtatttcaccgaatgccaggaaggcccgcagccgcgttatatccagccggccaaattcaaagcggaaatcgcggaaatttcctataagacgccggccattctgagcgccgcggccaaaagcgccacgccggaagcggtgaaaaaatattacgacaccaatccgcaacagttcaccaacagcgaaaccggcacggcggagcctttcgacggcaaaggcgagcaaatggcgcgggcggcttatattgccgccaaagcgaaagaactggcgctgcaacaggcgcggaacttcgccgatgtggcattcgaaatggtttccgatgcccagaaagatcaagtggaagtcttccgcaaacaggcggcggaataccattggccggtgatcgccaccgactttttcgccgcggatgcccagagcatcggcgaactggcggaaccgaaactgatcgaagcgattgccagagccgatgaggcggtcccggtttccgaaccggtcgccggcgaatcggcagtctatgtcggattcgtttccgccgtgcagccggcccaggcggcagacttcgaggcggtcggcgatcaggtccgccacgattatctggcctccgaagcggataaactggcgcaggcggcggcggaagaggcggccaaaaccttacaggcgatgacgccggaagaattgcggcaggcggtcaccgacggcaaaccggtcaaatttgaggaaaagccggttatctccagtgcgacccagccgactaccttcgaggcgatgctgacggcttataccgcctcccgtttgcaggtcggccgggtatccgcgccggaaacctccggcaacggttatatgctgatttacctggcggagcgtaccgtgccggaaagcatcgcgcccgaccagctgagttttctcgaggcgctttatcgccagaaccggcagcaggctgccgcggtggaatttcagaatttcgtaggcgccaactgtttccagtacaaacagaaaggcaattgaaccgtgggggatgccgtttctctccgggggcctcaggagtatgccctcggcaaacacatgaccatcgaatattacgactgcgactcggcaattctggctgatgcgcagcggatgaaggaattgttcattcacgcggccaaagtcagcggcgccaccgtgctggactccaatttccactcctttgaaccgcagggagtcagcggcttcgtcatcattgcggaatcgcatttctcggttcacgcctggccggaattcgactatgccgcagtcgatattttcacctgcggcgaaaatatctccttccaaaaggcggtcgacagtctgcgggacgacatgaaatcgctcggcatggtgatctccagcgtgatgaatcgcggcatcgtcagcaacaacggcatcgagcggctggtgccgacgatggaagaccgcacctatttgtacgcgctttcctggcggacccgtttcgaaagtgccagcgcctgggggctgcagacgacgatcgacctctaccagtgcgatccggaattgatccgcgacgaagcgatcgtcaaagaattcgtccgggaaatgtgtgcgcaaatcggcttgaagccgtacggcgaatgtgcagtggtcaatttcagcgataccgtcaagggagaaggattcagcatgatgcagatgctggaaacgtcgctgatttccggacatttcgccaatcacaccaatacggcgtatctggacgtgttcagctgcaaatttttcgaaccgcgccaggcggcggaattcgccatttcatttttcaaagggaaatactaccgcatgcaggtcgggcttcggcaataacgtcagtttatcggttttcccggtcaatggggtttgcaaagccggatgcaatggtctatttgcatgatgatgcaacaagtttagaggggagaatcagtcatgagtggaaaccgctgggttactgaagccgccaacggattcggaaccaccatcgagatcaaggaagaactgtacgttgcgcagagcgactatcagaagatcgaaatttacgatacctataaagtcgggaagatcatgcttctcgacggtatcatccaattgaccgaatacgatgaattcgcctatcaggaaatgatggcgcatctgccgctgttttcccatccggctccggaacgggtactggtcatcggcggcggcgacggcggagtgttgcgcgaaatcgcccgccatgccggtgtccagctcatcgacatctgtgaaatcgaccggatggtcatcgacgtctgccgcaagtatctgccgtcgctggcctgcggctacgatgatccgcgggttaatatccacgtcgccgacggcaacgaattcgtccgcgaccggcagggttattatgatgtcatcatcgtcgattccaccgatccggtcggccccggcgaggttcttttcggcgaagagttctatttgcgcatgaaacgttcgctgcggccgggcggcgtgattgcctcccagtcggaatcattgtttctccatcccgccatcgtcaagcggttgctgagcatcgccggaaaattgtttcttcactccggctatgcgatctcctatgtgccgacttatccgaccggttccatcggggtttgtgtcgcctcggacggccgggaggtccggcaaccggttcgccggccggatgcggcgctgcaatcccagttgcgctattacacgccggagctgcatacggcaagtttcgtcctgccgtatttcggcgaacaattgctgaaaggagatggtatgataaataactgacgttcgcggaatcagctttctgcgtgtaatttatggcgattaacttacacgtttggaagcggacaggttgcagactgaatgtttcaatgaggcgcatcagaaacgatgacgaccccggaaaggagattagtcagatctgtaaaccagagcgccaccgtagagagcgactgattaatcgactactctgtatgggaggatggtgaggccgtgacagcagttccgcttcgattcgtgaaaaacgaatggaggcagagaatgatgacaagttttgttggagtggatttgcaccggaacaattttacttattgcatccgggtaaatggggaagaacggaaaatcggcaagtgtgagattaccgaactgaagggctttgccgcaatgctcggtccgaacacggcgatggcggtggaggcgaccggaaatacgttcatgttttgcagctcgctgaaagctcatgtcgggcgactggtggtggtgaatccatcacagttcaaagtcatcagcatgtccaccaaaaagacggacaaacatgacgcaaaagtgttggcggagttcctggaaaaggatatgcttccggaggtaagagtgaaagacgatttgcaggcgaaaatttcaagtctgacgcagaccagggaaaaactggttcagttgcgtaccgtattgaaaaacaaagtcaacaatctgttagcagctaacttcatcgtgctgaaacgggaagaactgtccacggagaaagggcttttgaaagcattgagttatcacttcgacccgatcaccgacacggaaatgctggtggttgtcgaacagattcgcagtctgaacaaaagcattgaaaaactggataaggcgattgaggatcacggcagcaagatggacggcttcgacaacctgaaatccatcaagggaatcggctcgaaaggtgcggcgatcctgttggcaaccatcggcaatatcgctgatttccgatcggcaaagcagttggccgcttatatcggaatcgtccccagagtgagcaattcaaatgacacggtttgccacggaagaatcacgaagagcggcagcaagatcgccagaaccgctttggtgcaatgcgctttgatcgccaaacgctacagcccgtatctcaatgcctttcatgaatcggtaaaaagtcggcggggaggtgcgaaagccaatatcgccttggctcgcaaattcctcgatatcgtgtatagaacattaaaaaacaattggatgtttgagaattttactcaattcaagctcgtaaaaaattgagtttttctcgacatcgaagtggaaatttatcatgggagactgacgcatgaaattccgttttgcgcacaacaatttcaatgtacaggatctggaaaagagcctgaaattttaccaagaggcgctgggcttgcgggaaatcagacgctatgagccggcagaccacagtttcattctggtttacctgggtgacggggtgacgccgcatcaattggaattgacctggctgcgcgatatgaaacggccttatgagctcggcgacaatgagtttcacctggcgttcaccgtcgacgatttcgcggcagccaaagccaaacatcaggcgatgcagtgtatcgtgttcgacaatccggaaatgggaatctatttcatcgccgatcccgacggttactggctggagatcattccagagaaattttgaagccaaaaccatgttgttccggggtcatatctttacgagggcaagccataacagcaaactcgaaatcccgccggaaagcggtaactacgcggagttttacggataaattcggagaattatcgtagctttcgctacaaaataaagtgctctctttcgctgtgtcactttgtttaagttcgctctgtttccaatccaaatgcttgggcattgtttgccgtatcaagactattaaaaaatcagaaaaattaaaatttgttatgacaaaaaaatagcggctatgaagccgccaaaatggactttccgcagaaagtagccaacaaatccttttacaaggacttgtagagttactatttaatatagcctgacatttttcaaaatcaaattgcataataataaaaacatgatataatagttcagtattatgttatttatataagagaaagccgatatcatgagcatgatcacacttgggttggatttgggaatttcatcaatcggttgggctatactcagcgaaaacagcaaagagcgtgaactcattgcgtgggggagccggatatttgaacccggagtcgaaggtacaaccaacgaaatctcagcgggaaaaggcgtatcgcgctgtgcagaacgccgtttgaaaaaggccttgcgcaagcaatatttacgtcgcagaacccgcaaaaaagcactgcttgacatcttggtaagcaacggttttttaccggaaaacgtgaactctgatttttttacgaaaatcgaccaaacgctgctcatgcagctccccaaaaccgaacgcaaccgtttggggcatgttttgccttacctgtttcgcaaaatggcacttgaccgtttgttggataagtacgagctggggagagccttgtatcaccttgcccagcggcgcggttatttgagcaatcgcaagcaggagctgaaagatcaggaaaatgccggaaaagtaaagagcgggatcgacgaattgaaacaggccattgctgacgtcggagcgcggaccctgggtgaatatttttcaatggtcgatcccgaagttgagcgtatccgttgccgctataccgaacgggcaatgtttcaagatgaattccggaagatttgtcaagcgcaacgtgaacatatttccgaacaactggaagcagagcttttccaggccatcttctttcagcgcaaattgaaatcctgcaagggattggttgggaaatgccggatttatccggaacggcggcgttgtgccatggcgaccatggaagctcagctgttccggatttacacgacggtcagcaatctgcgcattgcctgtaattcgcaaatccgttcgctgacggaagatgagcggcagaaaatcatcgaaatactcaacagctactcctcattgttcaataaatccggcaagatggcattatccaaactgcaaaaagccgccgggttgggaaaaggtgaaaaatttacgcttggcgaaggcgccaaagagatttacggcaatgaattgcacaatatactctaccgcgctttcggcgataaagccgcggacatgactgacggtgaacgggagaagtttttcaacgatctgcgttcggtggaaaagagcggggtattggtcaaacgcctgaccggttattggcaacttccgccagaaaaagcagcggagatttccgcgattcccctgcctgacggttactgcgcctattcgctcagggcattgcaggagatgcttcccgatctccaaggcggcgtcagcctgagcgactggttgaaaaacaataaccattccttatccgccggccaggagctcgaccggctgccgctgcttgacgagtgtggatttgaattgcgcaatcctatcgtacaccggaccttaaccgaaatgcgccgtgtggtcaaccgcattgtcgagcgttacggcaagcccgatcgaatccatgtggagctggcacgggatttgaaagcaaccaacaaagagcgcgagcagatcacgatccgaaaccgtatgcgggaaaaagaacgcgaagccatagcgaagcgtattgtcgaagatgtcggtttggagaaagcttcacgcaatgacatattgaaagttatgcttgctgatgaatgcggtcttacctgtccctactccggcgaaagattttccatgaccgaactgttacatggaggttgcgtgcagatcgagcacatcatcccctattcgcgttcgtttgacgactcttttgccaataaaactctgtgcatcaataaatttaatgccaaaaaaagtaatcgtacaccttatgaagcttttggctcttcccctgaatattgcgaaatgctggaacgtgttaaacatttcaaaggagcttatgccgagcggaaactggagttgttcaagcaggaaaatgtcgaaactgcagaatttctggaacgcaatctgaacgacacacgttatgccagcaagcttgccatgcagtatcttgctatgctttatggaggaattgttgataaaactgataagcgtcgtgtttttgccattgccgggggatgtaccgctttgatccgccgagcctggggcggcaattatcttttgggcgaaggtgaaaaagtccgttcggatcatcggcatcatgcagttgatgcaatgaccatagctttgactacgccgggcctggtacaggaaatagcaaaaatgactcctgaacggcgcaaaaaattcaatgatgcgaccccaaaatttatagacagcaaattctacagccaggcatactccatgctcaaccactgtgcggtatcgcaccatgtggtcaacaaattgcgcggagctttgcacaaggaaacaatttacagcaaagattacagcgacggtcaatctctccggcacgaacgggtggctctcaactcgctttccgctgcagatatcaaacagattgtcgatccggtgatcaagaacatcattctcgatcgactcggcgtggccagcgattgcgaagtaaccgatgccatgctgaaagtttttaaagacgaagcaaattatccgcaaatgcttgaccgcagcggtaaagcggtaaatacgatcaaaaaggttcgcatcgcccgtacggtaaacacccgtaccatcggcaagggagacggcaaacgcgaagtggccaatggagcaaactatgtgttggcaatcttcgcaaaactcaatgagcgcagggaagaggtggcgtgggaaggcgaaattatttctctgatggacgccatacagcgtaagcagcgcagtcaaccgctctttgaaaaagaacgttcgggaatgcggttcaaattcagcttgcaaaaaggcgatattgtgaagtttaccaaggatggacaggagaatctgtgcatcatccgcggcatctccctgccgcagttttcttgctgctccatcttagacgcaaggcaaaagaaggatattcaagttgcgaaatgctggttccagcccactgtatcagcagccttcaagtggaatatgcaaaaatacaatatgaacgttttcggagagttgcaaatcgccaatgattgagcggatcattgaaatcgccgaacaatcggcttttctgagtctgaacaatcatttactgacaatccggctgccgaataagcaaactgtcaccgttcccgtcggcgaggtgcagtgtcttattcttgccaacccggcggttacggtcaccggagcgttgctgtcagctttggcggaaagcggcgcggtggtggtcgtttccggcaaggaacgtctgcctgcgtccattcagctgccgatccaaggcaactggatacaaaacgagcgtttccgcagtcaaatagaagccaggctgccgttgcgtaaacgtttgtggcaaacagtgattcaggaaaagatacgccgccagggaaaactgctgcaggaacttcacgacagtgatttcgggttattcaaactggcgggaaaagttcattccggcgatccggaaaatatcgaaggacgagctgcggtgatttattggaagaacttatgggatagcgcgtttcagcggaatcgcgaagcaaaggacagtaacctgctcctgaattacggctacgcaatcttgcgcgccataaccgcacgagcctgctgcggagctggtttgcatcccactatcgggatcaatcatcataaccgttatgacgcatattgcctggcggacgatcttatggagccatttcggacaatcgttgaccacgcggtatatcggctgaaccctagtaatcaaattgtagacgtgttgacacaggatatgcgcagaagcttgatcgcttcattgcaagccaaaacggaaactcctgacggtatgtggaaaatatccgacctcatacaacgttccgccaaccagttggctgagtcgtttcaaagcggagaaattatgttacgttacaattgaagatgatttcggagataaaatccgtgtggcttatggttatgtttgatttgccggtggtcacccttgaagaaaagcggcaatacacgcgtttccgcaaatatctggtacgcgaaggttttttgcagctgcaattctcagtttacgccaaattctgttccagtagagaaaatgcccagaagtattataattatcttcaatatgcagtccctcccggaggaaaagtccggttgctgatggtaaccgataaacaatttggcgatatggtttcgttatacggcaaaaaagtagaagaagtagaaaagaaacccgaacaacttttgcttttctaaaagacaaaagttatgcaaaaaacttatctttggtgtaaatcttaccggtttttcgctctttttttaaaggccttctacaaagtaatttattgcctatcaatttgttgcaaagattacaatgtagcacacttttcaaactctacaagccccagccaactccatacaatactttgtcaaaccgtaaaatgtagcacacttttcaaactctacaagccccagcacagcttgccaactatattccggatgcaaaaaatgtagcacacttttcaaactctacaagccccagcgtttcacttattatctggacgaccggcagtaatgtagcacacttttcaaactctacaagccccagcatcgtgacacggagttttcgacgccgcgaaaaatgtagcacacttttcaaactctacaagccccagccaaggcgacaatgggaagaccgtctggcaaaatgtagcacacttttcaaactctacaagccccagcttctccggtctgatgattggtcaaggttccaatgtagcacacttttcaaactctacaagccccagcgggtgccggcattggacgaatccccgaaaaaatgtagcacacttttcaaactctacaagccccagctcaacggatcgagtaaaaaactggcggacgaatgtagcacacttttcaaactctacaagccccagccctgcaacggcgtaccgaaataccgcgaaaaatgtagcacacttttcaaactctacaagccccagccctgatctgcggtatggaatattctgcttcaatgtagcacacttttcaaactctacaagccccagcttggaacttaaaccatttaaggccacattgcaatgtagcacacttttcaaactctacaagccccagcgaatggaacgctatggccggattgtatcaaatgtagcacacttttcaaactctacaagcccctgcggaatgtttacgaagtagcttttacatgcgaatatagctctctttaaatcgacaagatcctccttgactttgtgtggctgacgcgttataatgaatatggtgctcttttcaaactttataagccccggttcattttagaaagggagtacccggttcatattggattgagattatttcaaagaaattctgaatcacaagcgcatgttgtttcaggcagaggcaacagatctttatgatcggttcccggccaggattccattgaaaaacaaggtgccaccatcagcgaggaacgaaaaaatgtgtagaaacctatgcggtaaaaagattcagaatcagatcattctgacgcttgatgtcaatctgattctgcaacggcttcatgcgctcggtatttccgaactgacggcgattcagtcgctgtgtctgctcaacggcgattatatcaacctggagtgccggctgcccaacggtgccgtgggaaaacttcttgacgacgataagacttattacgctacgcaagtggaaagaatcggcagcgaccgctgttatggagttgccgccgacgaacagcagatcgcagtttacgaatacggcagcaacggcacggatgccgtgctcgtcgcgtgggtcagataccagtccggcgattgcatgaaaccgtccgcttgaaagctttgccgatttcatggcacagccccggccagccagacggttactggctgaaggccatcccggcaaaacgattaggatttttcctgccggtgtgataaaaaaaaatgataccggcggcaatgccattcaaacattgcaggccgtatgtttgctcgagcagagtcatatttgtcatgaggtggaagatatgaaaatacccattctcaaaaagagcgcaaccgcccttttgccaccggagcagtgtctggccaaaacctgcggaatgcaaaaaggttgcaatgtttatacgcatcttgtactgtgcgctctgacggtgcgggctttgcgggatgtgttccgcgggacgccgcgcgaaaacctgatctccgttgccgccgaatggctcgcggccctgcatgacatcgggaaagccactcccggattccagcagaaaatctatgccgctctcggcgaatttccggatctcggcgtgcaggtcgccagagcggaccacgcggagtattccggctggatactgcgggaacggtacggcgaaagttttgccgctcttgccgcggcccatcacggcatcgcccggaaactgggaaacccgcagttctataatgattcggcggcagtttgcggcggagaaggctggagcgcccttcggaagcaaatacgtgaagaagtcattgccgcattgaagcttgaaccgtgcgatacaacctcgttgccagcctggcaggcgccgctggttctcggagcggtggtgcttgcggattggatctgctcgggactggagctgccgtggggcgccccgtttgatgcgatcgacctgtccgaggcggttgccgcggccgggtttgcgccgcttcgggtcacgccggaccttgattttgaagccatcttcgaatttcagcccaatccgcttcagcaagtttgccggcgcaaaccggtgcccggcgagatcgtgatcatcgagtccgaaatgggcagcggcaaaacggaagcggccctctacatggcttatcagatgttggcggccggccaggccgacggaatttacttcgcattgccgacacagctcacttcggaaaaaatccatgcccgcttgaaccagttcctctccagaatcatccctgcggagaaacaccacggcgctttgctgatccacggcgatgcctggctggaatggaatctcagaacgaccgatccggaagattgtacgacaccggaaaatccggattcgtggttccagacccgaaagcgcgccctgctggctcccttcggggccggtacgatcgatcaggccctgctggcggtcctgaatatcaaacacaatgcggtgcgggccttcggactttccggcaaggtcgtaatcattgatgaatgtcacagttatgaccattacactggatttctgctgaaaaaattgatccgggaattgcgccattatcagtgtacggtcatcgtcctgagcgccaccttgaccggagaggcacgccgggaattcgcgctgctggagccgcaacagccggcgcagccgctgctgccttacccgctggtcacctggagccatccgtccaacggcggggagctgacgccgttttcaggcgctgacgcccggacggtgaaggtcgctttcaccgaaaatctggccgaaacgttgcaactcgcactggagaaggccgcccggggagaacaggttttgtggatcgagaataccgtttcgatggctcaacaggtattcctgatgctgaacagttgcgccggcgattgcgaaatcggcctgattcattcacgttttccccgttgccgccgcagtgaaaatgagaacaaatgggtggggctgctggggaaaaatggcgaaaaaaaacggcttgaacggggacggatcctggtcggctcgcaaatattggaacaatcactggatatcgattccgataccctgattacccggctggctccgatggacatgctctttcagcggatcggcaggctgtggcgtcaccgcaaactcgatttttcgcgcccgacaggggcggaaaggcgggccgtcatcctgaaggatccgcggctggaccagccggaacaaatactgcctgactgcgatgccctgctgccctacgaagcctatccgctctgccgtacctgtgaagccctgaaagacaagcacctcctcaccctgcccgatgatatccggccgatgctggaggcggtctaccgccggcgcacggaatccggggcgctcagggccatgcaggagcggctggaacggaagatcgaaacgctggaacgtcaggcccggatcgcagcaggcccggtcatggacgtgcgggacgacgaccacgcgacaacccgtatcaatgaccttccaaccgtgcagatcttgctgttggagaaaaataatcgcggcaaaccattgactgatgttctgtattcgccctttgacggcgctccgatcacgctgccttccccctcggcctccaagtcaagccatgtagaggcggccagacggatcatgcggacgctgatcaccgtgccggaacaccacgcaccgcgctatgacggattcacggcggaatttctcgcttcggcgatctggatcggcaacgattcgctccgcccgatccgggtggcatatctggattccgacggccggctgctggaccgggcggcgaatcccctgccgttccgctaccatgaaaaaattggttacacttatgataccccgcagcaaaaggagtggttatgaatcccgaagaattcagattcaatctgatcgacgatccctggatcaatgtcatcggtcagccgcgacaaagtttgaagatgttcttcgccaacccggaactgagcagactcggcggcaacgcgctggacaagatcgcgctgctgcgttttctgctggcgttgacccatgcagcggtccgcatcccggatgcttcgacctggcaggaacttacgcccggggatatcgcggcaggcgtcctgcgttatctggaacagcatcatgactgcttcgagcttttcggcaaacatccgtttctgcagttcccgcagctgaaaagcagccaaaagctccagccgctttccgcgctgcagccgagtgtctcaaccggcaacaaaccggtgctgacccactggaatctgccggccgcgccggaaattgccgagcttcccctgctgctgctgcgcggctgcggcttcgggttcggcggtaagaaatacgacaattccatcgtactgactcccggctatacgggaaaattcaatgagaaggggaagccggcttccggcgtgccgggaaccctgctgggttttcagggttatctgcacagttacctgcagggcacaacgctgctggaaaccatccgcctcaatctgctgaccgaagaggatgttgccggattgtcggtcttttcgcgcggtatgggacgtccctgctgggaaaagatgccggaaggcgaagattgcccgcgggcgcgggaataccggcacacctaccagggggcgctgctgccgctcgacaaattctacctgctttgcccgccgaatgtcgtcatgacagagggaatccggtatcccaatcatctttccgggctggtcgatccggcgctgactttgtaccgcgacaaaaacaaagaccgggcggtatggaccaatccggagcaccgtccctggcgggagctgccggcgattctcgcctttctgcaggcagagcagcgccgaaaggcgccttatacgctctcctgcggcctcgaaaaaatctctccggacaccgaaatccacgtctggacagccggagtccaggtcagttctaatgccggggaacaatatctctccggaaaaaatgattacgtcgaggcggatttttatttcccggcggcaaacctggatcagaacggttatcgcaaatactgcaatatgctcgccgcgatcgatggctgcgccaaaacactgtatgcctccgtggccgggtatttcaaagaactgcagaatctgaacggcgccggaatcgcctcccaagccgcgacgctgttctgggaactgctgggcgaagaggctcagcagatcgtggctgccgctttcgccgaaaaaatcgccgatgaggaagtcccgccggaattggcgggacagtggcgccgccaggtccggatgctttacaaccgcttctgccccttcgataccgcacgtcaactgatggcctggagtgagcatgagccgtttcagaggaaaaagaaaaccggaaagaaaggttgaacaggatgaatgagaaacagaaatggaatccgcagggatttgtcgcggcagtgatccgccgcgccaaggaggacaccgcatttcgcgccgccatgcgccgcgcggacaatccgcaaacggccgctttcgcctgggaacatctggctgcctggtgcgatatcgccagcgaccgggaacggctggcgtttgcgctggccggagcggcaatcgcccgggaacagcccgatgccgacggccggaaaaacctcggcgaagtttttcacgcctgctgtccggaccgggatgccagggaacgggaacagcgccggttccgccgccttctcggctgcgactccgccgaagagctctgcgaggtcctgcgaccggtcctgcggtacttgcagaacaaagcgccgggcggaatcggttatgccacattgctgaccgatattctgtattggaatgaacgggtgaaactacgctgggcccgcagtttcttcggacatgccgaaaccgcagacaccggggaagaaaatcatgtttctgactaaattactgctggatgtgaaattctgccgccaggagaaaatctccgacgcctacggtattcaccgcactgtatattccatgtttccgcctcaggaaggatcgcagcgcatcctctacgcggaccgaggaccgcgccgggacggccgggaaatcgtgattctttcgggcgtgcagccggaactcccgccggatgtccaggcgtccacactgcgaatcggagaacgtttttttgcagcccgggaatatcgctttgaagtcttgctcaatccggtcaaatgcaaccccaaaacccgcaagcgggaaccggtcatcggtcaactgccgctgttgaactggtttgtcggccatgcagaacaatggggttttcaggcggatccggaaacgctggaactattcgtccgtcccagcctcagtttcgtcaaaggcggacacgcctatcgccttcacagtgtacagttccgcggggttctccgggtaacggccccggaacgcttccggcaaagcttcaccgccgggctgggacatgggaaggcatttggattcggcctgctgcaactgatgcccgtacaacaataatgatcgttcgtgtcgattcaatcaatcatattatggaggtttcattatgaccggcaaattcaccaacacccgtattgaatttcacatcctgcaatcctttccggtgtcctgtctcaaccgtgacgatgtcggcgcgccgaaatccgcaataatcggcggagtggaacgcgcccgggtcagcagtcaatgctggaagcgcgcggtacgcctggcacttcaggcagagggcgtggccatcgctgcgcgcacgaaacttgttgcggcaaagatcgcggagcagtgtgagggaaagggagcctccccggaacaggcgcagcagtgcggggaagccgcggcaaaagcattgaccaaaacggtcaaagacggagccagcgacaccttgtttttcatttccaattccgaagcggcggaggtcgctgcggcatgtgcggcaaacgacttttcgccgctgggagaaaaagagctggtcaaactgctcaaacagcatgtcaacagcgcgctggacggtctggatatcgcgctgttcggccgcatggtcgccaatgtccctgaattgaatatggaggccgccgcatcgtttgcccatgccatctcaacccacaaagcgacctctgaagtcgatttcttcaccgcggtcgatgactgcaactgcgaagattccggagctggccacatgggttcgctggagttcaattccgcgacctattaccgttatgtgtcgctcgatctgggacagttggcggcaaatttgcacagcggggagctggacacggcggtcgaagctttcgtaaaagcgctcttcaaggcttttccggcagcgcgccaggcgacgatggccgccgcctgcccctggaattatgcgatcgtgacggtaagaaacggccagggcatgcagctgccgttcaatgctccggtgcgcccgcagcatggcgaagacatggtctccgccagcatccgggcactgcagcaacggtttgccgaagtggagcgcatgtatggttctcttttcggtttgcgggcaaaatttgagatcggcacccaatccggcgatatcgattccctgctcagcgccctgaagcaaacgatccaggcgatttgactgccggaggatgaggcatgaagaaatttctgaccttatggcttgaagggccgttgcaggcgtggggctatgactcccggttcgacacccgtcgtacgttgagttttccgacccgttccggtttgaccggaatgctgctcgccgccgccggcgcttccggaccgcagcaggagctgctggcggaattagcggaatatccgctcaacgtttacagctttcacgacagcggcccggcactcaccgactttcatatggtcggcaacggttacggctccgcgaccaactgggcgaaactgatggcgcccaaaaagctggacggttccactccggtcggcggcggcgccaaactgacccgccgggattatctggttgatcgttgttttgcggcaatctggatcatgccggaacagccggcggagaaattcgcggcggcattgcggaatccggtctacgagctttatctcggccggaaatgctgcgtcgcttccgaattgatctttcagggaagttttccaaccgaatccgaggcgctggcccgcgtccgggaactggcggagcggaaaaaacgtatgccggaatgggtctatcaggaagtcccggaacgggaagccgattccgaaagtctgctgctggcggatgtgccgctgcgcttcggtctccacaaactctatcgggaacggtgcgtgaacaaaatggtttttgttttctgattccggctctggcggcaggacg

SEQ ID NO: 461 - DNA, 23081 bp, synthetic construct
  misc_feature 1..23081: note = Synthetic
  source 1..23081: mol_type = other DNA
gaagcagcacgacaagcgtaagcaggatgacgcggaagacgcgtttgccggacgatgcgttggagaaccgggcgatgcgttcgtccgtgccaaacattttacgaagaagtccggtccggcgaacgccgccggcaatggccagaacgaggatcaaaggaatgatccatagtaaattccataatatgttgccgctgagaaatgacatgtcgcaatacttctttcgggcgggttccgccgttccgttgatggttcagatggttgacgcccggtttcttgggggaacagaatgtccggcgtcaatccttttagacacgctatttcgcggtttgttccatcacggcatcccccggtgtcgcaaatttccggcacaggaccttgaactggtcgccgcggtctttataatcgcggaacatgtccatgctggctgtcgcgggcgacagcaggaccacatcgccggccttcgcggcggcaacggatttttcgaccgcttcggggaatgtcgcgcacatggaaaaaggaatagagttcttttcgagatacgcggcgatcttctgtccgcacgaaccgaagacgacggcatgtttgaggtgtttcagactcggcgcgagttcttcgaaatccatgtccttgtccagtccgccgagtaggatgaccacgttgtgttcgcctccgaccgaagccagcgctgcgttcacggcatgcggattggtcgccttcgaatcattgatgtactgcacgccttttgcggtcaggaagcgttccagtctatgcgggccggactcgaatttcacgagggcatcgatcacggacggatcgaacacggcgttttcaccctttacagaagcaagtagcgcgagcgcggcgagcgcgttctccaaattatgaatacctttcagcgcgagtttttcaactgggactatggtgcgtccgcgaaaagaaagcatgccgtcccgcaccgtgaaatcggcaggcaaattcgccgagaacgtaaaaagcttctgttcgggggcggcggatcggaaacggttgaggatgagcgagttcaatgcgcagacggcggcggggtcgccgagcagtttgaatttggcggcggcgtacgcctccatgctgccgtgacggtcgatatggtcggacgccaggttcaggaccgccgcggcagccggatgcggcacgggcatgatctcgagctggaacgaactgatctcgacgatggggagatcgagcttgccgtcgaggcagtcgatcgcggcatcgctcatggcatatccgttattgccgcaggcgcatgcccggactccggcggcgcggaaaagctccgcggtcagctcggtcgtggttgtcttgccgttggtcccggtgatgccgacgaacggtttcccgcaggactcgagcgcgaactcaagttcgccgacgagacggccggagacttccgcgagtttcgcccggacggggttcccggcgcggaatccggggctcaatactgtgcgttcgaagcggggaagtgcatcttgcgcatggaatccgaagaagacggcttcgggctgtttcgggagggatgcggcgaacgtccgcagggaatcgttgtcctgttcgtcgagcagcgcgaacgggatgccgaggcgggcggcgagtctggcggcggcgcggccgctgacgccgcatccggcgatgagcgtcatgccgcagggttcattggtcataagttgttttccttcataagaaccggatcgcgtttgtaccacgtgtgcaggtccagttcctggtcgttgaaaatggtttcaaggtcttcctgttcgaggttccggtactccatgagccgggcgagacgttcccgcaccgcatcgaccgcgccccggctgcccagacgctcgtagacgtccatgagcatgaggagcggcagaacggaccgcgggcgcagggtcatggcgcgtttgaggaagggcacggcgtcgaccgggtgcccgccgagtacgcatgcgcgggcgaaatagtcgttgacgtagccgaagtccggcgtgctgctcgcggcgaacatggtataatagcgcggagcgtgcgccgtgtcgtggatcgaggcatggttgagcgcgcgggatttgagcggcaggcttgagccgggcatggacgccgccatgaggtagagccgggccgcgtcgtcgtgtttgccgtccgtcgcgacgttgtccgcatgccaggcgatcgattccgccgccaggttgctgaatgcggaaaagagggccgttccgaacagaacgagcccgagcgcggagagcgcgggacggatcagacgacctgtgcggcgttcgggggagcggttccgttcaagtttcttcaggaactcccagcggaaccgcctcaggaaggcgggcggacgccagaagggcgcgggcgcgccttcgcgttcgtggatgaggagcccgaggaagatcatggcgaggagattggtcggccagcggaagagcacgaggtcgaattgcgcgtggacgagcaggccggcgaggcacagaagcgagagcctcgtttcatcgtccattccgcagccccggaattcccaggccgtcatccccgccgggagattgtcgtccgtgcggccccaggtttctccggcgatgcgtttcgcggcgaagaacatgggttccagcacaaggtaaagccagcagagcagcccgaggatgccggacgatgccgcgacgtacagcaaatggttgtgcggatggtcgacgcgtactgcggaatggcgcatggagaagaactccggacggcggaaattcagatattcctgttcgaacgacggtgcgccgaacccgatttccggctgctccgcgatcatgttcatggtcgtattcgccaggaaaacgcgttcatcgcgcgagagctcgtcgaggatgcgttcgtgcgggacgaagaacgcgaaccacagcgagccgacgatggccgccgtcagcacggcgaagagcgtcaggcggcgtccccggtttccctgcttcagaaatacccacagcgctccggcggtcgcgatgccgaggagcgtaccgcgcgaacccgtcagcttgatttgccagccggttatcccgatgatgatgagggcagacccgatgcgccacagggagtttgccgaccagttcgattcggagggacaccatttccatgccgccaggatcgcgaacgacgcggtgattgcgaggagcgaggcgttccagttgatgtttcccggcaggccgaagagcatccagtgcagcccatagtactggacgaatccgagcgtgacatcgaccagccagatgagcgtcagataccatggcagcagacgcttgagctcacgggcgaacacgcaaacgcagagcggcacggcgaccgagaggaagagctcgcccgtttccgctgcgttgtattgtcccgcatggctgatcccatgccacactccgatgccgagcagaatgcctgctgagatgagcaggccgcgcggaagatggtcgtatgccgccaggatgcgttgaggaaagagcagggccgcgcccgccatcgccagtacgatcgtgcccgtttcgaagaatcggaacgaccacgacggcacgcagaggagcatccccgggcagaccagcagggcggccaggaataggaacacggcggcggtcatggcgctgtgtgtggttgtctcctcgttcggcatggtgaaattgtctccaaaaacacggaaaaatggcaatctaatactgtacatgcggaatccgttttttcaaggtttttatatttgcagtaactgttttttccgccggacgtcgccggttgttcgcatctttcccgaaaaatgtacgaatgcgggcacaaaaaacacttttttcacttgcgaaacgcgcgttgacgcattacattatgtaatggcggggcaccaaagcccgtcaggaagggtaccaatgaaagacgacaaagacaatcagaacatggaattcacggaggcgaaggaccaggcgtcctttgctccgctcagtattaccgtttcaggagaaaaaggaaatgacccgtcccaggacgattcctccggggaccgcatcattgatgcgcccgccctcattctgggcggcatcgtcgtgtttccgcacgcgctcacgccgcttgtcctgaacgatcccggcatgatctcgatgatggacgccgcctcgtccggcgaccgcatgatcgcgctgttcccggagatcccggacgacgaatccatgcgcggcctgatcaagggcaaggcgtttgatccgaatacgagctcgttcctgctcaacaagcgcaggatcgcgtccgtcggcgcgctcgcccgtatcgtgaagaccctgaaattcccggacggcaccgtccgcgtgcttgtgcgcggcatcgcgcgctgccgtttcatgacggtcgtgccgggcaagccgtacatggtcatgaaggtgcaccggctttccgataccccggacacgtcgatggagaccgcggcgatggtccgcaacgcgaccaagcagttccaggaggtcatctcgttcgcgccgaatttcccggaggaactgaagatcgccgtgctgaacatgacggacaattcccgcatcgcggacgtgatcgccgacacgctcaatatctccttcgcggaaaaagtcgtcctgctcaccgaactgaaactccaggaacgtctgcatttcctgacgatcctgctcaaccgcgagctcgaggtcctgcgcctcggctccgagatccagcggcaggtccacgacgccatgtcgaagcagcagcgcgagttcttcctgcgcgaacagctcaagcagatacgcgaggagctcggcgaggacaaccgcaacccggacgtggtcgcgatctcggaacgcatcgaaaaggcgcatctcccggaagccccgtacaaggtcgtgaccaaggagctcgaacgactcaacatggtcccgccgtcctcgccggagtacaacatctcctacacctacatcgattggctgctcagcgtgccgtggacgcaggcgaccgaggagcgcgccgacgtgcaggtcgccgcctccgtgctcgacgccgaccattacggtctgaaggacgtgaaggagcgcatcctcgaattcctcgccgtccaccagctcaagaagaacagcaagtccccgatcatctgcttcatcgggccgcccggcgtcggcaagacctcgctcggccgctccatcgccgtctccctcaaccgcaagttcgtccgaatgtcgctcggcggcatccgcgacgaggcggaaatacgcggccaccgccgcacgtacatcggcgcgctccccggacgcatcattcagggcatgaaacgcgccggaacggtcaatccggtgttcatgctggacgagctggacaagctcggcagcgactacaagggcgatcccgcatccgcgctgctcgaagtgctcgacccggagcagaacaaggcgttcaacgaccattatctcgaggtagactacgacctcagcaaggtcatgttcatcgcgaccgcgaacatgctggagaccatccctcgtccgctgctcgaccgcatggagatcatccgcctgcccggttacaccgcgctcgaaaaggagcagatcgcgaagcgctacctgatcccgcgccagatggtggaaaacggcctcgacaattcgtttgtgcgcttcaagcacagcgccgcgttcgagatcatcgagcattacaccatggagtccggcgtccgcagcctggaacgcacgatcgcttcggtctgccgcaagctcgtccgcaggttcgtcgagaagaacggcggtcagccgccggagaaaccggtcgtcgtggacgacgcgctggtccgcgaactgctcggcccgcgcaagttcaccagcgacgagagcgagaacatcccgcgcgtcggcgtcgtgaccggcatggcatggaccagctacggcggcactacgcttgaggtcgaggccgccaagatgccaggccgcggcgaactgaagctcaccggctcgctcggcgacgtcatgaaggaaagcgcgctcgcggcgttcagctacgtccgcggtcacgccaaggcgctcggcatcaaccagaagattttcaaggaaaacgatttccatatccatgtgccggacggcgccacgccgaaggacggtccgtccgcgggcgttacgctcgccaccgccatcgtctcgctcctcaccggcaagcccgtgcgtccgcgcctctccatgaccggcgagattaccctcagcggcaaggtcacgcccatcggcggcgtccgcgagaaggtgatcgcggcgctccgggcggggatccgcgacgtcgtgatgcccgccgacaacgagaaggacatggaagacgtcccgcaggaagtccgcagcaggatcacgttccacttcgtccgcaccatcgacgaggtgctgaagatcgcgatgccgaagaacgtgaagccgtacgtcccgaagcgcgccgagaaggtcagggacgagttctacgagtacgacgattatctgttccagaaggtcgaacccgaggacaagaagccggaacagaaagcggattccaagtccgaggtcaaagcggataataaaccggccgcgccggaggcggagaagcccgctgtagagaaacctgtcgaggaaaaacccgccgccaagcctgcggaacccgtaaagcctgttcaatccgaggcgaaaccggaatctgcggcgaaaccggaagaaaaaccgtccgcgccggaagcgaagaagccggagcccgcgcccgccgaagaaaagaagccggaaccgccgaagccggaacatcattccgcctcgcagttcgagttcaggatgccgacgctggtcgtgaattacgggaaaaaaccgaacgcctcgttcacggtcggccaggccccgctgaaagcgcccgaacagcaccccctgccggagccgctgaaacccgccccggcaaagtcgttcaaagcgtcggaaaaactgcacctcgatgtgaagatgtcgaccgcgagcgaaaccggcgacgccccggtgatctcgcttcatgctcccgtgaaggcggaaaaaaccgtctctgctccagcacgcaaaaagcccgtccagaaagccgcaccgaagaacttccgtcccgcgaaaacgcagaaactccgggtcaaagtctcgtccgcgtccgccgcgcaggccggagacgccccggagaagaagacgccgcgcaaaaaagcaaaacctgccgccccggccaagaaaggaaaatgaccatgatccgtatttccccccgtttgattctttgttccctgctgaccctggcggccgcctcgttcgcgtacgccgccgacgagcccgcgaaggaagccgaaccgcagaaggaccttccgcccgaaatccttcagatgctcttccccgagggcgcggagaccgatcccgcgaagatttccgccgaggcgttcctccgcatggcgcgccgcgcccccgccggcgaatcctgggcgaagatggaaggcaccgccacgcaccgccgcagcggctccagcgcggtcaaggacacgatccgcgtcggcatccgtttcaccccgaaacgcgtgatcgcgcagctcgtcttcgccggaaacgaatactacgagatgggccagaccttcgacaccccgcccgtcttcacgcaggagaccgacgtcccggacaagaacaagacgcgcctctccctgtacggcatcatgccgtccgacctcacgctcggattcctctaccgcgacctggtgcgcgaggagaagccggagagcgtgaagatgatcgactgccgcgtgttcgtgctgaagggcggcgagaacgactatgtgcgcgtctggctgagtacggaatacttcttccccctgaaggcgcactggttccgcgcgctccccgacgacaaggcgaagccgtaccgcgagctcgagctcggcggcgtgaagaaggaaaacgatttctacgtcgtgcaggagctgttcctgttcgggcaggactggcgcacccgcgtcgagttcgacaagcgcgacgccggacgcgtggaggaggcaaaggcccccgccgacctcttcctctcgaaagacgacgaaacgcccgcggtccccgctccggcggacaaggacgcggacaaggataaagccaaggacaaggaagacaaaaaatgaacttccgcacggtcgggatcatacggaacggactgcggcgcggcgaatccggtcaggctttcgccgagctgacggtctcgctcatcgcgatcctggccgcgttcgtcggattcctcctcgttgccgcgctcagttcggaccgcgtgtcgacgctcatccgcgcccgcgaagaggccgacatgaagagcgcgggcggcgtttcctcgcagagcggcgacagcatccgctactgggactacggcgcggacgagatcccgttcacgacggacgaccgcgccgtgctcggttccgcgggcgacggcgcgctgttcaaacgccagctcgccgacaacaccgggcacgtggggctcaccaacccgccgtcctcctcggccctccgcagcgatttcgcctcgctccaggacgccaatatgttcgtgaacgccgcgagcctcgccaccggcgacgccggcaccacgagtacgctccgcgaccacaagatcacctcgctcgaacccgcgatccgctggctcttcggcgtcggcggcacgcgtgtcgaggagaaagtctacatgcccgcccacaaagagctttccgatgaaagaagcaactgatatgaccgacccccacaccaaagtcatgaccctggaacaggccgtcgaagcccgcctgaagctcgccgccgagggccgcaagctcgccgtcaccaacggctgtttcgacctgctccaccgcggccacgccgaatatctcatgcaggcgcgttccctcgccgacgccctcttcgtgctcatcaacagcgacgaatccgtccgcgcgctgaagggcccgacgcgacccgtcaatcaggagctcgaccgcgcgtttcttctggcgtgcctggagttcgtggacggcgtggtcgtcttccgttcgtcccgctgcgaccgcgagctcgccgcgctgaagcccgacgtctatgcgaagggcggcgactacacggtcgaatccctcgacccatccgaacgcgccgccctgctcgaagccggggccgaaatccgtttcatcccgttcgtccccggatattccaccacgggaaccctcaaaaaagccgccggaaaaggagcctgatccccccgatgcccgttatcctcaccactctttacgacgcgcagacgatccgccgccgcgtcgaggaactcgccgccgacatctcccgcgcctacgccgggcaggaactcaccgctgtcatcgtgatgaacggcggattcttcttcgccgcagacctcctgcgccatgtcgatctgcccgtgcgcgtggattccctccccgccggctcctacgtgcaccatgcttcgaccggacagctcacgatgcgcggccgcctgaaactcgacgtgaaggaccgccatgtcctcctgatcgacgacatcctcgacaccgggtttacgctcgccgaactgcagaaaatgatcctggcggacggcgccgcctcctgccgcacctgcgttctgttcgacaaagccattccgcccgaaatgaaaaaagcgaagcccgactggtttggattccacgcccccgcggagtacctcgtcggctgcggcatggactccgacgagctctaccgcaacctccccgacatctgcatcctccgcgaaagcgaaccctgatcccgcccccgcctcaatcccccgcgcacgggcaaaaaaaaaaagacggctgaattgaagccgtcaaatggttttcccgtgggaatgaaccatcatatcctttaccaggacttgtagagtaccaataatctaccatgcccggcaggaaatgtcaagtatttttttataaaagtttgatttttctccgcccccgtgatattatatagcggaaacatacagaaccgctacagaaaggggcttcatcatgccgtacacgacactgggactggatttaggagtcgcctccatcggctgggcgctgatctccgaagacggagacagggaattccacctgaaggcatgggggtcccgtattttcgagcagggacttgacagcggaagcggtctggacgggatttccgcgggaaaagggacctcgcgcgcgaccgagcgccgccagaaaagggcgctgcgcacacagtacaagcgccgtcgcgaacgcaaaaatgaactgaagcacatcctgacggaaaacgggatgctccccgaaccgttcacgcctgagttctttgtcgagctcgaccgcaaacttgtgcagacgcttcccgaggcggaacgcgaacacgccgcccacatcgcgccgtatctctaccggaaactcgcgcttgaccgtcccctcacgaaagaggaattcggacgcgcgatctaccatctggcgcagcgccgcggctaccggagcaaccgcaagctggacctgacggacaaggacgttggcgtagtgaaggaacgcatcgcgggactgaagtccaaaatggagcaggtgcacgcccgaacgctcgccgagtatttctgtacgatcgatccgaacaaggaacgtatccgcgcacgttacacggatcgcgccatgtacgaggacgaattccgcaagatatgcgaggcgcagcgcgcgatcgtctcccccgaactcgaaaaacagcttcacaaggcgatattctttcagcgcaaactcaaatcctgcaaagggctcgtcgggaaatgcgaaatctacccggaactccgccgctgctccatggcgaaggaggaggcgcagcttttccgcatttacacgaccgtctccaacctccgcgtacagaaaggtgataccgtccgtccactcacggatgaggaacacgacaacgccgtcgccttcctgaacggctattcggacgacatcaagaagggcaaggtttcccttgcaactctcggaaaagtcatcgggcttgccaaaggtgaaaagttcacgctcagtgacgaaagcaaggaaatccacggaaacgagctccacgccgcgctcgtccgcgtcttcggcacggaaaaggccgccgccatgagcgccacagaacagggcactttcttccacgacctcaaatccattgagaaggacgcgattctgaaaaaacgcctctccggctactggaaactcgcttcgccccaagtcgaggccgccatgacggttatgccgccggaatcctattgcgcgtattcgctccgggcactcagagaaatgctcccaagtcttgaatcgggagagtctctcccgacgatcaaaaaactcctttatccgaaacaggtcggagcggaacatgatttccttccagttttcgacagcaaagaatgcaacattgacatcaggaatcccctcgttcaccgtgtgatcacggaactgcgcgcggtcgtgaacgcgatcatcgcccgctacggcaagccgaacgaaatccatattgaactcgcccgtgatctgaagacatccaacaaggagaaagaaaaaatcaccagtcagaacagaaagcgggaaaaggaacgtcatgaaatcgccgaacgcatcctcgcggaagccggcatcgaaaaaccctcccgaaacgacatcctgaaggtcatgctcgccgatgaatgtaattatgtctgtccatatacgggaaaagacctacggcctttgaaaagaatcctgtacgggaaagacatccacatcgaacacatcatcccgctgtcgcgctccggcgacgattcgttccgcaacaagaccctttgtgacgcctccgcgaacagcgccaagaacaaccgtacgccgttcgaggcatactccggcgaacagtacaggcagattctcgcacgcgtcgcgcagttcaaagggcattatgccgcggacaagctcaagcttttcaaaatggaagagctggaaaacgattttatcgagcgcaacctcaacgacacgcgctatgccagccgcatcgccatgcagtatctcggattgctctacggcggcataaatgacaaaaaccacaagcaacgtattttcgcgaccaacggacgcaccactgccctgatccgcagcggctggggtggaaacgacctgctcggcgagggcgagaaagtccgcacggaccaccgccaccatgccatcgacgccctcaccatcgcgctcaccacgccgggcatggtgcagaaactcgcgtccatgccgtccgaacagcgccgcaagctcaacgatgctggaattccacaaattgatcctaacttaaggaacgaagcaaaacaggctttgaactccgccgccgtctcccatcacgtccgcaacagactccgcggcgaattgcataaggatactttatacagcaaagattacgggggaacggagcgccatgtccgcgtgagtctggatgccatggagccgggcgatgtcgcgaagatcgtcgaccccgtcattcgtgcgctcgtactggaaaagcttggtagatccaacccggaagacgttaccaaaactgatttcaagcttttctgtgatcccgccaatcttcccattctacgcgataccaaggggaatccggtcaacgtgataaaaaaggtgcgcgtcaggcagaacctcaagaccgtcacggttggatctggcgacggtatccgagaggttaagacgggatccaactacgtcctacccattttcgcgaaactgaacgagaagggcgaggaaaccaagtgggaaggtaagatcgtcacgctgctcgacgccatccagcggcagaaacacggtctgccgatcttcgagaaggacaaccccggatacaagttcaaattctctcttaaaaaagacgacatcgtcaaatggaccaaagacggaaaagaatatctatgcgtcgtgagggggatctccctcccgcaattctatctggttccggtggaagaagcgagaagaaaaggagatattcagaaagggggatgctggttcccgctgaccatttcccgtgcatttaacggcaagctgcaaaagtaccgcatgaacattttcggggaactgcgcgatgccaacgactgacacattgtcaagactgcaaaaaaacaaaaagcatcgcattccatttctggataacgatgcttttctgtggtacacttgttatttgaaatcagatcagggtaccatttgaactctacaagccccagcacagtgttgcactgccgccattccgacgccaatcaagtgtaccgtttgaactctacaagccccagcaaggtctcgaatgggacggcaaatagaagtaatcaggtgtaccgtttaaactctacaagccccagctgattctcatggcgaaccctgacgcaaccgaatcaagtgtaccgtttgaactctacaagccccagccagcaaaccatctgccttgattgcggcgcgaatcaagtgtgccgtttgaactctacaagccccagcatgtattccgcctccagtggatcggacgggaatcaagtgtaccgtttgaactctacaagcatgtggagttcaggttgtcaaagaacacggaatcaatatagcacggaaaccgggaaaaacaagcggaaaccggaaaacgaggcacaaaaaaggcgggctcctgcccaaccaagaaacaggagtccgctcgtttgttttgcgttttggggtcgcttcgctcctcggaaaactcgcttacgctcgatagattacttaccgcgaggcgcgaaatccgagggggaaataccccgggcagtaagctgaattacatcatgcctgtaaatttttatgctcaaaagcaagaaaattttctgttttgtgcttgtaatttgcctttttgatgctattttataccaaacacgggcaaataaacacaaacaagcaaaggatcggtaaaaaatggcacgaacgacacgcggacggctgtataaacgagggaagaagggaaactattatctccagtattaccaaaacggcatagagcaccgcgaagccttgcgagacgaacacggcgaaccgataaccggggccgatgccgcaagggccgccgcagatcgcattcttgccccgctacgctttaaggatgacgcgcagaagctccgaacgcttgtaagtgagctttcctctttggaaaagaaagcggaagatgccaccgccgcactgaaaaaccaggccgcgacacttgaaaacggctgggaatgctttttgaaatgtccgacttgcccggacacttacacgcgatacgggcagagcgaaccgccgcacgacagccgcgcttatatatccagggggtactatcggaattttgtttcctggacgcagaagcatcacccggaaatcatacttttaagcgaagtatccgaaggtatagcgcaagagtacattaacacgctgaaagaaaagtatggatcaaacgggcggccagttaatgaaagattgcgaatactgaaacagatgtatttttccatgctggaagatgaaaaaatagttatgccgcgcgacccgttcaaaaggataagaaggctaaaaacatttacaaccacgaaagacgcgctcacgatagaggaagtccagcggcttgtaagcgccgccaaagatgctgaaatgcggagacttgttttaatcggtttttgtacgggcttgcggctgggggattgctgtacgctccaatggggagaagtggatctgataagacgtgttatttcacggattccgaataaaatgtgcgaccgggtacagaacccggagaatgtacgagtaaaagtagggattcccgcccttttgatgaacgagcttttagcaattccagcagaacagcgaaccgggccagtattgccgcatttatgcgaacagtacaacgaacgccacacggggctttataagcagatcagagcgcttttcaaaagcgcaaagattgttacaatcaagccagggagtaaagacgcgcaacatccgcacgggattatcataaagggctttcattcgctccggcatacattcgttagcctaagcgccgaagccggggccccacaacacgttatacagcggattgtcgggcatagttcgcccttgatgacgatgcattacacgcacctgggaaacgccgatctattgcgaagcgccgacagcctgccagccttgcccctggagaccgcgccaggaaaggagaccgccggggccgccgccgtgatcgatgtttcgcccctggagaccgacgatcagacggaacgcgatcgggcagaactccgggcgcttgccgacaccctgccgccggatcagatccgggaaatactgaaccattaccggggagcttgaagcatgacagataaacagaaaaaaatagtcgatgattatatatcgaacgtgaaaagccgttattcggatatttttgattttgtgttattccttccttgctctaccccttctttttgggggaaagagcttatagatcggctatcagattcagaccgggaaaagttggatagttttctatcagaagcgcgccccattcgcgaggacattagcttttgtcaagaaaaaatacaagcgcggatgaattgttgtatagaccatgtagaaagaattgcagccggaacagaagcgccaagagacgctatgcagctttacttgacattctacggcctttttgatgaaagcatacgtttttccgcgcttgcgatgcagtctataatgctttccgaaaggatcgcgcgcctgctggagaagtatagcgacgaagaaacgaacaccgccgcacgtcagcacctggacgaggtaaaaaagatacttgacgtgatccacgaggaacacgccgccacgcgggaaatgataggagatcagcaccgccacgcctgggaacgctgggccactgttcccgaatgtgtacgcgctattgtggatatggcaaagaccgaaaaagccgacgggaaaaatatttctctaccagggaatgaaaacacgttacggattaaaatttcaaactggttaaatgagcacggaaagcgccgggaaggaacgcagaaaaaaccgtattttcagaccgcagatatagcagatgccgcaggagttttttataaagaatttgagcccgttcaatatctccgggagtttgaaaaaatcggcattcccgccgaacgcatacagaaaccaaaaaagaaataaactcgaaaagggttttagaggagttttagaggaattataaaaaattgtgctgtttttttgagctggagacgcaccaccacgcgcaccgtctccggctttttttagaggattttagagggggaatagtacattttcggcagttccaacacgcaacaaaaaacgcaaggagatgccaaaaatggaaatcagaaccaagatcacgccgcaagtgatcgccgccgccactggattactgcaacccttcatccccgatctttccccgcaggggcttgtttcagccttgaaggagtacaacgccagcaagccgaagccggagccggataatcggcccatgacccgccaagaggccgccgagctgctgaagtgctccagaaacacgatcagccactatctttcaatcggcaagctccgcaagatcacgcttacagcaagatcatgccggatcgatcccgcgagtgttcgcgccctgctttccggggagaccgccagcgccagccaggaaggataagccgagaatgcacacgcacgacgatatagcccaatatctgaacgctctttccgccgacattgatcgcgccgcctggattgacattatgagcgcttttaaatcagccgggggagattacgaaaccttccgcgcctggagcgccaccgcgccgcaccgattcgacgagaacgattgtaacagcgcctggaacagcatcacgccgtccgggaatcccgaaggggccggcgggatgctccgtaaaagggcgaaagaagccggggcaacattcgacgatctgccgcgccgagccaggaaagcaccgacggccccgccgccaccgccgcccattcctggagcgatcccaccgccgccaccgccgccgtcagcgccaggagacaccggcctgcaggggtataaaccgggctttctgccgggggccgcgctccgcccttcccctggagcgaacaccgcgccgaaaagattgatcgaacagagtgccgaacaccgtgcccaggctttgccataccttgaaaagcgaggcattaccgccgccaccgccgaacgtttcaagataggctatgccgaacatttcgagcttgccggaacccacgaaccgcgcattattatcccttaccctggagcggaaccgccgtattttgtagcccgcagactttcagcggccggagacaaggacgggaaaaagtatctgtatccggcaggggtaaaaaagccgctgttcaatttgcccgccctcacgagcggcgaaaaggccgtttttataacagaggggcagatcgacgcaatgacgcttgaacagcagggcggggccgccgtcgcaagcaacgaagaaagccaaattataaacgcgatcagaaccgagaaggatttaacggcacagatttttataatcgttcccgacgatgaccgaaccggaaaaaataaggctttcgcaaaaatcgaagcgctgaaaaaggccggatttcaagcgtatatttaccgcattcccgaagggtatcacgatgtaaacgattttttcttgaaggctggggccgatgcgtttgccgcctggatcgcgtcagcgaaatgccctcttttacaatactgcgtcgattttgccgacgtgcaggatgatccaccggaattgccgccgcttttgatccatgatattctgcgatgcggcgaaaagatgcttatttcggggccgtcgaaggccggaaagacctggtttttaattcaaatggcgcttgacatttccaccgggcacgcctggtatggttatcagtgcgagaaagccccgattttatatctaaatctcgaactgaaaacgaacgctttcagaaaacggattatagatgtatctcaacggctgggcttgcgcgtcgattataaaatcttccacgtcgtgaacctttgcgacctcgaaaagcagtataaagacgatctcggacgattgatcttttcaataattgagcttgcgagagcgattaaggccagggccattttcattgatcccatttacaaatgcggccttgaagatgagaacagcgccaaagacgtttcgaaattctgccgcctgctggatgaaatgacggacgaaaccggggccgccgtgatttactgccaccatttttcgaagggcttgcaatacgaaaaaaacgcgatcgatcgcgccagcggatcgggagtattcgccagggatgcggatgcgattgtaacgctttcagagcttgaagccccggacggctaccggatcgaagccaccttgcgaggattcaaaaggccggggccgctttcgatccggtttgaacatcctttgcatgttctcgcgccggagctgaacgactgcccgctgaaaggatcgaagccgccgcgccaggggaagggaaccgggcgcgtagattatgccgttcttgatgatgcgtcgaaaaaagtaatcctcgatgaagccgcgaaaatctgcccatgcaaaaagacggcttttgttgatgccatagcagaccgaatatcccaggggaaaaaccgcgccggagagctggtaacgcagatgatcaccgccggggtgcttatctgcacgagagacgcaaagaacaacaacacaaaaatgatctcgatcccgccgccggagcccgacgaggccgacgaggaacccgacgaagaacccgacgacttgatcgattatgacagcgtttgaactggttttttacttgtttgaactggttttttaggttttttacgctaaaatctaacaaatcagagggggcggttttttagagttttattagaaaaccccataggggtttctaaaaaaccggaaaaccagcccactgttagcgcatgaaagaacatcacgccaccatgaaacagccaccaacacacagccagttggaaacgccgatccgccacgccgccgccttcctggagcgacagaaggacaaagcgccgacgcaggccagctgccacgatcttccgcgctggatcacacgacagccgccgacggcctgccgtcctggatcattccgatcagccaacccgccgcgccgccgataacgtgacgaacgcgacaaacacaaaccacaaacccgaaggagtagcccaaaccatgaaccccgaaaccccagaatgccgtttttgtaaatggttcagaaccgaagaagatgtatcaatgccattttcgttcattggcccgcatggatactacaagcagagaattgtatctttttgctgttttaatccgcccgatggaaacgcgccgtatccgtggaactttggcgaaaccgtgccggatgcaatgtgttccaaatgggagcaggcagaacagccggcagacgattccgaccagtaatccgaacggccccgatcttcaaaaggtactacggaaaacccacccccgaccgactaccaccggggaagtagtcgaaacactcggcacactttctttctttgccatgttcgcgcgtcggccgtttttttttgatgcttgccgccgccggatgccgccgagaatcgccgccggatgccgccgcttgcccctggagcgacgaaagggccgcgcccctgcgtcgatgcggatttatcggaaaaccccgtaaaaacggcttgaaaacgaaaaggagacgtgatatattatcgtcgctccggctggaaccggggcaagggctatatccgaggcggggccagcacccccgccgaaaatcggcacgaccgccgaggccccacggatttttttctttttatgggcttgccgctctgcgtgaagtgaggccgctaacctcgcaaggtgttccagcaccgaccgccgagcggctttttgtgcccggaaaggtgtttcaccatgaaacagaccacgaacagcaaaaccagcaccaggaaagcaaccagggccgccgccgggatgccagcgccgccggacggatcagccgccgcgctcgatgccgccgcccttcctggagcgccggacgcgatccgcgccgccgtcgatgcgctgaaggccgccaggccggatgatattgccgacaacctcgaaaaagaagagttatgcgaagatgattatcttgatctatgcaaagaggcaaaaggcttttatccgcgcaatcctgccgaagtcctgcacgatttcaaggtgcaaaactggtatgagttttacaaaaccgccgagcttgctttttccgggtacgacgtgaaggagatagccgaggacgcagatcggagcgcaaccgaaaacgcgatccgaacgattgtttacagattcctgcaactgaaccataacgaccgcgccgcgctcgatctattcgccgccgccgctcgtttcagcgaggcaggcgaaaaagagatcgatgagcttttgaacagcacccgcgacgatatcagcgagaggttccgcaagaacttttccgaggccctgccgccggacgtgctcgaacggatcataaaggagattcaccgctaaaagatcctcgatcagaccgagccagccggggagccttgcttttttcttgccaggattgccgccggatgccgccgcgcctgctgttcccttcctggagcgagaagcgccagcgaccagcgccgccagtgatccccggcaggccgtcgaaacagcatccccggacttgcaaaagcgggaaagacgtgatatagttcttctgcaaacatgaggaaaccagcatgaataacgacagcccggcccctttaatcctcggatcgattaccgcctttatccttgccatctattgcggtttttggtatgccgcaatcgtgccggggcttattcttttcggttttatcgttctgtatcttcaagaccgggcagaaaagcaggataaaaaaggcaagaaatagcccgaacgcgacccgccgccgatgttcccggcctggacggacgccgaacggatgccgccgcccgaagcgaagaaaagaaaaaacgaggcgggaagaaagaaaatcagcataaataattcatttatagcgagttataaaacataacgtcgcataataggcattatgttaaatcgtttgaggttaaattgtagcattttttatgtgtagcgccacataacaagcatagaaatataacacgaaaacgacttgaaaaaacggaaaacggagttatattatcatagacccgaaaccaccaaccccgaaaggatcccgattcatggaaagcccttatccgacccgaaaagaagaggctgaagtattcaaagaggccgtagagcgcctaaagatcaaaggcatagacgcgccgcgctggtttggagttgcccggcagacccttgccagctggacgagtggacgcacgacgatcccgcgagaagcttttataatcctgctggaaacggataatatcaactaccgccggacgcaagaaagattcgatcagatagccgcgactgttgaacggctgaagaaacaataaccgcgaccgcgccagggaactggataccaagtcccaaaaagggagccgcccccgttatgaagatcacacgggagcggctttttttcttctgttctgtattgtgcgtattatcttcagtacaaacaagaaataatacgcacaagaaaaacaagaaataagctcaaaagatagggcttgaatagggcgcgtgttacatcatgccgcccatgccgcccatgccgcccatgccgccgtcaccggggaccgcgggtttttccttctcggggatctcggtgatgaggcattcggtggtgaggaggagtccggagatggacgcggcgttctggagtgcgctgcgcgtgaccttcttcgggtcgatgatgccggccttcaggaggtcgacgtattcgccggtggcgatgtcgtagccttcggcgcccttgcccgcgaggaccttgttgaccatcacgctgccctcgaagccgccgttggaagcgagggtgcggaggggttcttcgacggcacggcggacgatgtcggcgccgacggcctcatcgccggagagcttcagggaatcgagcgccttgaccgcgcggagcagcgcgacgccgccgccggggacgatgccttcttccacggccgcacgggtggcgtggagggcgtcttcgacgcgtgccttcttctctttcatctcggtctcggtggccgcgccgacgttgatgacggcgacgccgccggagagcttggcgaggcgttcctggagtttttcacggtcgtaatcgctggtggtctcttcgatctgcttgcggatctggttgacgcgagcgaggatgtcggactgcttgccggcgccttcgacgatcgtggtgttttccttctcgatggtgatgcgtttcgccttgccgagcttgtcgaggccgacggtgtcgagcttgatgccgaggtcttcggagatcagggtgccgccggtgaggatggcgatgtcttcgagcatggctttgcggcggtcgccgaagccgggagccttcacggcgcagacgttcagcgtgccgcgcatcttgttgatgacgagcgtggcgagcgcttcaccctcgacatcctcggcgatgatgagcaggggcttgccggtcttggcgacggcctggaggacggggagcatgtcgttgaggttggagatcttcttctcgttgatgaggatgtaggcgtcctcgagggagcaggtcatctcttcggcgttgttcacgaaatagggggagaggtagcccttgtcgaactgcatgccttcgacgacgtcgagtgtggtctcgatggtcttggcctcttcgacggtgatggtgccgtccttgccgaccttgtccatggcgttggcgatgatcttgccgatctcggaatcgccgttggcggagatggtggcgacctgggcgacctgttcgctctcgctgacatccttcttgatggtgtcgagcttggcgacgatggcttcgacggccttgtcgatgccgcgcttcaggctcatcgggttcgcgccg

SEQ ID NO: 462 - DNA, 23066 bp, synthetic construct
  source 1..23066: mol_type = other DNA
  misc_feature 1..23066: note = Synthetic
ttcatatattttttttattatttcctatctaaaatatcatttttccggatattttcaagcggaagtcgggtatactatgggtaacagcaaaccagttaatatggaaaggtgagacgatgctgattgccgagacgaagactccccccgcgggctggaacagttttgattgttacatgggttcgatcaacgaggaacaggcgctggccaacctggagttgtttttgaagaaactgaagccggccggatatgaatatttctgcctcgacgccgcctggtacgccgacggcgatcaggcgtggaacgaacagttgcgcaacgtggggcagtgccgcaatatgcatgtcgattgctacgggcggtttgtgccgtcgccggtgaactttccgcacgggttgcgcgctcttgccgaccgttgccatgagaacggcgtcaagttcggagttcacatcatgcgcgggatgccccgcatggcgctcgaacagaacacgccgatcaagggaaccgatttccgggcgcgtgacatttacgatccggacaacttctgtccgtggtgcaaatactgggtggcgaccgatgcctcgcatccgggcacattcgcctattaccggagcgaggtggagtatctcaccgaagagttgacggtggatttcatcaaactggacgacgtggtggagcatccggaccatgtggcgctgttcgggaaggcgctggattcggttgcccgtccggttctgctgagcctctcgccgggggcggaggatatctggcgcggcagctggaaggagtatgttccttacggcaacatgatccgggtcactcccgacgcctgggatgacgaccggaccaatctcatcaaattgcgtcgctggtatgagtttgaggatctgagcggcccgtcgctgtgggcggatctggatatgctgccgctgggggcgttgcaggtgacaattccgccggagctggcacttccgacgggatcggcgcggcagagcaagcttaccccgatcgggaagaaggtgatgatgacgatctttgcgatgagctgttcgccgttgattttcggcggggatctgccgcagacgccggagggggacatcgcgttggcgacacacccggagatgttgcgctgcaaccggaacagcgtcgtggggaagcgtgtcagcctgatgcgccgcatcgacgtccgcaaggcgtcttgcaaagaggattcttctcacggctggctggggattttcagtttgaacagcgatgcgcggcgggtgaaactttctgcgtcgcagctgggatttgaaaccattccgccactgtacgacatctggggggaatacccgattcacatcggtccggaaggggtgctggagctctatcttcagccgtacgactgcgcattcctgaagtattgaatcttctttcggcaatttgatctgactgcaggggacgaaaagctctccagagggcggattgtgcccggaaactcgacggaaccaaggtataacaaacaaatgaccgggggtgttatgacgaaatgtttgctggcggcgcttctgctgggaggcggagttctttgggcggaagatttctctcaatggagagggaagggcacggtagcggaggtccggggagaggttttccatttcaaggacgatgatccggggaaaagcaatggtattttcgggaggcatattcgaattacgcctgcccctgtcgagcgtcaattgatttttgaggcagagatccgtcgactggccggattcagcggaattgggatccacattgctgcatcaaacctgcatgcaaaggaacaggaacaggcggcaggcgaggcggagtggaagaagatctctttgcgggttccactgccggcccattgcgaccgggcttatttgcagttgctctgcgcgcatgggtatggtcgaacgggcgaggcggaattccgcaatctctcctggagggtgatacccctggaaaaaaaggtggaaaaaggagctcgctttctgatctacgatgatgatttttccggccactgggatctgcgaggtgtctcctgtcgacagacgggaaattcggcgtattccggtcagcgcggcttggaaattactccggctgcaggacaacacgtatccatgcggcttcgttcgctggagaattttgttccggttgtcaaccgggctctggatctttcggattatgtaaaagccgatggctggctggaatattgcatccgtccccgactgctgtttaccgtggggggggtatcaccggagaagcagatggtgaaatcctgcgaaaacggctggactcaggttcgcatcccgctggcggaactgtcgaagcgaaataatttaaaggcgttctccgatttgaatatgacctttgacgggaaggttgataaattcagcattgatggaatttttttccgttgtaatgatccttctgcacaggtccggtatgtctggagtggaaactggaaggcgaagctggagtctgaaatggcagcctggaaacagctgccgccagattgcggcaaccggccgaagatagaacagggaacgttctggatgaatgggaatccgacatttctgctgggagtcaactacttcatcgcttccaatgaatttgatgaaatctggcggaaacgttgcaaaattcttttgccggattatcattaccagctgcttgaccggaagatctgtgagagattcgggttcaacacggttcagttccccggcctgccgtttcactttgtttttgcccgcaatcaactgccggtgtgggatgtggagagggatgatcagcgccgccgcaactgcagcaatttcgacagaatgccgatttccgtggacccgacagtgatctactacttccatcgcaatgagaaagccgtattgaacgacccggtcacccctcagccgagggagattctgcatcagaacccggggtggcacgcctttgttccgttctgcccggaacacccgatggggaaaaagattatacttggacagcttcgtgatatgtctctttttactcgggccaatcatgggaatccctttttgtatgagttgatcaatgagagcacgtacgattgtcgctgccgtttcaatcgcgagaggttcatcgaatttctgaagaagaatttcggcactgttgcggagatgaaccgccggttggggacagagttccgcgatttccgttcggcggcttttctgcctgatttttcgaaggcgccggcgttgcgtgccgcgtggcgcagttttctgtcggaccggtttgtgcaggtcctggcggaaatgaagaaggcggttgccgatgtggattcccggccggacatccacttctgtcagcagattctgatcgccggcttgctgaccggaagcggttcgacaatggaccagcgcaaaaccatggacgtgcttgatgtgctcgcaatcgagggcgggtattcctacggcttcgccgaaaacgacggacgctgggaatccgacgagatggaagcggtattgacgagaggggttcattttttctcgctggtggccgactatgcggctgcggtcgtgcggggaaaacccgggaaaacggtggccgatcaggagcattattgcatgcgttatgacgggaaagaccggataccctctctgcctgcagatttccccacctctttgtgggcgagcgtgttccacggtgtttccgcttccagtatcttcaactggagcggcggaaaatggcaatggtccgatatggaaggagccagaaaatttgcccgttcaatgaaatatcgcggagccgcgctgctgaatccttactgctatccagagaaaacgctgtcgggattgcgtggatttatggaagagcttgaaccgcttcggaatgttgttctgccgatgccgcgtctgaaaagaccggaagcggccattcttttctccatcaccagccagcggatgctgggagatcggcagtctctgccgaatatggagaactggtacaatgcgctgctgcgggaacagctgcctgctgaatttgtcttcgaggaggagctctctgcggaaaatttgaaaccatataagatcttatttattccagacttgaagcattctctgcccggtacgctcaatgtgttggaggagtttgttcaacggggcggatcaatcgtgtgctccgaggatgccctctcgatggatccgtatggattgccgttggaaaacagatcattttttcaacagaaaaatgtgcggcgttgtcccaaagggctggtcggctccaggctgcgaaacctctttgccgaggcgttttcccgtgccggagccaagattcatctggaattgcgaacggcggagggaaagaagtttcgcgcggcggaggcgcagttgatcgaccgcggtgacaccaagctgattcttctggtcaactggcggaatgaaaaagcggtacctgcccgacttgcgattacggacattgctgccggacgctggcgggtgaccgatcctgtatcgcgttgtcgagtcggggaatttgacgccgaagaactccgtcgcgggatttcattcaccttttttccgcaggagcggcagttgtttctgctggagacgggaaaggcagacctcttcccggatgcggcagagaagaatccggaaagcattgcggtgcgcgcccgggagatcaatgcaaaaatcgagcagagagagcagcttcaaggagaacagaaacggcgggcggcggaggctgcaccccgtgcgagccactgggaaaaaactcccggggcacacttccagaccgtaaatctcgccggtgcggcaaatatggggtatgtcgatgaggttgcgggagatcatcggggcggctggtttgatgacgggccggaggcgggattgccgggtatgaagcccgggcgtcatgagtattccggcatccctttcgaaattcttggcggcagtcgggcggtctgtgttctgaagggagagaaaaagccttacttcccccgggaaactccggcaatccctctttccggcaaggccagacggatctactttcttcaggcttgcggctggagtgtcgaggatcggccgttgctgatctgtgagttgacctatgcggatggaacgcgttcgaaactttcaatggccggcggacgcgacatcggcgactggcatggcttgaaatcgctgccgaacgcgcggatcggggccgctttctggacttccggaaaagaacgggtcggtttttactgtaccagacgggagaatccgtatccggacaaggagttaacatcgatgaaatttctttcaaccgggcttgccgtgccgctgatcggtgccgtgacgctggagaaatagacaggagcattgagggaaatatgggagagcagtcgctttgacaccgcaggaggaattctgcccggctctcccggggggcaactagaggtgattggatcgcagccggttgtcggatacgatcaccttccgacggtatccggtggaggcgaaatgagacgtcaaagaatggaaccaattgttttcatgcatgttacaacagaaggattgaagcagatgcgcaaccggttttctctgatcgagctccttattgtcatcgcgatcatcgcgattcttgcggcgctgctgctgccggcactcaattcggcgcgggctgtggcgaaacagataagctgtgtcaacaatatgaaaaacattttcatctccactgcctcctacactcagaacagtgatgactggctgccgcctgccgggttgcacaaggcgttcacgctttatctttatccttatctcgggattcaggcggacaagatttcccggcagatcagcacctcccggccgggagagtattcgacggggcttcagttccggcagccgcgcggtctgctcttctgtccggagtcggtgattcccaatccggcgttttccggcactccggatgcaatcagctggtattacagcaattattcccagtcctatgcgacacaggccaacatcgatctcagaagaaaccggaccggtcgggtctggctggttgatggagataccaataaaattgtaaaattacgctccggagccttgctgctgggggaaaacaaccatagtgtagtatacagcaacggcgactgtgataccggtattttttatatgaattccatcgcgtcgtatccctctgctgccgctacgggagctcccgcctggaatcatcaccggaaccgggcgaattttctgttcctcggcggcaatgtgaatacactgcggtatggaagacatttcaatgatgactatcagctgctgaaccgttgacgcggtgaagaatcttgcagctgcagcaaagagtagacggtttgatcacacagttttctgatcggtgaaaaaggagcatgatatgggaagatcattgtggattatggggttgctggggctgctgccggcgcttttctgtcgtggagaattgccggtggcgggaagtccggcggcgggagttcgtcagctcgtcggcgtccatgtccctggcagtgtcggaggaaacgctttgtgcggagatggcagctgtctctatcttgccggaaagggacggcttcaggtattcgacctccggcggaatccgatgaaaccacaacttgcagcggaggtgaaggggttgccctgggtgtgccgtcagatggcggtacatcgggggtatgcgtatatcaccgcacgaaaccagggattgtggattgtggatcttcgaaatcctgtcgccccgaagctggtcgggaatttcgacacggcggaactggctaccggtgtggatgtttcaggcaatcttctgtttgtggctctgcggtattatggcgtacagatctttgatattacgaatcctgctgctcccaaacatattacattgtttcgaaatggcaaggtggaggcgcagtccatcttctgtcgcggaaatctgctggctgtgggggactgggggcactcccgggttcagttgctggatgtccgcaatcccgccgccccggaagagatcagctatgttcccctgcagggatatggcgacggagtttatctccacggcaatctgctttatgcggccaccggacaccattccagacagggatcggcggccgaacggtttggcaatggtcatggaatggagatatttgatgtttccgatccccggaaggcggttcgtctcgggggcgttcatttcccacgtttcttcgctctcggcaacgacttctggtccgtctggccggcgggcggaatgatcgcggttgccgatacgcacaacgggctctttctggtggaggcggccgatccccgcaatccccggattgtggcacagtttcaactgccgccggtccgggtgagaaagaacatttttgacaattccctgatggatgcgtcaaaggtcctttccgtgaagttggcaggtgacgggaaacattttctgctcccagattgtgtcggttccgtagttccggcaaacgaccggctgtatgtcgccggaaatcagagcggactttttgtggtggaactgcccggttgcgctcccgttcccgcccgggaggaacagggaagaagcgaggtaacatccgcggtgaaggaggttcccggctttcttcactacgactgcggggggatggtgcgccgggtcgcgaccgacggtcagttgctttacgttgcggcgtcctctgccggacttcagatctggggagaggatggcaaggggtggaaaaagattgcaaccatttctgaaaacaggatctacgatgtttcgatatgcggaactcttctggtggcggcggaggagaaaaaactctccatgtggcggattcagaaggggaaactgcccgtgttgctcgggcagatgaaaagttctttccccacgcagatactccacctctaccggaatggaacacttgcggcagtcagcggcggtggcaatcggattgatttcattgatctgcgtgatccggctcgcccccggatgctggatccaagccatgaacgccgcattctctatatcgattcatttccggaaaaggaactggaggggcttattgctgtgaattctcacggtgcagggctctcctggtatcggctggaggaaacgggagggagaaaacttcgcagcaatccggctctccggttcaaccagtttgacggagtgacggccgttgggaaacagtttctgatgccgtctggaaaacagttttatctcttttctccggagaagtttggatccgatgaattttcacagaagtttcctgcaccgcccggcatggaagggcttccctcctggaacggtggttcgttgctggctttctcccatcgaagcaaagggaaggtgacgttgttcgatgtcacgaacccggaaactccgcaatggaaaaaaagctttgattttctgccgggaacgccggaccgggtggttttttatcggaatcgcctgattgttccggcaggtttcgatggcctctactgccagaagccttgactgccgtttcgatattttccttcagccgccgatcggcagagagttctgccggtggatgagttcggtgagcttgaccacgttgacgccatcctccatcgtaatcgggtaggggattccgttgcggatggcgtcatagacatccagccacatcgtgtcctgcgagtaataaccggtcgcctgcgtgccgacgccggactcctttcgcgcgcccttctgcagggtgtgaccgcgccccgcttcgaccggaatttcctcgcaaatcagctccagaggctcctggttgccgtagaacagcggataattccccgtttcggcgtggatttccggaagctgaaaaccttccttcaggtatttgaggcgcaatactttgccttcgttcggcaccgtcagcgcgccgcggtccccccagacctcgtagagattgcctggcagagcgcaagtcgaggagatttcgatatccgcaacgcagccgtttgccgctttcagcaggatcttgatctgatcgtcggcgtccccggcggtgaagttgtgctgaaggttgctccacacatcgaccaccggcgaaccgagcagctggagcgcctgatcgagaatgtgcgggccccagttgttcagcattccgccgcagaagcgattcagtgtctgccagtcccgccggcggcagtagacggggtggcggtacagcttgatcatggtgattctgccgagaatgccccgcgaaagaatgcgccggatgtggttgaattccggctcgtagcggcggttgaaccgcagaaagagcttccccggataccgttcggaggcctctttgaggcgcatgacctgctcgacgctcaccgcaatcggtttttcaatgaccacgtatttccccgcctccagcgcctcgatcgcctgcggcgtgtggtccgcattgcgggtggcgatggtgacgagttccacctccgggtcggcgagcagctccgggagtgtggcgaaggccgcggcggggggcaggtcaagaagacggtcaggggcggtgtcgcacccggcgatgatttcgaagaggtctggatacgaggcgagttccgggatgtgcatctggcggccggcgcggccgagaccgcagattccgactttgattttctgcttcaatttcaactccatggctgatgacggatctggttctccgggagcgatgttcccggatgaaccgatgatactataccacatccggtgcaaaataccatgcaggaaagcgacgatgatttgcacaaaagggattcccgcgcaggatttcccctgaaatgatctttctttttcccattaagaatattgttaatccaggtttgaaaaaaagcggaaatggtgctatactgcaacagaagaacagggagatttctgacaaaaaaatagcggctattgaagccgcactgaggcatttccgcggaaagaggcctgcagaagttctttaccagaacttgtagagttactgataaaataactgattttatttatttttcaagtggaatcgcaaaaaaaagggaagaaaatgaaacagcggattctcggactggatctcgggatcaattcggtggggtgggcgattgtcgatgatgacaacgatgcgcaggtggatctgctcgactggggaagccgcatttttgccccggggctggcggccacgaccgaggagattgtttccggcaaaggggagtcccgctgtgcggaacgccggctgaaaagggcgcagcggattgcgtaccgccgccgccggcagcataaggatgaattgacgagggtcctgagcggttccggactgctgccggagcaggtgagcccggagttctttctgcagattgaccgcgcgtttctggccggactgccggaagatgaacaaaagcgggccgctcacgtcgtgccgtatctgctgcgcgcggcggcgctggaccggccgcttgaaccgatgcagctggggcgcgccctctaccacctcggccagcggcggggatacaagagcaatcggaaacaggaggcgaaggattccgaggccggagtggttctctcgcagattgcggagctgaaagaggcgatacggaattccggagcgcggacgctgggggaatacttctccacgcttgaccccgaacagcgccggatccggacccggtatacggagcgcggcatgttcgaagaggagttccgcaaaatctgcgccgcacagcgtcctctgatatccgaggcgctggagcgtgcgctctaccatgccatcttctttcaacgcaaattgaagagctgtaagcatttgatcggattctgccggctggagccggaggagcggcgctgctcgtttcaggatccgctggcacagcggttccggattctgcaggaggtaaatcatctacgggttgacggcaggggcgttttgcggccgctgacggaggaggagcggcagaaggtgctgacggtgctggacggcctttccggcgaattgaatgcgcaggggacgattgcgctctcggcgctcgggcggctggccgggttgcggcgcggtgagaaattcacgctgggggatgaggataaaaaggtctacggcaacgaactgcatgcgattctcttccgggtgttcggcgctcgggccgccgccatgaaagaggaggagcggcaggcgttttttcaccatcttgcctgcatggagaaggacgacgcgctgcgccggattcttcggacgcgctggggattgagcgaggaggccgcggagaaggctgcgcacatctctctgccggatgactattgcggtttctcccgcaaggctctgaaacagctgctgccggatctggagagcgggattgcgttaagtacggtgatcaaactcaaatatccggagcagttccaggcgtcggaacgggtgctggagtttctgccgccgctggacgaaaccggcctgcagttgcgcaatccggtcgtgcatcgcacgttgacggagatgcggcaggtggtcaacgcggtgattcgcaaatacggcaagccggacctgatccggctggagctggcgcgcgacttgaagaacagcagcaaagaccgcgagaacatcgcccggcggaaccggctccgtgaaaaggagcgcgaacgaatcgcccgggagatcgcgcaggaagccggggtggagaagccgtcccggcgggacattctcaaagtgatgctggcggaggagtgcgattacacctgcccctacaccggccgccgtttttccatgcgggatcttctgcatggcgggctggtgcatattgaacacatcgtgccgtattcgcggtcgatggatgactcgtttatcaacaagacgttgagctgtcgcgatgcaaatgcggagaaggggaatcgactgccgttcgaggcgttctccccggaggcgtaccgggagattctggagcgggtccgccggttcaaagggccgtttgcggaagccaagctggaacggttcaagctgcagaaggcggagagccgcgacttcatcgagcgcaatctcaacgacacccgttacgcgagcaaactggccaccgaatatctggcgcttctctacggcggccgctgggatcgcaacggcgtgctgcggcttcagtgcagtgccggcgggtgtaccgctgtggtgcggcgcgcgtggggcggcaactatctgctgggggagggggagaaggagcgcggcgacttccgtcatcacgcgatcgacgctctcaccgtggcggtcgtgtcgccggccatcgtgaaggcggtggcggagatgccgaaggagacggtccggaaggcgattgaggagaaacagccgctgatcgtcaattcgctgtatacgcaggcgcgggcgaaactggacgcggccggaatctctcaccacacgatcaaccgggcgcgcggagcctttcataaggagacgatttacagcaaatcccacggcggggacctgcgtcatgtgcgccgccggctggatacgctggaaccgaaaacggtggcggagatcgtcgacgttgcaatccggcgcgcggtggaggagaagctggccgagctgaagatgacggatccccggaaggcgttcaaggatggcggcaatctgccggttctgcgggaccggcaggggcgtttcgtcaatacgatccgcagtgtccgggtgcgccagaacgtcaaaacccgcagcatcggggagggggatcggaaacgggaggtggcgaacggagccaacctcgttctggccatctatgcccgtcatgacgccgacgggcgggagatcggctgggatggcgaggtggtcaccgtgctggatgcccggctgaggttgcagagaaatgagccggttttcccgaaggtcaaggagggcaacccgctcaaattcaccctgcggaaaggcgatgtcgtgcgctggtcgaaggacgggcaggagtatttgtgtgtgatccggggaatctctctgccgcagttctcctgcatgccgatcaacgacgcccgtgacgtgaagacgttgaaggcggcggggctgtggttcactccgacgctgtcggccgcgttccgggggaagatggagaagtttcatacgacaccgctcggcgaattgaggcgggcgaatgactaaacggatcattgaggttgccgagcgggcggcccggctgtggctggagaaccgtctgctggtggtccgtgatcctgacggcggggagcaccgggtaccgatcggggagatcgagtgtgtgcttctgggaacgcctgcggtatccgtgaccggggctctgctggcggcgctggcggaggccggcgtgatggtggtgatttccggtgcggaccggcttccggtggggatgcagcttccgctggcgtcgcattatttgcagaatgaacggtttcgggagcaggcgtcggcatcgttgccgttgtgcaaacggttgtggcaaagggtggtcgctgcgaagattcgttcgcaggcgcggctgttgcgggagttgcgcggagaagatggcggattgattgctctggcggggcgggtgcgctcgggggatccggacaatctggagggaagagccgcggtcctctattggaaacagctgttcgggcgcccgtttcttcggatacgggaggccggtgacagcaatgttctcctcaattacgggtatgcggtgttgcgtgccatgacggcgcgcgcactctgcggcgccggactgcacccgacgctggggattcaccatcggaatcgttacaacgcctattgtcttgcggatgatctgatggagccgtaccgctgccgggtggatcggattgtggttctgttgaatccggagaatgcgcctgtttctggaatctcgcaggaacagcgccgccgtctgctgctcggcctgctggagccggtgaaatggcatggtgagcagcatgaattgccggagctgctgacgattcacgcgcggcagctggccgcttcctttacggagaagaaaaatctgctggagtttgacggatgagttctgccggacgaactccgatttcggagatcaaggcgatgtggctgatggtgatgtttgacctgccggtggtgacgcgggaggagaaacgcagttacgcgcgtttccggaaatatctgttgtcggaaggatttcaggcgttgcagtattccgtgtatgcgaaatactcctcctgccgggagaatgcgaggaaatactatcgttacattgaagcgatagtacctcccgggggatatgtccggctgctgatggtgacggacaaacagttcggcgagatggtgtcgctctatgggaaaaccgttcaggaagtggaaaaaaagccggaacaactcctgcttttttgaagcgggctatattgtaattgtcaaaataatagcacgttatgacaattacaatatagtctccttttaaaactctacaagctccagcaatgtcagagttggaaatctggctcgacataatatagtctccttttaaaactctacaagctccagccgaagcaaacaaaaaggagagcagggaaatgaatatagtctccttttaaaactctacaagctccagcgcgagtaacaggaggtcacatgaacgaactaatatagtctccttttaaaactctacaagctccagccttgacgagctgatatcccccgccatgagcaatatagtctccttttaaaactctacaagctccagctcagtacttatttcagtgtggtttcttctcaatatagtctccttttaaaactctacaagctccagccatcaacaacgaatttactaatagctgggaaatatagtctccttttaaaactctacaagctccagcctgtcccctatgctagttactccgggcagaaatatagtctccttttaaaactctacaagctccagctcagaagttccacgcccgccgccttgcaaaaatatagtctccttttaaaactctacaagctccagcactggaccagctcgaagtcgccgactgccgaatatagtctccttttaaaactctacaagctccagcacgagctgaagcttggttctcgcccctcccaatatagtctccttttaaaactctacaagctccagctctatgaaccgagaggggctgctctcgaataatatagtctccttttaaaactctacaagctccagcaaagaatcgaacaggcgattcggcgaaatcaatatagtctccttttaaaactctacaagctccagctaaaaagactgaatcatcttctaaaacatcaatatagtctccttttaaaactctacaagctccagctgaaaaacatcgctcccaagtttcgggtcaaatatagtctccttttaaaactctacaagctccagcgcatgttcaggtgctccaagctacggaaataatatagtctccttttaaaactctacaagctccagcccagcgagatagttcaggccgtcaaccaacaatatagtctccttttaaaactctacaagctccagcatcgcgtcctgatagccgagctgacaaatcaatatagtctccttttaaaactctacaagctccagcatgtatgacaataactgggatggagaaaaaaatatagtctccttttaaaactctacaagctccagctttgcttgaccggtacggaaatgtgctgacaatatagtctccttttaaaactctacaagctccagcctgaggcggtcggggtaacaccgcaggcggaatatagtctccttttaaaactctacaagctccagcccgcgctcatgcgtcgcgccgcggatcattaatatagtctccttttaaaactctacaagctccagcctcgtctccgatgcttgtcacgctgtcaggaatatagtctccttttaaaactctacaagctccagcaaacgtatttttcgccgtgacataatccgcaatatagtctccttttaaaactctacaagctccagcacacattcggggcgcaatttgcgaaaagagaatatagtctcctttttaaactctacaagctccagcagagctgccgccggatcgattccaggcagtaatatagtcttcttttaaacctctacaagctccagcatgtttgtatgactgatcctgatggcggcgaatatagtcaccttttaaacctctacaagctccagcctgaaatatgataccggaattgccgtcgagaatatagtcaccttttaaacctctacaagctccagcccgcggcgagcatgatctgtctggccggcgaatatagtcaccttttaaacctctacaagctccagctaacatactacgaaacatcgagtttgcaaaaatatagtcaccttttaaacctctacaagctccagcccgacttgtccgacctgtccgacttgtcagaaatatagtcaccttttaaacctctacaagctccagccggtatccttcagagttgcgcgatacgattaatatagtcaccttttaaacctctacaagctccagcttgtaccatgttttgatcaccaatcaacgcaactgtaaaaaacttttagaagatgttttcatcgaggacaatgaattgaatccttgacaaccggggcggtttcgagtatagtaatccgcaccggaaacaacaggaggaggagaacaatggctgagccattgattccgaaacacggcggctaccggcggctgattacctaccgcctggggatgctgatctatgacgcgaccgttgcattctgcgcccgttacatcgaccgacgcgatcggacccatgaccagatggtgcaggcggcccgctccggcgtggcgaacatcgtcgagggttccgaagctgccgccaccagcaaaaagaccgaactcaagctcaccaatgtcgcgaaggccagccaggaggaactgcttttcgattatcaggcttttctgcggcaacgcaacttgccggaatggcctgtcgacagcccggaagctctcgccgtgcggcaggcccgccccgccgatctggcccagttgcgcaacctcatggctgttttagtgtcggaccggtcggacaagtccgacaagtccgacagaaaagccgaggtcgccgccaacgtgatgatctgcctcatcaatcaggagacctttctgctcaggcgtcaactttcccgcctggaacaggaattcgtcgaagagggcggcttcaccgaacgcctctaccgcgtccgcagcgccagacggtcggagaaagtggattgatgagcctgcgattcccggcttgacacccggggctgtttcgagtatcgatagtactctcggctcccacgacctgtcgaggcgtgggattttccgaaaaccatccgtgttgaaaccctgttgaacgcacattacgcattgcgaatgtgcatgttcaatagagtctcctttaaaactctgcgagcacccgttgtatcacgcagaataaaggcaaggggcactttttgtgggtgcccctggggaaatttcgatcggattggttccgcactcaggcggggaggggcgccggacggttgaactccttggcgtaaagcttgcgggccgcccgttccacccggcgccagaagtgacggtcgtcccggagcgtctcccgcagagttcgccccgtgtagttcttcatgaaccggtagagatcacgccgggtgagaccgcagtccatcgccgaaaaatagagccctgcgacatccttgacccggtagcggaagggcacggccggacgaatttccgcccggtgcaggtcgatgacgtacagccggggcagcggcgtctcctccgtcgcacggtcgagcagaaagtgacacagatagcagtcccggtgattgacgccgccgcgatgcatcgtccccgccgtctccgccagcgcggcggtgagcgccgcccggcgacggaacggcggcggattttcccgccagtcgcggcagtaatcctccagactgaccatgtccagcagttcagccgtgaccagaaacgattccagtttcgccggattccagccccgacagccgtaggcggcgatcgtcatcgtatccagccccagcagttcgaggcggcggatggcccggtattcgttggcggcgccgagcaccggcttcttccccatcagcagattcttgaagatctcccgccacccgacgccccggtgcaccttggcgaaatagccgcgcccggcaacttcaaagcggaaggtccggcggcttttgacctggcggaaaatctccccttcggtcttctccagttcggcgaaggggtctttcccctcccattcccggctgaataccggatcgagttcaagggtctggctcatcactccggctccttttgttccgggcgttcagatccggtccaggctggaatcggcaagaacgttccggtaatccaattcatccagctgccgctgcaggcggcggcgtgcggcgggtttcgacgtcttccggtcgcccggctgcggattgagaatcatcgtcgcatggttcaggtggcgcaggtagttccccagctcacgcgactccagaaaaagcatcttgtacccctgctgcaccagcatccggtgcagcgagtggccggcggtgtccccgtcgaaaaagccgttggtgtgtttgcgcaccagttcggtgcggtagagcgcgcagtgactgcggaggtagcgatcctccaccttcgccttcttgccgagaagccggcggaagaaatcctcgaccttcttgccgaactgcttgaatgcggagacctgttccagtttccagctgcctacgccggcgacggtttcgtcaccggaaatcttcccgagcagaaaatcgagccagcggtcgtcgcagatcagcgtgtcggtgtgcatgaccagcacgtagggggtggtcacctcctgcagggcaagatcgagggcgcgggcgtgcatctccggccccttttccgcggcggcctccgggcgctcgatcagctggatccagttgacgttgcgcagataatcgagcgactcgtcgttggaggcgttgtcgatggcgatcaccttcacgcgaccgaggtcggtgtggcggcgcagcagccgcagacagagccgggtcatttccggcgttttatagttgggaatgagaatggaaacttctgcttcagccatggccttccccgggttgaacgttactgaattcgaatgtaatatacaccgggcgcggcggattgacaagctgacgcgcacgaattttcctccgatattcggaacgaccctcttttttgaaaattttccggaatccgggttgatactccgccgtcgttgctgtatacttgacgggaaacggcaaccgggggccggttccgggcggaaccggttcttgaactctagagaaaagggagacggcatgtacctcaattacagaaatttttccgtggagttcgctgaggattccggcaatttccagtgcttttattctgcgccgggcgaagcgcgggagcccctcttcctccgcgacggaaccatgtacgtcacctccggaggtcgccgcattgagatcgcttcctaccgctgccgcaagcgggagatcactcctgcgctcgaatgcctgatcggaagcgtttcctacgctgacggcccggagggggcgcctcctcttacaatcacttttcggctcgacgagaagagtctgcggttcggtatgatggcccgcgccgaactgcacgtgagcgggctgctcgtctggggggcggagccggagcgtgccaccttcggggtacgactcgacagcgacgaccgggtgctccgcgccgcctgcggtccggcggtcgcctcctgcgacgacgccctgttcgaccggctcaccgaccgggcgctcgaattccgctccgctggttcgttccgggtctgctacgactgggcggcggagaactaccgcttcgactacgtcaacgggctggacttcggtcgtgagttcaccttccgtatccacgaggagttctgccggcggaggttcaacatcccctacgcgcccatttgcaagagccacggcttcgaaacgcctcccgccggctggatgagctggtatgcgcttcagttcggtacctgcgcccggagcgttcaggaaaacgtcgaaaaactcgtcgaactcttcgccccctggtcggagaagctctgctgctgggtggactgggagtggagtcacgactcctggagtgcggcgggcattccaggagtggattgttttcatccgcgccgcgacatctatccggaaggacttgctccggtcgccgccggcattcggaagctgggggtgattccggcgctctgggtcgggccgaccaacgatggcgatctcatcgcaagctaccgcgaacaccccgactgggtgctcggtgaaaagaaggagtggtgcggtcgctactggatcgacccgacccatccgggagtactccgggagtacattccggcggtgttccggcaggtgctcgactgggggttccgcatgatcaagtgggactgtctgccggcgacgttgaacgcctgcgacgactttcacgaccgcttccacgattccacccggccgaccgatgcggcggtacgcgatctggtccgggccgcgcgcgaaacggtcggccccgactgctacatgctctcctgctccggcgagaccgagcgggacatctgttttgcgatggaccagttcagcgcggcgcggatcagcggcgacgttttcagctgggagaattttctctcgtctgcggtggaacggctcttccactgctacgtctggcataatgtcgttctctatgcggacgccgacaatctggtgcttcgcgaggagttcaacacgatggcgcaggcgcgttcccgggtgtccctctacggactggccgggctgccggtcacgatgggagacgatctgcggactctgccgccggaacggtgcggacttctgcggcgcattctgccgaccgtcgacatccacccgatggatctttcccgtaaacagcggggaacggagtacgcgctgctgaacctcgccgtctgccgccgtttcggttcgtggaacgtcgcggccgtgaccaattttacggcggaaacgctccggctcacgctgcatcttggcgccgacctccggctcgactgcggagaggggagacgctatgcggtctgcgactactggaaccagagttttctcggactcttcgcagaggcgcttcccctggaggtttccccctgtgacaccgcagtgctgcggattactccgttcgaagggcggccggagatcatcttcacatcgcgccatctcacgcagggggcggtggagctgcgcgacgtccgccgcaccgaagacgggtcactctccggaaccgcgctctgcgtgcccggcgaagagtggcgcatgatggtgcttctgccggaggggtgggggctcctcggcgcggattccacgattccgatggaaatttcccgcggggaaggcggtcttctgctcgacgtcgtcttccatccggagcgggagaaggaggtgcgctgggagcttcggttccggcactagaccgttgccggttcggcggggacgagattcgtctctccggcgggacaggcgtgacgtgtgccgttgtattccagaatgaaggggcgggcggcggtgacgtggatcccggccgcgtctctgagcagcgagacggtgttgccgccgaagcgtaggttccggatgccgtgccgccggggggaggtgctctgccaccggatgaagttctcctgcgcggaaacttcgcggatgccgacgaggttttcgatcagcatggagatcggcccgagcgcggaccagccgcagaagtcggcacggcagattctccccttgctgttgagggcgggttcgggcagatccggcttgtagcactcccagatggagtggggggtgtatccgcgccaggtgttgaccatgtgggtgagcagtttttccgtcaggcggcgcgcctcgtcgtcgcagctgtagttccggagtgcgaccgaggcgacgtaggccagcggcacccagaccgcgccccgccagtaggtgccatccggcgtgaaggccgggtcgttgcggctcacggtcgggcaggggcaggctccgccgagctcttccggatttgccagatgcgcgacgatctgccgcgcctgttccgcggtggccatgttggcggccatcggccagaagatcgccggggtgagcacccggcagaaggcgccgtcccggcggtcctgaaaggcgccggtctccggatcccagtagcgttgaagaagttccgttttctgctcgaattcccgttgaaatttttccctcaagggttcgttgccgatgacggcggcgagtccggcgatggagcgggcggcaagcccctgctgggcgacggcgtcgaaccagaggagaccgttccagtcgtcgcggccgcggggggtgttgtccatgccggaggagtagccgttccagcggtaaccctccggcgttttccgccaggagagcgggatggctccccaggcgggatcgggggtgtcgccggaacagttttccagaaattcgtagtgacgctccagcgtgcgatcctgttccagaaggcggtgaatccgggcggtgtcgccggtgaagcggaagtattcgagctccgcccaggccggcagcggcggattgtccgggtgctggatcttcagcccggcgggtgcgcccgacatgatcgcatagagattgtcgagactctcgatgcccgggaaggtgtgcgcggcgtagcggcagaagaaactcatgagcgaggtgtcccagatccacacccgtgaggtggcgcagccttcgcccatgtagggggagaccggcgtcaccgccgattcatagacgtgccgccaggcggaacgccacgcttcccaatagagttccacccattcggggtgttcgtcgaagatcacctccgggatctccgctttcgggaacggccgccgggtcgggacaaagagcgcttcggaattgaggtccatattctctctactttcggatgagttcataggcgaagaccgcctcgggatagcgggcgttgtcgagggcgagccggagggcgccttccggagcggtttccggcgtgacccgggcgatccgtttcccggcggtgtcgagcgcgtaaagctcccagttgccgcgggggaggcg

SEQ ID NO: 463 - DNA, 18983 bp, synthetic construct
  source 1..18983: mol_type = other DNA
  misc_feature 1..18983: note = Synthetic
cgggttcatgctctctcctatggttgccgggaagcttccattaagatggcatgaatccgctttttttcaagtcctgagaaaaaatatgggatggctgtgtatttattcaaaaacactttaaggggaaaagaatgcctagactgtctgcacaagaattgtacaatcgtctattacaagaacatatttatgatttaacgggtcaaatcagatttgaacttggagatgtaaatatcattgtaaagcaaagggacgttgttggtaatattattcaagaatggctacaaggatggcttgaccttagaagaattgagtattcggttaatgaaaacacacaaatgcctccggatttctttcttgaccctacaaatctaactcataatatgctcgaagtaaaagcgttttatcgcaatgcttctccaggttttgacattgcggacttccgcatgtatgaagaagagattattgaaagaccttatatgcttgacgttgattatctcattttcggatatgatatgagtgatgatggaatagtaacagttagagacctttggctaaagaaggtttgggaaataacacgacgaatggagaattggcctctcaatctccaggttaaagctggagttgttcataaaatacgccctggggtatggtatacagcaaacacaagacaacagtttagaatgtttaattgcctcgaggattttgtatcagctattgaagaaacggtctaccaaaatcctagaattcacgatgcggccgcaacatggcggacatcattctcaaatagttattttcagttttatcaaagaaacatcatcattcccagatggcaagacattagagataattatgtggtgaggaattaacccccaacataatttcttttttttattgtctaatacatcctcccccaaaagaggaaatgttgttttatagatagaataaaaaagcctcggcctcagaattatctcttgagccgaggcatatgtcaagtattctttacaaaaaagattattacatacctatctgaaacttattgtgcttgttcagtattgttttgcgcaccaatcttcttcatcatcatattataatgtgacaaatggccgcttacttcaaaaatacgcttaaagacctttttatattgattcaaagtatctgtctctggttcaaacgccaaatcatctggtattgtatgagatccaccatttatccattgaaacaaagatttggcaattatcttatcctctatggaaactattttcttaataatatcatctttgtcttcccctccaagtaacgtaaaatagaactcaatgattcgacgcataacgttttgtattgatataaatgatgtttcattctcttcatttagctccctccagagcaattcataagatgtcgcgatgggattcttcattccataaggcttaattgatgctatattattgttttttctaatgatccaataattcacaaaactgcgttctatagcctttcctccaacatgagatgcttctttatgaaaaaagacattgtgagtcaaaacaaacagctgagttgctctacaggagtttgtattgtctttaattctatctattagctcctgtaccatattgctaactatatacaaaacagtactgtctaaactacaaataggatcgtcaagaacaatgatttttttatcagcaatatgtccttgctctattgatccgtcaattttttgcataaaataaaggaatgttaaaaaagtttcttctccttcactcaatgtgtttactactttggttccatcatctcgcttgatgcagtaataatttttcttgttatctgctggttgtattgagaagtttgtaaagccatatatacgaagatagttgttgattttgttaatactggtttccacgccagtaagtttctcttccctttcctcaatctctgttttaagacgattgatgtcctgttcctttctgctgatagtaatatttcttccttttatttctttttcaaacttatcaatctctttcaaatacgtttttattaagtcctcttcctgagaaaggcatgtagtccatatgtcatctgtaagtcttttggattcttgtgcatgattatcaactagctgattataatcttcaatcgttttattagccaaaacaaactggtttagtatttcattaaccaaatctgaaacatctacaatcacaattttctttcctggctcggatattttttcttcgattgtttttatattattttccaatttatcttttaacaaatcttttctagttgcaagcaattcgacattaagttgtccaatctgaacagcagcatctctatcttgtattacagtttcaagtgcataaacaatttgttgcgcgacaccatcataataatcatgtttttcttttaaacagttcttttttctctcatactctttatcaaaaaaggactcaagtttttgtctaaattcatctgtgattgtttcttgctggcagaaagggcatttccttgaattatcatgaagatactggcgaccttgactaacccacgaagcattatcaagttcttttattaaagcagatatatttacatctgtattacctactatgacactttcccaaatactgtcattcttgatttggttaaggttaaaaaggagatcttgaatatctctgacataaaacatattacatttttcgagctttgaagaatagagcgcttgagaacgctttaaaagatcatctctgtcacatattcttcccggatctccagatatacctgttttacgtttaataacttctccagaaaaacgctctttgcttcctctaaaaccttcaaacgctttagaaaagtctttgtcattcttttttagaattctctcccacacagcatccctaaactttgcctcacaaataggcttgtcttctttttcacatttatctaataaccctttttcaaatactaaatctttttctttttggtccaaggctctcattaattggtctatttcctcgttttcttttatattttcactccccaaggtaaaaatcccgggcatttcttcttgtaaattctcttgtcgaaactccctgttataaacctctattgtctcatggttggtatcttcccatataatggatgaagtttcaaaacgggtattagtatttggatacattgcaagaaaagagcttatggttgattttccgcttccgtttgcgccaaaaatgaaattgactttcttgcaatcagaaatctctgcttgctgaaacggaacgcagttgttcattttgattgatttaatcattgtggtgtcctttctgtgttttttaaacgtttatctcagttttaaaataacattttctttgaattgatgctactatagcatgttttataaaaaaatcaacatatcattaatggaaaagtgaaagaaaaacacacgatacactaatatatatcagcctttttaagcacaaaaaaaataagttccatgagaacggatataagactcaaagatcatgcctgtgcaggggaaaccatgttttacgttttctgtcgggggattggcgaattttgtaaagttttggagtgaatggaggcggtttttcgggcggttttctcctgaaagtctgctgaatatcggtcaaaaaacagcctgaaacatgtttggcacgggatatgcttatccctccggcgtaacctcaaaatcctttcaggagaaacacaacatgaaactcatcatcgcgtacattcagcccgaccggctgaatcccgtcaagcaggcgctttacgcccgcagcatcttcaaaatctccgtcacgaacgcgctgggctgcggacagcagcgcggatacgtccacatgtggcgcggcgcgcttcaggaagtcaacctgctgaaaaaagtccgcctcgcgatcgcggtcaacgacgaattcgtcgagacgaccatcgaaggcatttgcgaaggcgcgcgcaccggacacatcggcgacggcaagatcttcgtgctccccatggacgagtgcatccgcatccgcacgggagaacgcggctccgaggcgatcggctgacatttttgaactcaacagaaaggaatcctaccatgaataaaatactttccgccgccctgctcgggctgttctgcgccgggatcgcgttcggcgcggaggaacaggccgccgaagccgtcgccgaagctgccgcagccgttgaatccgtcatagtcgcggaggccgccgcgccctcgaccgccgattatgcgttgttcgcggtcaacaacctgtgggtcatggcgggcggcatgctggtcttcctcatgcacctcggattcgcgtgcgtggagtccggtctggcccgcgcgaaaaactgcaacaacatcctcttcaagaacaccatgaccccggcgatcgggttcctctcctacgccgtgtgcggattcgcgctgatgtaccccggcgtgcactggatctggaacaactggttcggattcgccggattcgggctgcacctgcccgcgggcgatccgatcgcgtaccacaacggcgagttcacgtactggacggacttcttcttccaggggatgttcgccgcgacggccgccacgatcgtgtccggcgcggtcgccgaacgcgtgaagctgagcagctatctgatcttcacggcggtctacgtgtcggtcgtgtacccggtcgtcggctcctgggggtggggcggcggctggctggacgccatgcacttccacgatttcgccggctccaccttcgtgcacagcgtcggcggctgggccgcgctttccggcgtgatcctgctcgggccgcgcatcggcaagtacgtcgacggcaaggtgatgcccatcatgggccacaacatgccgctcgtgaccatcggcgtcttcctgctctggctcggctggttcgggttcaacggcgcgtccgccctgaacgcggagccgcagaaggtcagtctcgtgctcgtgaacaccatgatcgccgcaagcgccgcggtcgtctccagcatgctgacgagcaagatcatgctccaccaccccgacctctccatgacgatgaacggctgcctcgccgggttggtcggaatcacggccggagcggactgcgtgagcgtgggctcggcggtcatcatcggccttatcgcgggcatcatcgtggtcccggcggtcgtcttcttcgaccggctccacctcgacgaccccgtcggcgcgctctccgtgcacctcgtgaacggtgtctggggcacgctcgcggtcggcattttctccgtcgtgccggaatacacgttcaaggtgcagctcctcggcgcggtggccgtcggactcgtgtccttcgtgtcctcgttcgcgatcttcttcgcactgaagaaaatcgccggcatccgcgtcagcgaggaggaagaactccgcggcctcgacctctgcgaacacggcggcgaagcctatcccggattccagttcttcgtcaacatgtaaggggaggcaaagcctccactgcagttgtgcccggctgcgctcgggcacactgcaggcagtgacaaaacagcgcccggctgcgttcgggcacaaacaagcacactcctccccatttgccccggtccgttcaacatacggtccggggctttttcgcgccttcgaacccgacattgaacacaaccatataagccaaaattctccccgcgaacgggcaaaaaaaagcggctattgaagccgcctcgtggtcttcccgtgggaatgaaccatcatatcctttaccaggacttgtagagtaccaataatctaccatgcccggaaagaaatgtcaagtatttttttgataattgtttgatttttctccgcccccgtgatattatatagcggaaaacatacggaaccgctacagaaaggggcttcatcatgccgtacacgacactgggactggatttaggagtcgcctccatcggctgggcgctgatctccgaagacggagacagggaattccacctgaaggcatgggggtcccgtattttcgagcagggacttgacagcggaagcggtctggacggaatctccgcgggaaaagggacctcgcgcgccgccgagcgccgccagaaaagggcgctgcgcacccagtacaaacgccgccgcaaacgcaaagaggacctgaagcacatcctgacggaaaacgggatgctccccgaaccgttcacgccggatttcttcgttgagctcgaccgcaaacttgtgcagacgcttcccgaggcggaacgtgaacacgccgcccacatcgcgccgtatctctaccggaaactcgcgcttgaccgtcccctcacgaaagaggaattcggacgcgcgatctaccatctggcacagcgccgcggctaccggagcaaccgcaagctggacatgaaggacaaggacaccggcgtcgtgaaggaaggcatcgcggaactgaagtccaaaatggagcaggcgcacgcccggacgctcgccgagtatttctgcacggtcgatccgaacgaggaacgcatccgcgcacactacacggaccgcgccatgtacgaggacgaattccgcaagatatgcgaggcgcagcgcgcgatcgtctcccccgaactcgaaaaacagcttcacaaggcgatattcttccagcttaaactcaaatccgccaaagggctcgtcgggaaatgcgaaatctacccggaactccgccgctgttccatggcgaaggatgaggcacagcttttccgcattttcacgaccgtctccaacctccgcgtacagaaaggcgataccgtccgtccgctcacggatgaggaacgcggcaacgccgtcgccttcctgaacggctattcggacaagttcaccgtacgcggcacgatcacgctgaacaacctcggaaaagtcatcgggcttgccaaaggtgaaaagttcacgctcggcgacgaaagcaaggaaatccacggaaatgagctccacgccgcgctcgtccgcgtcttcggcgcggaaaaggccgccgccatgagcgccgccgaacaggatgcgtttttccatgacctcaattccattgagaaggacgccgtgctggaaaaacgcctctccggctactggaaacttgctccgccccaagtcgaggccgccatgaaggtcatgccgccggattcctactgcgcgtattcgctccgggcgctcagggaaatgctgcccgatcttgaggcggggatccccctcgccacgctcaaaaagaacctttatccgaagcaggtcggagcggaacacgatttcctccccgttttcgacggcgacgaatgcggcattgaaatccggaatcccctcgttcaccgtgtgatcacggaactgcgcgcggtcgtgaacgcgatcatcgcccgctacggcaagccgaacgccatccacattgagctcgcccgcgacctgaagacctccaacaagcagaaggaagccatcaccaatcagaaccggcagagggaaaaggaacgtcagaagatcgccgaacgcatcctcgcgagggcaggcatcgaaaagccctcccgaaacgacatcctgaaggtcatgctcgccgatgaatgcaatttcgagtgtccctacacgggaaagcgcttttccatgcacgatctcctgtacggaaaagacatccacatcgaacacatcatcccgctgtcacgctccggcgacgattcgttccgcaacaagactctctgcgacgcctccgcgaacagcgccaagaacaaccgcacgccgttcgaggcgtactccggcgaacagtacaggcagatcctcgcacgcgtcgcgcagttcaaagggcattatgccgcggacaaactcgctcttttcaagaaaaatgagctggaaaacgatttcatcgagcgcaacctcaacgacacgcgctacgccagccggatcgctatgcagtatctcggtctgctctacggcggcatggtcgacaagaacggcaaacggcgcatcttcgcgaccaacggcggcgccaccgccctgatccgcagaggatggggcggaaacgacctgctcggcgagggcgagaaagtccgcacggaccaccgccaccatgccatcgacgccctcaccatcgcgctcaccacgccgggcatggtgcagaaactcgcgtccatgccgcccgaacagcgccgcaagcttcacgaggcggggaagtcgctgatcgacgattccgggcttttcaacgaggcgaaacaggcgctggactccgccgccgtctcccatcacgtccgaaacaggctccgcggcgcgctgcatgaggaaacgatctacagcagggatttcggcgggaccgagcgccatgtccgcgtgagcctgaacgcgatggaaccgagccacgtcgcgaagatcgtcgatcctgccgtccgcaagctcgtcctggagaaactcggtaagtccaagccggaggacgttaccacgaacgacctcaaactcttccgcgacgacgccaatcttcccgtcttccgcgattccaaggggaatccggtcaatacgatcaaaaaagtgcgcgtcgcgcgcaacctgaagaccgtcacgatcgggtccggcgacggcgtccgcgaaatcatgactgggtccaactatgtcctgcccattttcgcgaagctcaacgagaagggcgaagaaaccgagtgggaaggcgaaatcgtcacgctgctcgacgccatccagcggcagaaacacggtctgcccatcttcgagaaggacaaacccggatacaagttcaaattctccctcaaaaaaggcgatatcgtcaagtggaccaaagacggaaaagagtatctgtgtgtcgtaagaggtttttcccttccacagttctatcttgttccgatcaatgaagcgaggaaaaaagaagacttgaaggctgcaaaactttggtttgttctttatctttctaccgcattcaaaggtaatcttcggaaatatcgcatgaacatcttcggagagttgcagcgtgccaacgactgacagtttttcatgccgtaaaaaaacatcgtcttccattttcggatgacgatgtttttttgtacacatgatttacgataccgattgagaaaaggcctgaatatgttggaacatttccaatcaagtgtaccgtttgaactctacaagccccagcagcgaaaatacaccaaagacgggcgcctgtaatcaagtgtcaagtgtaccgtttgaactctacaagccccagcatactcccggttcgtatcctgcaagcgcagaatcaagtgtaccgtttgaactctacaagccccagcaaggccagcgtgatctccgcatacgcctcgaatcaagtgtaccgtttgaactctacaagccccagcgatccgtgacgacctgtggcggaggcggcgaatcaagtgtaccgtttgaactctacaagccccagcatggggggattgacttcgatgacctcgaggaatcaagtgtaccgtttgaactctacaagccccagcccatcgacagaagcctcaacgaccttttcaaatcaagtgtaccgtttgaactctacaagccccagcagggcaaagccacggaagaaaattttttcgaatcaagtgtaccgtttgaactctacaagccccagcaagccgagttcaaagacctcagcgacgggaatcaagtgtaccgtttgaactctacaagccccagcgtaatcttccatgcttcggtgttcgcctcgaatcaagtgtaccgtttgaactctacaagccccagcccatctcttacatcctgaacccaagtgtaccgtttgaactctacaagccccagcatactcccggttcgtatcctgcaagcgcagaatcaagtgtaccgtttgaactctacaagccccagcgagacgacaacgatcacgacaaaaacaacgaatcaagtgtaccgtttgaactctacaagccccagccaaatgtagccgacgaatttcaaaccgtttaatcaagtgtaccgtttgaactctacaagccccagccagggatagcctgattgatggggtaataggaatcaagtgtaccgtttgaactctacaagcgtgtggagttcaggttgtcaaagaacacggaatcaatatagcacggaaaccgggaaaaacaagcggaaaccggaaaacggggcacgaaaaaagcgggtccctgcccaaccaagaaacagggatccgctcgtttgtttgcgtttttggggtcgcttcgctcctcggtgaactcgtttgcacgagttcgacattttcgcaaacgcgagacgcgaaatccgagggggaaataccccgggcaggaggctgaattacatcatgccgcccatgccgcccatgccgcccattccgccgtcaccggggaccgcgggtttttccttctcggggatctcggtgatgaggcattcggtggtgaggaggagtccggagatggacgcggcgttctggagcgcgctgcgcgtaaccttcttcgggtcgatgatgccggccttcaggaggtcgacgtattcgccggtggcgatgtcgtagccttcggcgcccttgcccgcgaggaccttgttgaccatcacgctgccctcgaagccgccgttggaggcgagggtgcggaggggttcttcgacggcacggcggacgatgtcggcgccgacggcctcgtcgccctggagcttcagggaatcgagcgccttgaccgcgcggaggagcgcgacgccgccgccggggacgatgccttcttccacggccgcacgggtggcgtggagggcgtcttcgacgcgtgccttcttctccttcatctcggtctcggtggccgcgccgacgttgatgacggcgacgccgccggagagcttggcgaggcgttcctggagtttttcacggtcgtaatcgctggtggtctcttcgatctgcttgcggatctggttgacgcgtgcgaggatgtcggactgcttgccggcgccttcgacgatcgtggtgttttccttctcgatcgtgatgcgttttgccttgccgagcttgtcgaggccgacggtgtcgagcttgatgccgaggtcttcggagatcagggtgccgccggtgaggatggcgatgtcttcgagcatggctttgcggcggtcgccgaagccgggggccttgacggcgcagacgttcagcgtgccgcgcatcttgttgatgacgagcgtggcgagcgcctcaccctcgacgtcctcggcgatgatgagcaggggcttgccggtcttggcgacggcctggagcacggggagcatgtcgttgaggttggagatcttcttctcgttgatgaggatgtaggcgtcctcgagggagcaggtcatctcttcggcgttgttcacgaaatagggggagaggtagcccttgtcgaactgcatgccttcgacgacgtcgagggtggtctcgatggtcttggcctcttcgacggtgatggtgccgtccttgccgaccttgtccatggcgttggcgatgatcctgccgatctcggaatcgccgttggcggagatggtggcgacctgggcgacctgttcgctctcgctgacgtccttcttgatggtgtcgagcttggcgacgatggcttcgacggccttgtcgatgccgcgcttcaggctcatcggattcgcgccggcggtgacgttcttcaggccctgcttgaagatggcctcggcaaggacggtggcggtggtggtgccgtcgccggcgatgtcgctggtcttgctggcgacttcacggaccatctgggcgcccatgttctggaaggggttctggagctcgatctccttggcgacgctgacgccgtccttggtgatcagcggggagccgaatttcttgtcgaggacgacgttgcggccgcgggggccgagggtggccttgacggcggcggagagctgttcgacgccggaaagaagctgacgacgagcttcgtcgttgaaaagcagttgtttagcagccatgatatggtatctcctgtgatgtatcgtttatgttgggggtttgcggggtcagccgacgatggcgaggatgtcgctggagctgaggatcttgtattccttgtcgttgaacttgatctcggttccgccgtacttgctggtcagaacgatgtcgccgaccttgacgtcgaatttggaacgggtgccgtcgtcattgagcttgccggtgccgagcgcgatgaccttcgcggacatgggtttttccttcgcggtgtcggggatgtagatgccgcccttgatctgttcgacttcttcgacgggttccacgaggacgcgatcgcccaagggctggattttctgcgtttttgccatgatgtcatgactccttgtttggttgtttggagcgcccccgccattggttgaggtttgcggaggcgcccgtttgtattggttatggattcaggattgtcttacctgttcgattcggggtccggctcaatcgtccacgacttcggcgtcgaccacgccgtcgtcgttcttcttgccgccctgcgcggaggcgtcgggtccgggctgtgcgcccgcggcgccgccggcctgttgctgctggtaaacggcctgtccgatctccatgagcttgtcttcgagcgccttggagtcggccttcatggcctcggtatcgtcgcgctcgatgtccttcttgagcttttcgatgagctcttcgacgggctgcttgacgttcgccgggactttgtcgccgaggtccttcagctgtttttcggtctggtagaccagagagtcggcgcggttcttgacctcgatcttgtccttggcggccttgtcttcggcttcgtgcgccttggcgtcgttgaccatgcgctggatatcctgttcggagagtccgctgctggcggtgatcgtgatcttctgttccttgccggtgcccatgtccttcgcggtcacgttcaggatgccgttcgcatcgatgtcgaaggagacttcgatctgcggaacgccgcgcggggcgggagcgatgccgtccaggcggaagcggccgatggtcttgttgtccttcgccatgtcgcgttcgccctggagcacgtggatgtcgacggagggctggttgtcggcggcggtggagaagatctggctcttgcgagtcgggatcgtggtgttgcgttcgatcaggcgggtggtgacgccgccgagggtctcgatgccgagggacagcggggtgacgtcgagcaggaccacgtcgccgaggctggcgttgccgctgagcacgccgccctggatggcagcgccggccgccacgacttcgtccgggttcacgcccttgtgcggttccttgctgaagatctgcttggcgacttcctggacgcggggcatacgggtcatgccgccgacgaggatgacctcgttgatctgggaattgctgaggccggagtcgctgaggcagttgttgcacgggatcttggagcgttcgagcagcggatcggtgagcttttcaagctgggcgcgggtgagcgtcatctggaggtgcaccgggccgtcggcgttcatgctgatgaacggcaggttgatgtcggagctcatgctggaggagagttcgatcttcgccttttcggcggcctctttcagacgctggagcgcctgcgggtccttgcggaggtcgacgccgttttccttttggaattcatcggcgatccagtccatgacgaccttgtcgaagtcgtcgccgcccaggtgcgtgtcaccgttggtggccttcacttcgaagacgccgtcgccgatctcaaggatggagatatcgaacgtgccgccgccgaggtcgtacaccgcgatgcgttcgtcggatttctgcttgtccatgccgtaggcgagcgcggccgcggtcggctcgttgatgatgcgcttgacgtccagaccggcgatgcggccggcgtccttggtggcctgacgctgcgtgtcgttgaagtaggcgggaaccgtgatgacggcttctgtgatcttctcgccgaggtacgcttccgcgtcctgtttcagcttctggaggatcatcgcggagatctccggcggcgtgtaggtcttgccgttcgcctcgatgcaggcgtcgccgttgttgttcgcgaccactttatacggtacgcgggagatctcttcctggacttcgttgaacttgcggcccatgaaacgcttcacggagaagatggtgttcttcgggttcgtcacggcctggcgtttcgcggtctggccgacgaggcgttcgccgttcttggtgaaagcgacgacggacggagtcgtgttggcgccttccgcgttgggaatgatcttgaaggtgttgccgtccatgacggccatgcagctgttggtggtgccgaggtcaataccgagaatcttgctcatagtgactgtcctttctgtgaaaagggtttgatgtttgttgtttgagacttcgcctttggattaagcatacatgatgccaagtttttgcgattctcaaaaacaattcgtcttgcagtcatttgcaaaatcgtttcgccggaatccgccgttttccggcatgtcacggcgcgtctcactgtgccaaaatgtcgcgaaatcctgtcgcattggcacagctttgacgcgattggatgttttgtgtatttggaataaagcatttgtcttttttccctgttcccagtttgatttcacgcgcatacgggtgtatattgtgctgagaatcggcagcataaacacaacacccggaggtaaagacaatggaaagaaccaggcatttctggaacgcgtggtgttcccgtggctttcctacaacgacttcagcctttccgtaaccaagaagatgccgacgacgttcatttataccatgaatgccacggaagaatacttgccggagctggaaccccagctcggtcatattgagaacctcgtttctctcggtttcgggcctgttgaacgcattgtcgcctgcaacacgacgcaggtcatggactacagccgatacgaaatggcggcggcctcgcagggcaaggcggaataccgcgaacaacattgggaacaggacctgcaaaaggcgtacgaagcggggaaacgaatggtgcaacgaattggatcataaaccaccagagagtttttgagatgagctttcaggtaatagcgtactcgccggaacacattgatgcctgcctcgcaatttggaacgaggttgtcagcgacggcatagcctttccccaggaggacgagctcacggcggaatccggcgatccgttcttttccatgcaaacgtttaccgggcttgcccggcacgaagaaaccggagagatcgccggactctatatcctacatccgaacaacgtcggacgctgtggccatatctgcaacgccagttatgccgttgcttcaaaatggcgaggacatcacgttggagaaacgcttgtccgcgactccatgagtcgggcaaaagaatgcggattccgcatcctgcaattcaatgccgtcgtcaggacaaatgaaggcgctcttgctctttatcgcaagctcggattcgttcagctgggcgtgatcccaggcggattccggaagaaggacggaatgttcgaagatatcatcccgcattaccggattctctgatcggaagcaaggattatcatgtcgaaaaacacagacgcaaaatgcaaggcagcgtttatccctatcagataaaggtcaacatgaaatgagctttgaatctgatgtttttcttcaatatcgtcctgttccggaaaagatgacccggcacggttttgtccggtcggggacggactggcttcttcggggcgaggtcatgttcgggaagtttcaggcggaattccgctggaccgaacagggaaagccacgaatcaccatttgggaagacggagaggagtattccctgatccacgtggagagcgccgatggcgattatgtccggcgtatccgggatgcctgtgtcgtttggatgacggagattcgggatcagtgtttcgccagaaaactgttctgcggcgaacaggcgaaccgcattgcggatgccttgcttcggatgttcggcgacgagccggataatccatggaaaggacgatatcccggaatcggggtgttccgcctcaaagacaaccggaaatggtacgcgatcatcatgaatgttgacggcacgagcgtccactatccttccgctcactgtgatgtcctgacatttcgagcggggattgaacgaggcgaagagcttcctcgagaggatgcccagatcctggtcgctcagagccgaggagatgccgctcttcttaacgaagtcggagagcgagcggtagctctgcatcagcgtctcggtgatgacatggtaggcgagtcgcacgtctgagatccgccaccggctgcggccgtcaacatatctccttgtggcctcgctgatgttcccgtcccggatgaactcctccacctcggcgcggcggaagctgtcggctgtcgagcgcccgtccggagacaggccgtccgtcatcttcaggtagaagctgcccgcggcaagctccatcctcttgctgtcgttccgcgccccgaggtagcccctgaccttcatgaaggtctggtaatagggatccatctggttcgagtaggcggagtcgagctggcaatgcctcctcacgatctgcgagatgagcctggtctcggggaactccgcgctgtaggcctcggtgagcaggattttgagcaccgccttgtagggcgagtgtatgcccttgtagatgagccagagcgccgagccgaagaactcctcggcggagatggtgttgcacgttccgaggtcgaaccagtcgctgctcccgctcccgagctcactcatgatgccggcgacgcagcggtcgtagcggtcgatggtgtcatactcgtcaggcaccaggtaccagaccagccaccttccggctatatggagcgccgagcggtagaactcgtcaaggaggaggagccgctgcgcgctgccgcagtcctcgctcgagagcgtggaggactcctcctgcgccccggtgaacttgtcgtcggggacaaggaagaagttcacctcgacgccgcgccccgccgccacgttggagatgatgccgcacttctgctcgaggaggaagcggccgcgctttgacatgtcgtgcgagtggcagacccagatgtcgagatcggacctgctgttctgcccgattgagccggtgctgcccatcgagtagacggacatgatgtcgcgcctccccggatccgcgaggccgctgtagccggtagcggagcagagctcgtcgatatagctctgctggtagcggctgagctcaaaatgctcgatgccgcagggggcgtcctggatatagccggggaggaggggatggttgaaatgaagaaggacaggaagctgctcgaagaagatcctctgcttctccgacatgaggatcacagcgcgctgaagccgctgcgcgttcacctgcctcacgcgcctgacacgctcggcaagagatggtatatccgtcatatgtcagccccggtccgatgcagcccgccctgcagtgcgggcattgcgataattttggtaactatatcacaaaatttgcgcaaaacatcagcccggatggaaacaaaatttcaccggcgcggcggggacggaaagcggaaagacggcgggacaggaagttttttgctgatggtgcggcataatcagtcatagccggcacaacctgcgggcaaaacgcggtaggatacatggcagcagtcacttcacgggtaccggacggcatgagcagcaaagacagcagaaatgcggagaagcccgcagcaaacgggaccggacagacctgggacagcctcagcagcggcattccggctgaccgccgtaaattctgccttctcgccagcacctataaaaaacagctgtgccaaccatgggacgacagcctcattgaggctttagggctggtaacggaagacgggatgcttaccaatgccggactgctgtttgcagattactgtccgctcacctggtgccgttcagtctgctgcagatgggacgggcccgaagatggctatgccatcaacgaaaacgaatacagcggaaatattctcctggtgcttaaaatgacagcagacttcatcagggccaataccgcaagacgctggtacaagctgccgactcacaggctgaatatcccggagtactccgacagggcagtccttgagtgcacggcaaaccatctcgtacactgtgattaccaggcaaagggaagagtgctgcgggtcgacatttttgatgaccgcatatgtttccgcaccccgggcggaatgcccgacggaaaaggacctgttcagaaccgtgatataagcgcagtcgcgccggtccgccgcaatcctgtcattgccggagttttccagaagcttgatctgatggaaaagaacggtctcagaagcatgctgagcttttctgctgagcttccgtcgtacagcgggccagccacgccggttttccaaagcgacagcgtgtccttcaccaccacgttcaggaacctcagctatgggaaaaccgaagaggatttccagcgcattattgacagtgaaatacagcgcgacatgactggcttctgggataaaactgcctggggaaatccgggaactgccctgaaagttcaggaaactacccagaaagctgcaagtaaaactcagaaaactacccagaaaactgccaggaaagctcagaaaactacccagaaagctcaggaaactacccagaaaactgccaggaaagctcagaaaactacccagaaaacaggtgttcgccatgttggtaaaacagccaggctgataatcgatatgattcttgctgaccctaaaacaacaagaaatcagtttgccgaggcggccaaagtaacgcctgatgcaatcaaatggcagctgaaaaaactcacttctctcggcataatctcaagaacaggcggagacagaggaggtttttggaaagttatagccaatcctgcgtcagctgatgatccgaaataaagagaagccctgatcagcgtacacagct

SEQ ID NO: 464 - DNA, 7223 bp, synthetic construct
  source 1..7223: mol_type = other DNA
  misc_feature 1..7223: note = Synthetic
gcccggctttgacggggttcgggtcgccgctgccgacgaacgcggagccgtgacgggcaaggcgggtcggcatcacgcagtcaaacatatcaacaccgcgcgccacgctttggatgatctgccggggggtaccgacgcccatcaggtaacgcggggcgttttgaggtagatagggggtggcggcatcgacggcgagcatcatttcctcttcggattctccgacggaaacgccgccgatggcgtagccgtcaaagccgatgtcgatgaggctttcggctgcctgtttgcggaggtcggggtagacggagccctggacgatgccgaagcggatctggccgtcattgagcggttgttcgcgtgacatccgttcccagcgggtggtgacggcgaggcttttcgcggcctgctgccaggttgccgggtaaggggtgcattcgtcgaacgccatgacgatatcggagtcgagggtgcgctggattttcatggattcgacggggccgaggaaaaagcgggtgccgtcgatgtgggaggcgaagcggactccgtccggctccattttgcgcaacgtggcgaggctgaagacctgaaagccgccggaatcggtcaggatggaacgtttccagttgctgaatttatgcaatccaccggcaaggttcatgatttcgaggccgggtttgagaaagaggtgataggtgttgccaagaatgatttcggcgccgagttcttcgagttcggcgggggacatcgctttgacggtggcgcgggttccgaccggcataaacaccggagtttccacggtgccgtggcgggtggtgaggcgtccgcgccgggcggcggtggcggagtcttgtttcagtaattcaaaaatagccatgaaggcggttccttttcagttcagatcgtaacgaacatccgggcataaagcgcggagatctcttctgtggacttgccgagcgccagagcgaggtgtgcggcaaacgtgaagaccgcgccgggaccgcggccggtgacgatgcggccgtcggtttcggcggcggctccggaggggctcaggccgtcgagcatcgactcgaaacccggatacatcgtaaagcgttttccggtcagcaacccggcttttgccagcgcggccggggcggcgcagatcgcggaaacgacgccgccggcggcgtcaatccggcgcagcagggcgagaacggtttcgctgttgcgcagtttttccgaccccggaccgccgccggggagaaacaccgcgtcgaacgattcgtcggcgcagtcggccagcagtgtgtcggcgagcagggtacagccgttggcggcgtgaacttcacgggtgtgaagcccggcggcaacgacggaaaaaccgagccggcggagtacatcgatgaccgcgacggcctcgagttcttcgacgccgtcggcgagaatcgcaagaactttcatggaaaacctccggttccggagttgcaaaagaacgattccggaactattttctgcattgatacaattaccactgcatactatataaccgaaagccggttctgacaatatgtttacccgtgatttggactattttattgaataccttaccgtggaacgcggattggcggagaatacgaccgtcgcttaccgtgaagacctgacggggttcggccgttttctggaggagcgcggcgtgagcgattggaacacggtaacgcatgacaccatactggactacctggatgcggagcgtgacgccgggcacagcagcgcgacgctggcgcggcgattggtggcgatcaaaatgctgttccgttttctggccgacgagaagaagctcgcgcgcgatatcacggcggtgatggactccccgaaactgtggcggatgctgccggattttctgtcggtcgacgaagtcgatcgttttttgaacgcgttcccggcgacggtcaaagaaccgctcgaactgcgcaaccgggcgatcatggagttgctttacgcctccggactgcgggtgtcggagctggtgaagctgcggctgggggcggtcgatttcgaaaacgaagttgtccgggtgaccggcaaggggagcaaaacccggatcgtcccggtgggcaaggtggcgctgcgcacgctgaagcgctatttgaatgaggtgcgtccgacgttgctgcgcaccccgaatacggcggaagtttttctttcgcaccacgggcggccgctcgaccgggcgcggatctgggggctggtcaagctcgccgccgaacgcgccgggatcaccaagaacatccacccgcatacgcttcgccattcgtttgccagtcacctgctggcgaacggcgccgacctgcgggtgatccaggagatgctcgtccatgcggatatcagtacgaccgagatctacactcacgtcgaccggagccggttgacggcgctgcatcataagttccacccgcgcgggtgagagcgatttatcgagagagaggaatagaatggatgcgtttcgcgagttgtgcaagctgaccggacaggcgattgcccggtaccggatgatcgtggaaggcgatcggattctggtcggattgtcgggcgggaaagacagttttgcgttgttgcacgtcctgcatgagttacggcggaaagcgccggtgaagtttggactgatcgcggcgacgttcgatccgggattcgaagagttcaacacggaggggatcgccgcctattgcgccgcgcagaagtgggagcaccgggtggtggcgctgccgattccacggattctggaagagaaacggtatgagggtacgccctgtatgctctgctcgcgcctgcgtcgcgggaagctctacgcgctggccgcggcggagggttgcggcaagttggcgctggggcagcacttcgatgatattgcggcgtcgtttctgatgagtttctgccggggacaggggttgacgacgatggggccgtcggtgcgcgggaagtcggcggaggggatccgggtgatccggccgtttgcgctggcgccggagtcactgattgtggagtgccggtcgcgctgggagtttccggctgcgggcaagtgccgttatgaggacgagttgaaaaacggggaccgggcgacgttccgccgcctgatcgacgatctggcggagcggattccgaacctgcgttctcagatgctgcgttcattgagcaacgtgcaggcggagtaccttctggatccgcgttatctggatttggattaatcggtcggccggaaaccggttcgaggcggaattttgtgtttttttcaggataccggcttgcaattccccggaaagggggctatattttaaaatcaaagatggggcattagctcagttggctagagcatcacactggcagtgtgagggtcagcggttcaaatccgctatgctccaccattttttttgccttgacaccggaattttccggcggaacattgatccccgcctcttgaaattaccctgatttgcggtgaaacgtgattcgtttgtctgccgggcccgtcgatacgttctgtatcgtcgggtttttttgttttccgtctctttttacggagccgctttgcggggagaaccagatcctgaatgcatggggaaagcataaaaaaagcggctattgaagccgccatgaggacttcccgcgggaagtcgcctacagaaagttctttaccagaacttgtagagttacaagtaatctaatgtttttttcgaataaatcaaggctgatcggctgaaaatcagaatttttttgaaaaataaaatagttacagtgatttcggaaaaaaattaactattattatgatgtaagatcaaatcactcttgaaatagatgatcaatccatgtaaattcaattggaatcaatgatttcaagggtaataccatgggcgatggccaccaatgcaggagggatggtgttttatgagcagaactattttagggcttgacctgggcattacgtccatcggttgggcggtcatcaccgaagaggcgtccgggacaacgctgaacggctggggcagccggatctttgaggccggtatggaggacgatatcgaatccggcaagggggtgtcccgctgcgcgacccggcgattgaaccgggcgctgcgcatccagtatcgtcgcagccgggaacggcgcgaaaagctcatcgccgttttacaggcgcaccacctgctgccggaaccgctgacgccggatttttttgtgaagatcgacaaccgcctcctgctttcgtttccggttccgctccgttcgcaggtggcgcaggtgctgccctatctgtaccgcaagaaagcgttggactgcccgcttgcgccggaggaactggggcgcaccttctatcacctggcgcagcgccgcggttataagagcaaccgcaagcaggacctgaaagacgaggagagtaccggcgtcgtgaaatcgggaattcaggcgctgaaaacggcaatcgttcaggccggggcgcggactctcggggagtatttttgcggcatcgacccggaacagacccggattcgcggccgttataccgatcgcgaaatgtatcaggaggagtttcaccggatctgccgggcccagcgccatttggtttcggaggcgttggagaaggagctcttcgacacgatttttttccagcggaaactgaagtcctgcaagcacctgatcggccagtgccggctggtgccggaagcgaaacgttgctctttcgcccgggaggaggcgcagcttttccgcatctattcgaccgtcaatcacttgcgggtcagcagccggggcgcgattcgcactctgacgcccgaggaacgaagccgcaccatcgccgttttgaatggtttttcctcggtattgaccaaaagcggcaaaattacgctgaacagcctcggcaaacagttgccgttggccaagggtgaaaaattcacgctttccgacgacgaaaaagaggtgtacggcaacgtgctgcacgccattttgttccgggtgttcggcgcacgagccgaagagttgtcggccgcagagcgggacgcgttttttcaagacttgaactccatcgaaaaagagccgatactgcgcaaacggctcaccggacactgggggctgagcgaggagcaggcggcggaagcgttgaacgcggcgctgccggatgaatactgcgcgttctccctgaaagcgctcaaaacgctgctgccggatctggaggcgggaattccgctcaataccgttctgctgcatcagtacccggagcagtaccactcccggacggctccggtcgatttgctgccgctggtcgacgactgcggcctggagttgcgcaacccggtcgtgcaccgcaccctgaccgaactgcggcgcgtggtcaatgcgatcatcgcccgctacgggaagccggacgtgattcgcatcgaattggcgcgggatctaaaaagttccaatcaggagcgggcgcgcttcacccggacgattcgcgaccgtgaaaaagcacgtgccgccatcgttcggaaaatcatcgaagaggccggaatcaaagatccttcgcgcaacgacatcctgaaagtgatgctcgcggaggagtgcgacttcacctgtccctacaccggcacgcgtttctcgatgcgggacctcctgtatggcaaagagatccacatcgaacacatcattccttattcgcgttcgtttgacgattcgttccgcaataaaacgctgtgcgtcgccgaagccaacgcacgcaagggaaaccagacgccgtatgaggcgtttaccggtgacgagtaccggttgatcctgcagcgggtcaagcacttcaacgggccgttcgcggaggccaagagcgatctgtttgcgatgaaagaagttgactccgacgcgtttcttgagcgaaacctcaatgacacccgttactccagcaaactggccgtccgctatctggcgctgcttttcggcgggatcgtggatgcgggcggcacccggcggattcaggcttcggccggcggttgtaccgcattggtccgacgggcctggggcggcaattacctgctgggggaaggcgaaaaggtgcgcgacgatcaccgtcaccacgcgatcgacgcgctgaccgtggcggtcacgtcgccggaactcgtcaaaaagattgcgtcgatgccgtcggagcttcgccgccggctcagcagggaaaaacagccgctggtcgaagccacgctgtacgagcaggcgcatgggttattggattcggcggcggtatcacatcatgtggtcaacaaaatccgcggtgcgtttcacaaggagacgatctacggcaaggacttcggcaacaccgagcgccacgtgcgggtggcattgggcgcgttgaccggcaaagatctggctgggatcgtcgacccggcaatccggaacatcatcgagcaaagccttgagaacaacggggtggatctcgcggcggtaagcggcaaagacacgccattgaagacgttctccgatcaggccaatttaccttcgctgacggatcgcgccgggaatccggtcaacaccatccgctacgtccgggtgaagcgcaacgtcaacgcccggacgattggagagggcgaccggcagcgggcggtcgccaacggcgagaatcaccttctggcggtttttgccgaactggatgaacgtggcggggaggtcaaatgggtcggggaaatcgtctcattgctggacgcccgcctgcggcttcagcgcggggaaccgccggtccggcttgaccgccccggcctgaagttcaagttcaccttgaaaaaaggtgatatcgtcagctgggaaaaggatggccgggagcaattgtgcattattcgcggagtttctctgccgcagttttcgatggtgccggtctgcgatgccagaatgaaaaatgagttgagggccgcccatgtttggtttgccccaacactttccggtgcattcaagggcggtctgaaaaagttcaggatgaaccttttcggtgaactgcggcgggccaatgactgaccggatccttgaaatcgccgaaaccgcggcacagctgtcgttatcgaaccggcggctgcggctgcccgacggccgggaacacctgattccggtagcggagcttcagtgcctgattctggccaatccggcggtttcgatctccggggcgttgttggcggcgttggcggacgccggttgcatggtattgggttccggcgcggcccgcccgccggcgggggtgg

SEQ ID NO: 465 - DNA, 4155 bp, synthetic construct
  misc_feature 1..4155: note = Synthetic
  source 1..4155: mol_type = other DNA
cggatcctgcagttccgccacagcagcttcatctcctgggaccgggttcatccgaacgatgtcggccacactgctctggcgatggcattcctgcgggcgatggagttcgacttcggagcgtgaatcgacggagattttatttgaatcgatccggcagccgcgagacatatccgcggcagccgctgttttgacgccggcgcttgagtcggctttatttttctctcccccaaaaaaataggcggctgatgcagccgcctggaggacttcccgcgggaagtcgcctgcagagtccattgactatactgcttttttttctgttgtcaagttgcaaaacggggaaatttgaattatttttttattgaaaagtcatccgtttacggtaatatcaatcagaaggacggagcgaatgggagtggtcacactgggactcgatctgggtgtcgcctcgatcggctgggcgctggtgaacgaggagaacggaacgcataaactgattcactggggcagccggatcttccaggcgggagtggatgatctcacctccgggaaaggaacctcacgctgtgccgaccgcaggcggtagcgggcgttgcggctgcagtatttccgccgccgggagcggaaacgggagctcgtcgaaactctgattgcgggcgggctgctgaaatcagcgcccgatcaggcgttttttcaggagatcgaccggcggctgctgcggctgtttccgtcggaggagtttcggcggaaagcccatctcatcccctatttctaccggaaacttgcgctcgatcagccgctggagccggacgaactggcccgggcgctttttcatctcgcccagcggcgcggatatttgagcaaccgcaaacaggaggcgaaagatgaaaaggaggcgggcgcagtcaaatccggcattcaccggcctaaggaggcgctccggaattccggcgcccggacgctcggggaatatttctgcggggtcgatccggaggcggagcgggttcgctgccgctacaccgaacgggcgatgtatcaggatgagttccgccggatctgccgggcgcagcggcatctgattccggaagagctcgagaacgcgctctaccgggcgattttttaccagcgtccgctgaaatcgtgccgacatctgatcggccgctgccggctgtatccggatctgccgcgctgttcattcgcccgggaggaggcgcagctgttccggatttacacgaccgtccggaatctccgggtcgaatccggcggtgtgatccgttccctgacggaggaggagtcgcgggcggcggtgaagcttctgaacagtttttcgccgcagttcaggaaaaacggcaggatcacgctcgcaaagctccagaaagcggtcggtctgacgcgcggagagaagttcactctggccgatgaggagaaagaagtctgcggaaatgaattgaagaacattctgttccgggcgttcggagaaaaagccgcaacgctcccgccggaggaacgggaacgctttttcaacgatctggcctcgatccggaaagaggaggtgctgcgcaaacgtctgcgagaccactggaaactgccggaggagcggatcgacgaggtcgcaggtctggcgatgccggaggggtattgcgcattctccctgaaagcgctgcgggaactgctgccggaactcgaagccggcatcgatctgagcaccgtgttgaagtgcacgcacccgactgaatgcggcgaggagaaagcggagcttgatctggttgaccgcagcggcatcgatctgcgcaatccggtcgtgcaccgggtgttgacggagctgcggcggacggtcaatgcgctgatcggccgttacggcaaaccggaccggatccgggtcgaactctcgcgcgatctcaaatccacgggccgcgagagggagctggccttgaaacgaaaccgcgaccgcgagaaactccgcgcggcggctgcggcccggatcgcggaagaggccggaattcagaatccgtcccgcaatgacattctgaaacttctgctggcggaagagtgcaatttcgagtgtccctattccggagagcattttgagatcggggatcttttcagcggtcgtctggaggtcgaacacatcatcccctattcgcgctcgttcgatgattcatttttgaacaagacgctctgtctgcgggagtacaatgcgcggaaaggaaaccggacgccttacgaagcgttcggcggcagcgatgaatacgaggcgatgctcgaacgggttgcccgtttcaaagggagtgcggcggagcggaaactcgaactcttcgagatgacggaagtgcagcccgaagagtttctcgcccgcaatttgaacgacacccgttacgcgagcaaacttgcggtgcagtatctcgggcagctgtacggcggcgttgtcgaccggacggggaagcagcggatttttgcgacttccggtacctgcaccgcgctgatccgccgggcgtggggcggcaatcatctgctgggcgagggggagaaagtccgggacgatcaccggcaccatgcgatcgacgcgctgacgatcgcgctgacgacgccggagatggtccggtgggcggcggggctttcgccggaggagcgccgcaggatgctcgaatcgaaagagtttgcggacaacgaactcttccggcaggcgaagagccggctcgatcagatcgccgtttcgcaccacgtggtcaacaaactgcggggcgcgctgcatcaggagacgttctacagccgggatttccgccccggaaccggagagcggcatatccggatcgccctggatgcgctcccggtgaaagagctcgggaatatcgtcgacgccgcagtgaagagggcggttctgagcaagctcggcgtgacggaccccggcgccgcgacggaagcgatgctgaagcagttcaaggatccggcgaatctcccggtgatgcgggatcgcgccggcaatgtcgtcaacatgatccggaaagtccgggtgcgccggtcacagcagacccggacgatcggccggggtgacggccgccgcgaggtcgccaacggcgagaattatgttctggcgattttcgcccggctggacgaccggggcaacgaggtcgcctgggagggagagatcgtttcgcttctggacgccgttttgcggcaccagcgcgggctgcctccgttcgagcgcgaacgccccgggatgaaattcaaattttcgctgcagaaaggcgacatcgtctcctggaaacgcgacggccgggagctgctctgtgtcatccgcggggtttcgctgccgcagtttcactgtgtggccgtcaacgacgcgagaatgaagaaagatattcaagctgcgcaggcgtggtatgcgccgacggtgacggcggcattcaacggcggcatgaagaagtacaatatgaatctcttcggggagctgcagcgggccaatgactgaccggatcgtggagattgcggatacagcggcacacctttcgctggagaatcatctgctgaaaatccggctgccggacgggaggtcgtccacgcttccggttgcggaactgcagtgtttgattctcgccaatccggcggcgacggtcaccggggcgctgctgtccgcgctgccctgccgccgctgggcggtgatggcggatgatacggtggcggcgctgtacggcggcactgtgctggacagcctgcgtgacgcgggccttgccggagaactgctgaccttcccggcgggggaggaacacaagacgccggagacgtggctcaccctttgccgccagctggcgcagcggggctttacccgcgccgacggcgtgctggcgctgggcggcggcgttaccggcgatctggcgggctttgccgccgcctgctatcagcggggcatgccgctggtgcagattcccaccaccctgctggcccaggtggacagcgccgtgggcggcaagacggcggtggatcttccggaggggaagaaccagctgggggcgttctaccagccgtcgctggtgatcgtggatccggactgccttgccacgctgccggagcgccagctgcgcagcggcatggcggaggtcatcaaatacggcttcatccgcgacatcgcgctgctggaactgctggagaccgacgcgccgg

SEQ ID NO: 466 - DNA, 20113 bp, synthetic construct
  misc_feature 1..20113: note = Synthetic
  source 1..20113: mol_type = other DNA
tgagcccccagctcttgccgaaagtagcatcttcatcaaaataaagattatgaccgtcaaaaaagtacatgaccggatatcgctcatctgtctcgttatatcgatcgggaagccagatgtgaagcatgcggcctttcccttttggcgtatatataaaatcccgtttgataaccattcttacggtcctcctcaaataagcaagtaatttttgaaatcccaaggtgtttcacccggtatatctccctgtaagttccatattcagccttccggttcaaccttccttcgcagcaggtttatgatcagcatgaaacctgattatatcctgttatggtgcaaaaagaaagtgaacggtgcaaaaaagccgttcactttgttctcaattcaggaacatttaaagttttttgggactctttttattttcattcaatgagctttgaagtcttttgttccttttttgtattcacccaatgaactttgacatgaccgcatacaattcctgaggactgaacggttttgtcagatgctcattcatgcccgcagcaaagcttccttttacatcttcctcaaaggcgtttgccgtcatagctataatcgggacctgatctccgccgagatctttttcactgcggatcattcgggtagcttcaagaccgtcgaccagaggcatctggatatccatcagaatgaggtcatacgctccttccgcctttcggaatgcattgagagcttcctcaccgttcatagctgtatcaacttccagtccggtcttctctaacattttcacgccgatttccagactgattttgtgatcatcaacaagaagcactcttcccttcttgaacgaatatttcctgctcgtttccgcaggaagtctcgtgaatgtctcatttctgtcataggaaatcgggaacgtcatggtgaccgtgacacaggaaccccgatcatcgagactctgtgcctctacacgtcctcccatagcagcgacattgctctttgccagtgtgagtccgagatcgagctgatcaggagactcaacctgcacgatcaccttcggatctaccggttcaaaaatcgccgacagatactctgcattcacgccggtcgaactgtcggatattgcaaatctgagtgtcgttctgttactctcccgcttctgctcggtgaccaacagccggacatttccgccattggcattgtagtcaaatgtattctccagaagtctcgtcagcacctgttcaagacgatatcggtcagccatgatctgctgaggcacgtgactcccgagctcgacggaaaatgtaagtcctctctccgatgcactcggaagcatttttgcctccaggatgccgaaaaactctgcaagatccagcctctccggtgtgagcaaaacaccgtttcgctcaatctggtgaagggtaagcatgtcatcgatgatcgagtgtatagacgccccagccgtaatgatattatcaagatagaccgcttcccttgtatcgtcggaaatctccgaccgggcaatttccgcaaaaccgattatagaactaagcggtgagcgaatatccctgctgagccgggataatatggaatttctggaaattctatagaaacaagaaaagctagatattatctatgttttatactttgaagtgttaatttatcctaaacattgtgcattttatgatattattcggtaatctttttgtttatttttacatcaaatatagatattaattaaaaattaagataacggtgtgtaaatatattaagcatagtgacgttgtgaagaaatttttacttttaggcgtctgtatgattaaagtcgtacagggtgttgtcgcacaggataattctccttcgacttctaattttgctcgtctgtatgttgggcaggttgagcaaccgtatcaaattgcattgtggcatgatattccatattacaatggtagtactgatacgtacaaggggcgtatttgctattatggtgtggtttacgacaatgttcagcttcgatatgaccagttgaagcaatgtgttgttgtccttacgcctgtgggaaatatatattgtgtgccggaacaagaacatattgaatggtttgagtttgatgggcatatatatgttcatgacccagaggattcttctaaatattcggctttgctctgtgatggtagcaccaatggtgttcgtctctatcatagtgtatggaaggtatatcgtggtgatgatacttttggcggaaataagtatctaaaggttctcagtacgaaagagcaatatactctcattacgtctaatggcgaaaagtatcatgtgaagaatgcatctgatgtagcatcgttttttcctgatcagaagaaacagatcaaacagatggcgaaacagaatcatctttctttctcaaatagtaatcgtgaaaggagtcttatgaaagttgttgagagtgtttctggcactccgataacagtttctcatttcacatctacagaagagaaagaaactaatactaaaactgttcctttcatagctccttcaacttcgactgatgacaatattcttattgcaggtattcctgttcttgacaatgattcgatatcaaagaatatagttgcaccaagaaaaaagacatatgttgtgcctggagtgaagaaggcaagggtaagtattgcagatgaccaggaacttgctgagattgtcgttgtgggtggtcgtcagtcggttgttagaagtacgataatgggttcagagaaattcaagcctcagttacttaagaacattccttctgcatttggtgagtcggacattatgaagattgtactcacgttaccgggtgtcactaatgttggtgaagcttcaagcggttacaacgtaagaggaggagctactgaccagaatcttattctcttcaatggaggtactgtatataatccttcgcatcttttcggattgttcgcttcattcaattcaaatgccgtggaagatgtggaattattcaagtcaagtattcccgctgagtatggaggaagaataagtagtgtgctaaaagtcacttctaaagaggctaacatgcagaagcttacaggaacggcaagtattggtgtgcttacaagtaaggctaatattgagattccaatcgttaaagaccatttatcacttcttgtaaatggccgtacaacctatagtgactggattctaaagcagttgccagaggacagcggatataagaacggaactgcgaacttcaatgatttcggtgctgtactgacatggaaactcaataatatgcacaggctcaagttgtatggctattggagtaatgacaagttctcattaacttctgcggatgactatgcctataataaccgtaatttctctatggagtggcgttctatccttaatgagaagctaacagccactatttctggaggacttgaccattatgactattataatgaagatagaaacgcggtttccatggcagcccgacttagtttcgcaataaaccaactgtggggtaaactgcacttacgacatcgtgtaaatgaaaagaataccttctcctatggtctgtccgttcagcactatgatgtgcagcctggtaagtatgttcctgtcggggattattcatatattatgcctgacgaattgcagaaggaaaaggcattggaaagtgctgcatacgttgactatgagttctcacttactgaaaaactttcctgtttgactggtttgcgttattctatgtttaatgcgcttggtcctcgtgatgtgaattattacaatgacgatgagcttccaacagagatatcattgctggaaactcgtcatgaaacaggtgccttcaagacctatcatgctccagagttccgtgtgtctgcaagatatgccatacaggacaaccttgccataaaggcaggtttcaacactatgcaccaatatattcataaggtgtcaaatacttctatcatgtcacctactgatatatggaaactttctgacatgaacatcaagcctcagaatggttggcagatagcagcaggtatatattatgagacacctgataaggagtatgagctttctgcagagccgtactataagcatatcggtgattatctcaactatcgtaattcagccgttctgctgatgaaccaccaccttgagactgatgtcatctcaacaaagggaaaagcctatggcttggagcttcaggtaaagaagcctttcggtaagttcaatggatgggttagttatacctattctcgttctttgctccgtcaggatgacgatagagtggaaagacctctgaacgatggtaactggtatccttctgaatatgataggcctcatgatctgaaggctgtgctcaactataagtttactgagagatacagtttttccagcaatttcaactatgcaacaggtcgtcctacgactgtaccggcaggtatgtactatgactcacattatcatagatatatgccttactatacagatcgtaacaaataccgtattccagattatatgcgtttggatcttgcatttaacattgagcctacccataagctgaccaacttttttcacgcatctttctctgtaggtgtgtataatgcacttgcacgaaagaatgcctataacatctattacgttagtgataaaaatggggttcagggatataagatctctgtgtttggcacagccattccgtatgtctcatttaatataaagttcaactaacagttgacaattaacaattaataattaataattaacaattagcagttaacatgccttttgcaaaaaaacaatataaaatatttccagcttggaggaaggtgaacttcttgctttgcatgatagcttgcctatttactctttccgggtgtatagaggaatatgaagctgacattcctgatgaggataccagtctgcttgtagttgaaggaacgatatactcatctacggttaatacttttatcctgtcacgtaccatgcccctcaagactaaaggaacagagcaacctgtaaccaaggctaagttgtctgtgcgaggaagtgatggctctgtatattatgctgatggatataagggacaatatttttgcgaggttggtaaactcaatcccgacgaggaatactggctgcatatcgaggttgatgatgaagtctatgagactgagccacagcatcctctgttcacggaaggaatagcagagctaagtggagtacagcacacacccgaaagtgacatagagattctcgtcaccaccgataaacctgctaactccaaccagacaaactactattcatggacatatttcgagacatgggaggtacatcctgcacacaccacatatctctttttcgatataccatcgaagtcgcctatttatatgcctaaccagtttcctgagcgtggttggaaggatgctgccgatccatcgattatagtcggggcaagtaccaactacaaggatcagcacataaagaagtacaaggtttacggcatcaagagagacgatgaacgtatctactatagatacaccactctgctaactcaacgtgccataacaaaggctgagtacgaatatcagcttgcccgacgtcaggctgactcggagatgggtggtttgttcactcctctgccttctgccctgccaaccaatatccattgtcttacttctgacaagcgtgtgattggatacgttggatgcgcaatgaatacgagtgaatgtcgtatcttccttgatcatgctgactattccatagatcgtaaaaaggtggatgcccttcaatggtatagggattgtagcagagatgactgcgttcttaatgcttcatcggggttatatctatgtatctgggaagatcattctccagcgcctgaaggattggttacagcatggacataccgcgaatatctcgatgtgacatgtcagggagcatatattgaaatgccaccatactgggaagaataagaaacagaactaagccacagcccctcaccagtcctacggacaccctctccccagagggcgagggaaaagttaccctttttcgcttgtgaggaatccctataaggtttcattactaatttccccctcgccccttggggagaggatgcccgtagggcaggtgaggggctgatttttttttcattatgaacagaatattaacatttatagtggcaatgatgactgccttgagcagctttgccgcgagtatagagacagatcgccgttggtatctgtcaggagaggctatgaatgtaagcgtatctacggataatgccttgatagcctatgctgaactatgcgatacgcacggtttagcagcaagtacgattatgtggcttcgtgatggcaagggaactggtacaattgaattgcctaaagaccttcatagcggatattatgtcctgtctgtctatacccgagacaacgccaatgtgtcacgccgtctcgttgccgttgtcaatccccttcagaagagtgaggatgatgatatagaatgggtacagatagcggatgccgactcattgagctacccagccacaagggaaggggagagcctttcaaccgctaatcttgcagataagaaagaagaggatatccgtgagatagaagggcatatcgttaaggcacgtatcaagaatgtgtataatggcactacatttatagcaaaacagatagtaccttcccttagcatcgtaggtaagcaggtgcattatttcgagggcaagatgataaatgattcaacggctgtattcttcgttcatggcattcatggaaaacagcctatgatactgtctgctgcttctcatacaggtgtcagtctgcctatcgagatgataagtccgttcttggcattgacacctaagaaactccctccactcgtttttcattataagcgtagtgaggtggaacagcgttcaaaggatatgcagttgcatcagtatgccatcacacctgccaagcgtgaattattgataggtgagaaagatgatcctgatatggaggacggtgtaccaatggattatgatccaactatctatggccagaaaccgagactcacatacgatctgaacgaataccgtcagttctatactattcaggaggtgttgttggaatatgtgagacacgtcaggcataataagataaatggagtggatcagttggtcatgcaaggagagacggtaggatatgagtcgtggccagctatggtgtttatcgatggtatgccggttattgatattgtcagactcctaaactatgatgcccgtcgtattcgttatatcaatatctacgagcatcattacaccttcggaaatggcatatataagggtatcctttcattcgtgtcacgttcaggtcgtttgacaaactatcccgtcgaacctaacacgcagtatatagtatatgaatttccgtgatgttattataaatagtgagtaatattatatatatcccttgtcagcctcatgagttgacaagggagttttttatttctcgcccttctctaatgaccataatatttggacgaaatataaattctgtgtgctttttttgtttatttgaaataaaatttatatttttgcaacgaaatattaatgccaaagcaaaaaagaaagaggagccagaaggctccccattcgaaagttcacttcggaataatccttattgtgaattgcttacgtgtgcaaagatatacttttttctgaaaacctccaaactaaaacctgaaaaagttatatgtcacaagagaaaaaacacatattagggcttgatcttggtacaaacagtataggttgggcacttgtagagattgacaatatcaactttattgttcgtataaaatgtattggctctcgcatcattccaatgtcacctgcggagattagtaagtttgaggaaggcaaacacttgacaagtgcggcggcaacacgtcgtgaggcacgtcgtcctcgcaggatgaacgagcgtttcattttgcgtcgtgatcgtctgaactatgtccttaatgtctattctatgttgccacagcattacaggttggaacttgacatagacacaccgcaaggactacgttgtgggcatttcaagaaaggcaaagaacctaagattgcatataaactgagtgaaaagcgcgaagggaaacgtgataagtatgcatttatctttgatgatgcctataatgaaatgcgtgaagacttgaagcgttcacatggtatcttgccaactgacaagataccgaaggactggactctctactacctacgtaggaaagcactcacagaaccaatatcaatggaacaactttcatggattctccactcatttaacaaaaagcgtggatatatgaaagttgaaggtgcagacgtggaaaaaaacgatgtagagaagcgtgtctgcaaggttacatctatcacaaaggaaaatgattgcctctttgcaattcatcttgaagatgccagcaattcatcatggacttttgactataaagaggattcgtcaatgcagataacaaacattgaagatctcaagcaacttgagattaaaaatgtctatgatgaggaaggaaatcttaacaaagaaaaaagcgaaatagctatcaaggaaatacgccagttaaatgtgctggctgtaaaacatgagggaaagaaatctttctttactattgacaatggatggaaactggagaaatccgacaagcaatcagccactatgcaggaaggcaaaacatattcatttatatgttcctgtatttattccattgatggaaaattgaagaagcgtgaccttctacttgcccttgaaaaggacaaggaaaacaatagaccatacatcaaacttgacacagagatgaaaattgcaaaatacaatgtgtctaacggaacaaaaggtgttggagcttatatatacgctaatttattaggtaatggaaaagacagacttcacacgaagattatcggtgggctagtagaatctattgagagagaatattaccatgatgagataatcgccatattgaaaaagcagatagaactgcatgataatcttaatgacaagtcactttatgcacaagccgttaatgctctctatccacataacgagagccatcgtcggcaattaatgcagcaaggacttgaacagcttattgctgatgatatactgcattatcagcgtgaactgaaatcaaagaaatcagaaatagatgactgccgttttgagtcatatcgctataccactcagaacggtagagaggttgtgcgtcctgtaaaggctgcacatactgctaacccatattttcaggaatttagaatctggaaattcatcaatcagttgcgtattttagaagaggctaatgaagaacacgcttcgcaaattgatgtgacggaggagtatcttgattttgatgtacgtgcttccttgtttgaatatatgcagactcataaaggcataacaaatagtgttcttcgccaatcattcatgcaccttccaaataaggggaaggggtatgtgtggaactatgagtctgaccatgaagagaagggtaatgaaacacgttatgacctaatggtgcgacttaaacgagtaaaggcacttgattggcaggcttttcttgcagccacgcatattgacaatggaaaattagtgaccaatgagtatatgctctggcatttcttctattccgtgaaacaacgtaaacaacgtgacaaaggtttatgtacactaatagagcgacttctagcctatgcagatatgaatgtttctctggcaaatgagattgtaaagcaactcacgacattaccagcatataaaagcagttattgtgcctattcagaaaaggcgttgttgaaactgcttccgctgatgcgttgtggtaaatactggaatgaagaggaggtttccaaattgacaggagtacttaatgacatggaatgtcaggggcttatggaacatgatgcagtgaaaatcgtttataacgatttgcttatggctgtaaacaaggagcgttggctgacaccgcatgatatacgccaatatctcaagaaaggctttaggcataatgccttgaagaatcctgtcgttgagaaggtcgtgcgtgaaatgcttatgactgttcatgatatatgggaatgtcagttgcgtaatgatgagaatttccattttgacgagatacatgtagaactcggcagagagttgcagaaatcaccaaagcagaagcaaagtgacattaaccacatgaaagataaccgtgcagccaataagcgtgcaaggatgatactttcagaaatgggacttgaggccaactcacctttcatgcgtgaaaaataccgcatatacgaggaatgtgttcttgataagattcgttttgacaataaagaaacagaatacaatttcgaggatgtgcatggtaatatgcagactatcacgaaagcggaaatcatggctattcagacatctgaggatgttgatgcagaagatatccgtctctatcgcctgtggcttgataaacgcttctcctcaccttatacaggtaaggaaatctgttttagtgacatctttaatgggcaataccagcgtgaccatattttgcctcgtgaacgtgtaacgctcaattcatttcagaatcttgtgatgtgcgaagcaaaaatcaataaggctaagagtgcaatgactggaatggagtttatcaagaagtatggcggtcgaaagattgcaggttttagaatacagacagaaacagaatatcgcaaatgggttcatgacaacgtgaatgatccacaacgcagggaaatatacctctcggagaaagtgccagagcgtttcacgaacaaccaacttaacaacacacgctttataagccgacttgcaatgtctcttcttagccatattgtacgcgataaagatgaacaaggggcaatttccaaaaacatgctatcagtaaatggtagcgtgactgcgacattacgccgagactggcatctgagtgaagtatggaatgaattgattacacctcgttttcgccgtatgaacaaggttgtagaaacagagacaggtctgccttctactttgtttggtatggaacgtgagataaaaggacgcaaggtgtttgtgcctgatgttccagagaaatatcgtgatacatttgaaaagaaacgcatagatcatcgtcatcatgctcttgatgctttggtcgttgcacttacagaacgtgcacatatacaatatctcaacaatgttgcagcagagaaggacacccgtgatgctgtcagtgttcgtaaggctctgaaggcaaagtacacgaaatctatcaaaaaagaagatggcacaaaggatgttttcttccttcctcctatgcaatataatgagggtggaaagacgcataaataccgttatgcctatcagaatgaagtaaggaatggttttgaaactatcacgttaaaggcattacaggatatgctcgtgtcattcaagagtgatacaaaattcacctccccacgtaagaatctttatctgcattggaatgaggaacagcaacgcatcgtgccaacttccgagcgtggacttgaaagcgagcaaaagtatggaatacgccagaagatgactacaaaagatacattctatggtaggcgtataataaatggtgatacctatatcagcactcgctggtcgcatactcttgatatgtttgccaaacctttgccagataaattgaaaaccgtcgaggataagctaaaggaacttgatgcgagattcagtactatagctgacaaggcaatagctcagattctgaaaaactatgctcagtattgtgactttgaccttgaacgtgcattctccccagatggcatagcgtatatgaacgcaaatataagtcagtttactcctaacaagaaagcccatgctcctatctataaggtcgcattgctaaagcggtcagtaaaggcgtatgctctttcttcaagtggagtgaagtcgcgtcagttctatgaggagaattccaatattcgtttctttatgtatcctgacaagagcagtaaagtgcaaactatggatatgtatctgcgaggagttgagatgaaatctggctattcattttctttggtcaagaatgatttggtatatctgcctaccgcaaggcaacagaaaatggtcgatgcatacaaaggtgaagaaccgatgtcgttaaagactcttgcatcggatgctttttctcctgatagattctatcgtgtaaaatcctttgatcctggggcaaataaggcgacattgtactgtatgcctgcaacaatggcacagatgatattggagaataaaaactgtttagatccgaaagatatgttattgcatataaatgtttttaatcattttgaacttaagaaaacaaatgtttcggaatgggatgaacgattcaagggaaaaataaagagtgagatatcatggagtaatgataaggaaaaaagtactaagccgttgttcagcaatgacatattcatatgcgatatatgttggaaagtaaagttatctcgtcttggagagattgaagaaatgataacccagcaaggtgtcgtaatcaaataaagaaaaaagtcccggtcattagtgatcgggacttttgctatcagcttttatgtttttgtttgtatcgtagcattaagatattcaagcttttacgtcgtatatgttgtgtctgatagtatcttgtactacttttgtaagcaattcacaactgcgtgcctttaagatgtgctcacgcaaatgttgtgtctgatagtatcttgtactacttttgtaagcaattcacaacttatatacgaaggcgacataatcacctgaagttgtgtctgatagtatcttgtactacttttgtaagcaattcacaactcagacatccacagaggtatgcgttcagatgtcgtgtctgatagtatcttgtactacttttgcaagcaattataaaaatatcacaattatcgaagcctttgctttgttgtgtgatgttcttatttgtttacgttgcaaaaataacaatattcttttattccacaaaaaaatctttgttaaatttaaggaaatatacatagttgtaggtcttttctgaaaaaacattacttagaagatatccatacgtttaaatctctgaaaaaagttcacttgctgtcagtttatgccataacagtaagtccgttgtaataccgttataaagttataagtccgttctatgtatcggctatagagcgaaggcagaacgaaggcacagcgaagggagagcgaaggcagaatgaggaggctttgccgaagagaaaatacaactgggaatgataggagagacattgtttgctatttttttttctgaacttcatgattttctttgttaaattttcgcaaacagatagcgttatgggtgttttctgaaaaaatattaatacctttgcagattattagtttaatgtgaattcgacgaattcaaaatgccctataaatgcatcttcgatgcttggcttgggaacaaaaattagcgacgatgaccagaaaatttaattcagaaaattaaatttgggaaattttcaggacacttgctttagcttgatgagccatagcgaataattcgtggcaattttcagtaaaataaaaagcagcttgctgctaaatccactgcgtggggctacacgaattcccgtgaattaaccgtgaattttcatgaatttttttagcaaagatatcgaacaaagaaaaatttacgataattcgcgcttaattcatggataatttacgtagccaagcgcagcgtttaataaggcaatttgtcgaactcacgtttgttttatgtttatagtttagagcagaaggtgtttccattttggcaacacctgtttagagattagataaatgttaggaacaatagttaatactgctacgatactgataggcggtgtgttcggttcttttctgcgcacaggaataaaggagaaatataaaaaggcgttgtttgatgccttgggactttgttgtcttgtcctcggtatcaatgcttctttgcccaatatggcaaagagcgaatatcctgtcttgtttattgcttccttggctgttggtagtatcataggcacacgacttgatctgcaaggacggattgaccgtgctaatgctcgtcttaacgaaagaaatggcaatgagaataatggtttacagggattgatgacgggcattctgctctattgcattggtacattctctatcgtaggacctgttttgtcggctctttcgccatcacaagggtgggagataggcgagtctgccaatactttcctctataccaacgctacgctcgatcttgtcacctctaccgtgttggctgcttctttcggtaggataatgctatgggcggctcctgtgttgttttgctggcaaggtatcttctatgctatcggatatttctgtggtgatggtatgccagagccgatgagggtagagctgagtatagtgggtggggtgctgattgttagttccggacttggaatactcggtatcaaggattgtaagacggtgaatctgctgccctccttgcttgtgcctgtggggttctatttggttaagatgattatagaataagaagcagtagcccctcacccgtcctacggacaccctctcccctgagggcgaggggaaagttacatttattgtttgtgaaaacaaccttgcgcgaacatttgtaacatcttcctcgccccttggggagaggatgcccgtagggcaggtgaggggctattttctatcttaacctttccatcttttcaaagcatggttgatcgctgaaaagctttgaatagttatatcgttttttgtcttcctgatacgccgcctttgctttctcaaggtcaaatttaacgaaatcctcatagtcaaatttccagctattaccataggcaatatccatgctgcgtttgtaaatcatcacacggcttattacattgaaatagttgttggtacatctcatgatgctattctccgtaggacgatatatacccgtggcataataggcaccaccttcatagcagccaagattttcaaaatcatatcggctgtcagctgcaaagtccgcccagtctgtcttcgtaacatcactttcaatagatacatttttgtcgtgaccacttttatgagtcaatgtcaaataccccttgtaattctcaggaatctcttccgtatttatcccgacatattcatcagcaagtttggcgaaagcatgtccgaactcatgtaagagcgtatttgcaaatattgtctgcgaaatgtcatcgtaatcatatgttaatatattcttaaatggagagtcatcattaaactttataatatcctggagcggaacgtatgctatgccacaaccagtagggatgtctctatcttcattataatatgttaaacttatagtgagtcctcccgtatcagaattgttaacgagcatgatgatggtcacatcatcaagattaatcccggctatggctttctttgcgtattcacttatcttagacactttgcctgtagaaatttgggctacagttgcccctgaatcttcattgagttccatggtgctaaaggctgtttggtaattagtagagtcttctaccatataaattatgtttgtgctgctgtatgacacagccgtaacctcatacacatcaaagtaatctctcagcgatttcaggggatgtatggagaatagcgcttcaattgtagaagtggtagcatctcgaaaaataccattttttatatctctatcttggaatccatcacccagaatgacgataggaacgcctttacccagctagtgtttctgaagttgcgtaaccttaccatcatcagttgtcaagtctttagaatgatataggtaataaggagtattatcatcattattaacaacgatgtcatcatcatctttgctgcatccagcaagcgcaaggatcagaacaggcaaaaaaagaaatttgtaccagattttcatattaaataaagttgagttattaagtattaaagataacgattgcaaagatattgcaagagaatgagaaatcaccaatcattttatgtcttttaactttgtttaaccgtcagcgcctctaaaaatacatcttaccgatttaatccacgtttaatcaccaatagtagaaaaaaaatctaagccacagcgtacacatagcggagtctcgtccaatcctgatgcaaaggtagtaaaaaatatccagacgggcaatatgtgtcccgagatttgtggtgagcttgtcccgaatgttgaataacgcactctcccgaaggcctttagggagtaagcagaatcagcatgaagaaggggtaatactttttttcagaggtaacaaggtaacaaagtaacattcatggcaaatgttaccttgttaccttgttacctgcataaattatatatttctcctattcccatctgctttcctttctaaaggcctatactataatattactgtccgctaaaaatattgtcaagaattagagattttgagaatttcttttttttgaattaatgagaattagagaaatgtcacttacgctccagacaatcacgctttttctaatgctacgtaagtagcaaatatctctttttctcattaattctcaatactgcgccagccttctctcattctcaaattcttgataaaaacagggtttgtccagcataaatcttttgatattatgcaagatatagttgtttagcggacagtaataatactataataacgtgagttcgacgaatttaccaaacacaaaagaaaagattttttcctggattttttcaaaagattatctcctgatttctgaaggagcttgcgactgaaatctctttgaaaatttcctcctgatattttattgttgataaaatccaatctgaaaatcatgaaaaaatctattctaaaatattgtgaggaataaaaaaaatcatttcgctccttcctcgctcagaaatcctgagaaaatctgaaataaaaatcttggtgaaaatcagaataatacaatttcatcgaactcacgttataatattatttcttaggaaggataaatatatataaatatcgcgcgcacacgatatactgaaatggtggtaacgggtaacaaggtaacatctgtgtctaaatagtgactgattttcagaggtaacaaggtaacaaagtaacattcgtggcaaatgttaacttgttaccttgttaccaccttttttttcacatcacatttttatgcggtatatggcttcgtctgtcattcgctttacccccgttatgggttcgctataggaacgtaccttcaccgtataacctcccatagaaaatgggagttacaagggacttacataggagctacatgggacttgccattctctcgctctggctcaacatgcagagccaaccgacaaattcacgatagtcttttactcaagatttacatcgaatttctttgcactattggaaatttttatttacctttgcaacataaaaaatataggacataaaaatgagtcgaagagtagtctatattttgttagctctatacttatccctacaggtttatgctaatggcgaccctgtagtgacctattctgcattagtacttacatgtactcctgaacctcgaaggattcctgagattcaacttgtctctgagaatctgacaatagatgcaggatgcccgatgtcgcatatcagagtaaaatatgtgctcaaaaacaattctgataaatattttgaacgtattgactatggatttcctattggttggtttggcggaagtgacagcgcgagaatagaaggcgcgacctttcatactcttgaggaagaaaaatgagttctaagctgcttgtaaatagattgatatacaaaaaaatgataactatagcattttttctgctcttttctgctgttgccgttagtggacaggagtatggatatcatgaagtgctatgggtgggaacatctattcctgccggttgtccgtatccgaataatgcttgtcgggcattagggtgggattgctataatgtggcaataggagcaagtgggatagtagtgaacgaaggcttcctgaaaaatgacagagatggcaaggatctggctgaaacgataaaggagaaggaagagagatatagtccgtatatgaatagggggattatgtcgaaggtgttttttagctgttttaggaattatagttatgagtcgtgcgttattccttatcttgacggaacaaaggctgcttgtgatataattgtttttgatcatggctttaatgaccgcgatgtgatttacaacgtagatcaatatgcaatagacgagtataagtttgatactctggctaatgcagaatcgtatgacaggtcaacgtatctgggggcattcagttttctgctgaagaaaatatatgatgtaaatccaaaggtgaagattgtgatatgctcatatctggagaatattagtgaagagtcaccaaacaggtattatgggaaaaacatctgttcttttctggaaaaattagcggagaaactgaaatttccttacttgaatatgtgtgactataataatttcacatacgaatatatgccgaatacatctacatatatcagggattataactggaaatatggtgaatgttatgaaacttttgattggggaggtgataacccggaggggaatgttacggtattccagtattattgtccggatggagttcatcctcatacggataaatcacgaagggcagaaaagatattgactgaaaatataacgatgctgttaaagacaaaggtggcaccatattgtacagaggtacattatcggaaacagccagcagtagtgttcggtgtttcgggcaaaagctatatgaaggaatcacttcctaattcgggagtgtatattatggatggaaagaaatttttgataaagcaatagaatatgcatttcagacagatagtaaatagactgacggcaatatacgatgaaagagaggccagtagcatagtgaagatgctattggaggaatctttcgggctttcattcgtggatgtttgtctcggggctttggataaattatcggaagatgataaggagagccttgaggggatgatgctgcgattggaaaagggcgagcctgtgcaatatgttattggtcgtgctgatttctatggaagaccgtttgccgttgaacctggtgtgcttatccctcgtcctgagacagaggaacttgtttcttggataaaagacgagagcaaggatattcgcggaaacaggaacggaaagaaatacctgcttgatgtgggatgcggttcgggttgcataagcgttactttggcattagagatacctgaggcagaggtttctgcttgggatgtttcagatacggctctgcgagttacgaagaagaatgcaaaggcacttggggcaagcgtggatatttatatgcaagatgccttgaatgctccaagcggagatagggaactatggaatgtgattgtcagtaaccctccttatatatgtgtaaaggaggctgaggatatggagaggaatgtgcttgagcatgaacctcacgaggcattgtttgtgcctgatgctgatccgcttcttttctatcgggcaatagcagaatacggaactcacgccctttgcagaggtggaagactatatttcgagataaacagagcatacggaaaagagaccgtgaagatgcttgaaatgcttggttatcacgatattgaattacgtaaggatgcctttgggaatgacagaatgataagggcgatttctaattaacaattaacgacagttcgacaaaaataaacgctgcgcttggctacattaattaaccgtaaattaaccgtgaattatcataaatttttgtcttaaaaaacgtgagttcgacgacttgcttcagcttgatgggcttcagcgaagaacttgcatagtttggtgagctttgcgaacaattcaagactgcgagggctgaacgcccgacacctaatagggcagtccgtaagggctgttattctatagatgcgtgattaaaggagcgctgtaagtgcgacacctgaagactttaggtgtcgg

SEQ ID NO: 467 - DNA, 24515 bp, synthetic construct
  source 1..24515: mol_type = other DNA
  misc_feature 1..24515: note = Synthetic
ccttctccagttgtttctacaacgaggacgccaaccttgagccgctgcgaccctatgtggagcagattgtcagcaaagtactgaaagaaggtctgcctaaaggcatttgtctcaatgtcaacttccccgctacagaaagctttcaaggtgtgaaggtctgccggatgacacgaggcagctggatcagcgagatcgtcaaagagcaccatccgagaggctatgactatttctgggtagttgggaaatatcgcaacgatgagccacaagctgaagacagcgaccaatgggctctcaaccacggctatgtagctatcacgccgaccaccatcgatgtcaccgcctataactttatggacaccgttcgcggctgggacatcaagtaaaaagcagacgcgattcaagaagttaaaagattatgaacctggacagacaaaaatacatgaaatactatctcatagcaggcgaggcttccggcgacctgcatgccagccggctgatgcacagccttaaaaagcaagatgctgaggcctccttccgttttatcggtggagacatgatggcggccgaaggcggtaagcctttccggcactacaaagacttggcctacatgggcttcatccccgtactgctccatgcccgtaccatactgcgcaacatggcgcaatgcaaggaagacatcatgagatgggcacccgacgtggtaatcctcgtcgactatccgggattcaacctgagtatcgccaagttcgtacatgccaaggtgggcacgccagtcttctactatatctcaccgaagatatgggcatggaaggaatggcgcatcaaagcgatccgccgtgatgtcaatgagctcttttctatacttccctttgaggtagactttttcgagcacaagcaccactaccctatccactacgtcggcaaccctaccgcggaagaggtgaaaacgtttcgtgacaactaccatgagtctaaagaagccttctgtcagcgccatggattggatcccaagcgtccaatccttgctttgctcgccggcagccgcaaacaagagatcaaagacaacctgcccacaatgatcacagccgccctgccctattgtcaaggcgagaatggctaccaaatggtattggcaggagcaccgtccatcgacgatgactattatacccgcattctcaaagatcagcccgtcgccaaggtgagcgaggaaacttaccagttgctctcccatgctacagctgcactggtcaccagtggcacggcaacccttgagacggccttgctcggtgtcccgcaagtggtttgctacaagacgcccttaggtacattgatccgttgggctttcaaccacatcatccactgccgctttatcagtctcgtcaatcttatcgccgacaaagaaatcgtcaaagagctctttgccgaccgcttcagcgtgaagaatatccgccacgaactaaaccgcatactgcccggacagccagacagagccgccatgcttaaaggctatcagctcgtagctgagcgattgggcaagcaaagcgcgcccgacactgccgccaaggagatgatagagattttcaaacagagagaccgataacaagcataaccactcttactcttttacgagacaaggactcacgccagtgcgaaaagactgctttggaaacctcacaccagggtatcaagactgctcttgagtcgctgcaattcatcacgcacagtgatgagcgttgccaacaactcttgcgagcggtcggcaccgtctttgttctcacgaagatatttccgcgcattggcaatcttgaagccacgcactttgatgaggttatagatgacctttacttctttaatatcatcctcgctgtactgtcgcaccttggttccaggcaccgtcttaggatgaagattgggaaactccttttcccaatagcgtagcgtactttccgctacgccgaccatctccgccacctccttgatcgagtaataaagccgcttgggcttgtctgttttcagcaccatagcctgatatttttactattttggggcaaagataacaaaaaagaatcatttctgcaatctttttagtacctttgcacctgtatgtcaaaagaataaaggaaacaaataaaacatatatcatcatgatgacagcaaatgaaatccgcgactcatttaaaaagttctttgagtcgaaaggacacgtcatcgttccgtctgccccaatggttattaaggacgacccgacgttgatgtttacgaatgcaggtatgaaccagtggaaagacatcatccttggcaccaaggatcctaatccacgccgtcgctgcgactcgcagaagtgtctgcgcgtcagcggtaagcacaacgacctcgaagaggtgggacatgatacttaccaccacacgatgttcgagatgctcggcaactggagtttcggcgactacttcaaagagggagccatcgactatgcatgggaatatcttgtcgacgtgctgcacctcaaccccgctgacctttatgtcaccgtcttcgagggcgacccttcggaaggtctggagcgcgacgacgaggctgccaagtattggagcaagcacgtgcctgccgaccacatcatcaacggcaacaagcacgacaacttctgggagatgggtgagaccggtccttgcggcccctgctctgagattcatgtagactcacgccctgagagcgagaaagcaaaggtgcccggacgcgaactcgtcaacaaagacgacccgcaggtcatcgagatctggaatatcgtcttcatgcagttcaaccgcaaggccgacggcagtctggaaccactgcctatgcacgtcatcgataccggtatgggctttgagcgcctcgtgcgtatgctgcaagacaagaactccaactacgacacggatatcttccagcccatcatcaaggagattgagaacctctcaggaaagaaatatggcttcaccacaccgactggagagaatggtgagggtgccaacgagcaggaaaagatcgacatcgccatgcgtgtggttgccgaccacctgcgtgccgtggccttctccatcgccgacggccagttgcccagcaacgccaaggctggatatgtcatccgccgtatcctgcgccgtgccgtccgctacgcatataccttcctcgaccagaagagtgcttttctctataagctcatacccgtactcgtacaggagatgggcgaggcttatcccgagctgcccgcccagcaggaactcatcagccgcgtgatgaaagaagaggaagacagcttcctgcgtaccctcgacaagggtatccagctgctcagcggcgacatggacgagctgcgtgctcacggaaagaccgaactcgacggtgagagtgccttccgtctcttcgacacctatggcttcccactcgacctcacggaactcatctgccgcgagaacggctacactgtcgacgagaaaggcttcgacgtggagatggagaagcagaaggctcgcgcccgcaacgctgccgtcgtggagaacggtgactgggtggagctgcgccaaggcgagcaggaatttgtcggctacgactactctgaatatgagtgccacatcctccgctaccgcaaggttactcagaaaaagaatactttctacgaggtcgttctcgaccacacgccgttctacggcgagatgggcggtcaggtcggcgaccagggtgtgctcgtctccagcgatgagaccgtcaacgttatcgacaccaaacgcgagaacaaccagagcattcatatcgtgaagcagatgccaaagaatccagaggcagacttcatggcatgcgtagatatcgacaagcgcaacggctctgctgccaaccactctgccactcacctgctcgactatgcactgaagcaggtactcggcgaccatgtggagcaaaagggatcttatgtcgacgccgacacactgcgtttcgacttctcccacttccagaaggtctctcccgaggagctgcgcaaggtagagcgtatcgtcaacgacatgatccgtcaggacattccattggaggagcaccgcaacatgccgttggccgaggctaaggaactgggtgctgtagccctcttcggtgagaagtacggcgacaaagtgcgtgtggtacgcttcgggccgagttgcgagttctgcggtggcatccacgtaaagagcaccggccacatcggtttcttcaagatcatctctgagagcagcgtggctgccggcgttcgccgcatcgaggctctcactggtaaggcttgcgaagaggctatctatgaggtagaagacatgatgaaagacatccaggctctgttcaacaatgccaaggacctcaaggccaccatcgagaagagcatctctgaaaacgcagcactgaagaagcaggtggaaggcttccgtcaacagaccgtagaccgcacggcaaagactctcgccgagcatgctcaggaggtgaacggggtgaaggttgtcaaggctgtattgcccgttgacccagcctctgccaaggacattgtcttcaaagtacgcgagcagattcccgagaatctcgtctgtgtgctgggatcgcaccacgacaaccgtccattgctctctgtgatgttctctgatgatatcgtcaaggatcatggtctcaacgccggcaagatcatccgcgaggctgccaagctcatccagggcggtggcggtggtcaaccccactatgctcaagctggtggcaagaacgccgacggcctctctgctgccgtagacaagatcatcgagctcatcgaactgtaagaaacataaggggtaagtcttatttataaagcacggccatcatccatgctctatatataaataaggtgtaacccacatcgcagatatccgctgccttccaaatttattttggtaggcagcgtttttttgtacccccataagtccatagccgtgatgcctgcgaaggtgtacattcgttctgaaataggggaagaaaagttatcagaaaaaagaagcggaatctaaaaaccttcactctcaactatttcttttatttttgcagcagcgataaaagagaatcatttaaccattttatactaaaccaactattacgtatgaacagtaaaccattactaaccatcgctgccttaggtctttgtgccaccacatgggcacaggctccggcatttcccggcgcagagggcaacggtcgctatgtcaccggcggacgtggaggcagggtcgtgcatgtgaccaatctcaacgattccggaacaggatcattgcgggcagccgtaaaaggtaccgacaagaaaatcgtcgtcttcgatgtgggcggtgtcatcccattggcatctgaactgaagattggtgccaacaccaccattctcggacagacagccccctaccccggcatcacgctccgatactataccgtcagacccggcgacaacaatgtcatccggttcatacgtgtcagacgcggacaggaaaaggaatgcgacgacggtgctgacgcctgctggggcaagaacctcaacgggctcatcctcgaccactgctcactgtcgtggagcatcgacgaggtgggatccttctacgacaacaacaacttcaccatgcagtggtgtactctcggagaaagcctcaacaatgccggacatgacaaaggggctcacggctatggcggcatctggggcggcaagctcgccagcttccaccacaacatgattgcccacgtggccaaccgcgcaccacgcttcaatggcgcacgctacaactggacgggatacaccgacaacagtctctactccacctacaaatggtccaatgccgtgcaagccgagaatgtcgacttccgcaactgcctcatcttcgactggggcacgggaggatgctatggcggccctgggggaggatacatcaatatggtgaacaactactataaggctacgcctgaggtgaaaaacaaaaaccgtatcaccactgtgtccatcgccaacagcacgacatctgccgacgagaagacctatctcgacatgaccagccgatactatatcagtggtaactatgtcgacgctaaggacagcaaaggcaaagtatatggagccgactacgactggaagggcgtgaagtatgacgagggcgtgcagatcatcaatggtgaggaatacaccaaagactcactctacgcctatggtaaggatgtggagcacgtcaacaatgccaaaggcatcccctgcgtgcgcatcaaactcgacaaggccgtggctcctaccggcgaagtgacaacccactccgccgagaatgcctacagcaagatcatggcctatggcggcgcctcgctcttccgcgacgatgtggacaaccgctatatgacagaggccaagaatggaacatctacctacacggggtctgtgacaggcatcaaagggctcattgacaaggtcagcgatgtagatggctataccgaggccaacttccccaccggcaagcgggctgctgacttcgacagcgacggcgacggcatgccggacgtctgggagaaggccaacggcctcaatcccaacgatgccagcgatgccaacacatacacactggacgcgaaaggttattataccaatcttgaagtctacgccaactcactcgtagaggatatcatgaaggctgaaaacaaggatgccatcaccaatgtcaacgaatattatcccacttgcacgaaggccgacggattagactattactctgggagaatcgtggagcgggtgacgccatcagataccaatacgtcttctgacgctaaaaccgagaaggccctctactctacgactttcaccgattggacagatgccaaggccagcacgacagaaacgacggtgacgcaatcaacgaagtatagccatgagacgctcaccttttccatcttcgacacacagatctgttccaccaaccaaaacacaaaaaagttccccaactggaccggcggctatctgatgtgtagcaaaagcactgatccttacgtcatcacctctccactggccagcatcacccgtgtgcacttccgccatggagccacgggcagcaatcgtggttggaaattggaggctaaaggcgacggcgacacagactggacagtgctgagcaatgccgtagcagctacggcacaaggcacagacgtcgaagtggatgtcaaccgctccaactgccaactgcgcttcaccaacctcaacgcctcacagaatgcctatctcttccaactcgacatctacggcaatgtgagcacaggcaaccagccttctctcgcctccttttccgcctacggcaaggagtacaccgcagaggatttcttcacagagaatgccaatggctactatgagggcactgtagaggtaagcaagaaatctgatatggtcagtgccaccaatgccatcaccactactgtgggtaatggtaccattggcaccattacttataaagaggtatccagcgatgtcaacggcagcaagccagcctgcgatgtcaccatccccgtagcactcgccacgaccggaactaccaagacctatatcgttcacttcgtatggaaacctgactatactgtcctctaccacgacaccgatgacaaggtgatcgccaagcaggctgtcgagaaaggcgacccaatcaacaaactcaacgacggcgcgaccgtcaccgtaccctctggcagcaagtttcgtggatggctcttcaaagccgatggtgaggaaaaggcaaatgccgccactactgtaaacgagaagcaactcaacctctacgccttggtcactgacatcgaaaacgatgagcccaacgagcgtcatgcctacaacctgaaagacaaatacttctatgccgaggatcacgagggctttctgcctctgtcagcctacagctacaatggcgctcagcatggtctttatttcaagccgggctccatcacgctgcccgttacgggcaatgccatcgtcatcgtggaagcctgcaaatatagcaagacggccttgacactctccgactcccaaggcaacattctcggaaccatcgccatccccactaccgacggcacacgcacagccatccgatatactggtaaggctgatgatctgtcgttgtctttccccgacggcgaggtttatctccatgctctcaccgtcatcaacatgggcagcggcgatattgccaagaacaatgaaggttactatgtggcagatgcaggcagtgccagcagtctgctcaacatcttcgacgtgatcactgcatacggcgacgcctcctcacgcacaaaagtattcctgcccaacggtgtctacaacttaggcaaggccaccgagcaagagttgcccatcgacaaactctcactcatcggacagagcactgacagcacgatcatcgtcaccgctccggatgcttccgtcgaagggctcggcaaagctgacctgttcctcaacaccaaaaaggatctctacctgcaggatctcacactgaaaaacgcgctcgactactatggtgccggtgctgccggacgtgccgccgtatggcaggaccgcggcgaccgcaccatcttccgcaacgtcaagatgctctcctatcaggatacctactacagtcagaacaacgccatgcagagctacttcgaggattgcgacatccacggcactgtagacttcatctgcggtggcggtgacgtacgcttccagcacaccacgctttcactcgaaccgcgtaatgccaaaggtgaaggcggacgcaccatcacggctccgacaaccactaccaactatggctatgtcttcgacgactgctccatcgtggatttggccaagggcaagggtgactggaactatggccgcacatggcaaggcaaacccatttgcgtgttcctcaacaccacccttgacgacaatgccgctgccaccatcgtctcttcacggtggacacagaaaggtatgaacaacaccgacccgaaggtctttggcgaatacggcacaaagaatgctgccgggcaggacatcactcccgccagcaacgtcatcgcatcttatggtggcaacatagagaccatcctctctgccacgcaagccgctgcctatgactacgacaagatgttcaccaactgggaccccaaggctctcgccacacagttgaccgttacaggtgtcaacctctccgctggcattctctcatgggacgcaagccaaggtgccaccgcctacgctgtttttgccgacggcaagttgctggacttcactactgccaccagtctctctgtcgatggcaaagccaagacctactctgtccgagctgccaatgctatgggaggcttaggccctgaagcaacagtaaacatcaccaatggtatcgcaggcaacttcgtcgaaaagccttccaaaacatattactatgctctccaaggcactcgcctgtcatcacctcgtcagggtctcaacatccgcgtccgcaactaccaaggagcaggatacaaggtagagaagatcatcgtgaaaaggtgaaaaagcaaaagggtaaaaaacaatagataagcaaaagatataagacgagaatcctatattaagtcgaatcatgatttggatatatataggttggtcaggataataaggaataaggctgattacatgccttccttcaagaataggcgagtcttctcagacttgcctattctttattagtccgtctacaatgataataatcccttccaactaaatatttatatgcctgtccgctaatatcccaaagagagacggtagagagaaaacagaaggtctgagaaaacggcaaaatggaagaaagtaaaaaaatgggcgactttcgccgccctcaaatgttttcacaacggaatcatccttattgtgattagcaaaaaattatgtggcaaagataataaaaaaaaagattcaatacaagtcctttaatatattttttgtatttttgcctgtgaaacgtaatcatattctaacatgaacaagaaaattattggacttgaccttggaacaaatagcatcggttgggctttgatcgaaaggaatacagagcaaagcgaaggtaaaatcgttgatgctggtagtcgcatcatacctatgccacaagatgccatcagcaagtatgaaaccggcaacttacagtcggcagcttctgtgcgcaccgattatcgtggtatgcgccgcctttatgagcgagccgaattgcgccgatcacgcttgttacgcgtattgaacatcttaggctttcttccagaacattatagagaagccattgactttaccaaccacttaggtcaatttaaagaccacggagaaccattgctaccctacaagagaaacgaggaaggaaaaaatgaatttatcttcaaagacgcatttcatgagatgctggaagatatgcgcacccatcacccagaacttgttgccaacggcaaaaagataccttacgactggactatctattatctgcgcaaaaaagcactatcgcaatccatcagcaaagaagaattggcttggatcattctcaatttcaatacaaaacgcggttattatcaactacgtgggaaagaagaagagaccgctaccaacgacaatcaagtttacgacgtgttggaagtgtctaacgtagaagaaacagggccaaataataagaagaaaggctataactggtatttgatacattttactaatggaaaagtacaaaaccgtacttggaaagaagcaccctgccacatcggtgataaggtagagtgtatcatcacctatcaggtaaagaaagacggttcacccaaacttgacgagaatggtgagcaactctacaaaattacagctcccgcccccaatgactggacactgaggaagaagcgcacagagtccatcatcaacaatgaacatgtcacagtaggagcatacatctatgatcatttgatggaacatcccgaagacaagatacggggaaagtatgtgcataccattgaacgcaaatattataaagaggagctgcggatcattcttgacaaacagaaagagtatatacccgagttgcgtgacagacatctgctatcacaatgcatttctgagctctaccatcataacgaagcacaccgcaaggccttgaatgaccaggacttcacacacctcttcgtcgatgatattattttctatcagcgccctctgaagagcaagaagagtctcattgccgactgtcctttagagttctacccttatagagacaaagatggagtttggaagcatcgccctatcaaatgtacaccacgctccaatcctctctttcaagaatttcgactctggcagtttatacaaaatctgagaatctttcttcgtgagcaaaaggaggaggatgggaagttgaagttagatgttgatgtcaccaaccagttcctttcaacccccgaggactattgcgacctcttcgactggatgaaacagaagagcgacatcacacagaaacagttactggcatatccagccttccatcttgggaagaagacaaaggactatcgatggaattatgtcgatgacgacaagcacacctatcccctttgctgtactcatcacgatatttgtcaggcactgaagaatgttgatggagcgccatcgctctcaactggacaagaggagaacctctggcacattctctactctgtcgacgaccgatatgaattggaaaaagctctttgtcactttgcagaaaagtacggtctggatagcgaaagctttgtcaacgccttcatgacgttcaaaccatttgataactcctacgccagttactccgagaaagctattaaaaagatgttacccttgatgcgtaccggacgctactggaacgtagaaggcattgattcacgcactttacagaggatcgaacatctgatcacaggtgaagccgatgacaacatcagcaatagtgtacgtgagaaatgtcagggattagaccaaatagaaaaatatcagtttctgcctgtatggaaagtctgttatgtggtttacaatcgccactctgaagccatagacacaggacgttggtcatcacccgaagacattgacaactatctgaagagtgaactacgtcaaagttctctccgcaacccagttgtggaaagtgtcttgacagagtctctgcgtgtcgtgcgagatgtttggaaacaatatggtaagcctgaagaggtacatattgagatggggcgtgacttgaaacagaataaagcacaacgccaaaaggccaacagtgccatgcttgccaaccaacaaaccaacctgcgtatccggtgcatgctccaggagtttgctgatccagaatttcatatcgacaacgtcagaccacaatcacccagtcagcaggagctgctaaagatctacgagcaaggagtgcttgacagcaccgacaacattcccgacgacatccagaccatcattgaccacattggagacaagaacaaaggcgcaagcagaagcgacatgctgcgctataaactttggctggaacaaaagtatcaatccccctacacaggccagcccatctctctatcccggctctttacatcggaatacgagattgagcatgtcatcccccaagcacgatatttcgatgattcactaaacaataaagtcatctgcgaaacggaggtaaatcgcgaaaaaggcagtatgctcgcttacgaattcatcaagtccaaaggcggaatgattgtaaaaggtactggtgggcgtcaatacaagatcctcgatactgtacagtatgaggaatttgtcaaaagccactattcctccaacaagcgcaagatgcgcaacctgctgcttgatgacattcctgacagtttcatcagcaagcagcttaacgacactcgttatatggctcgtaaggctttggatatattctcacatcttgtgagagaggaattcaaagacgatagtgccgtatctaaaaatgtcattgcctgcaatggagctatcacagaccggttaaagaaagactggggcttaaatgatgtttggaacgacatcgtagctcctcgcttcgaacgcatgaacgccattactcactccacagactatggccagtgggtatgcaaagagggtaagcgctatttccaaatcaacatcccattggctctctccaagggattcagcaagaaacgcatagaccatcgccatcatgccatggatgctatcgtcattgcatgcaccactcgcaacatcgtcaactatctcaacaatgcttcaggtgcagacacagaggcacgctatgatttaagaaacgctgtatgcttcaaggacaagaacgtggatggcagcggcaactaccaatggacaataaaaaagccctggtgtacattcacacaggatgcacacactactctcgaccatactgtcgtgagtttcaagcagaataacagaatcatcacacagacctccaaccgctattggcactatagcaacggcaaaaaggttctagaccgacaagcgaaaggcgaccattgggctataaggaagtcactacacaaggcaactgtttccggtgccctttacatgccagagaagaaaaaagtaaaacttaaactagcactggaagacatcaatgccatttgcaatgcaaaagccagaaaagtaatccgacacatcatcaacgaaacgtatcatgggcatgtggacaacgccacgcttctgaaatacttcaaagcgagagactatctgatcaatggcatcaacttcaacacgctggaaatgagaatcgttcctgctcagcccaactataccgcatcaagagtgagccttgacagtactttcaccgaggaaaatattgaaaaaaagataaccgatacgggcatacagaccattctcaaacgccacttgaaacactatgtcgatgacaagggtaaatgcgactgtgcggcagctttctcgccagaaggaattgccgagatgaacgaacatctgacagagctcaatggcgggaaaccccataaacccatctataaggtaagggaaaaagagaccatcggattaaaattcaacatagggacagccggctttaagaataaaaagttcgtggaagcggacaagggtacgaacctcttctatgccgtttatgccgacaatgaaggcaagcgctcttttgagagtattccactcaacatggcaattgagagaaagaaaaacaagatggatgttgccccagctatgaatgccaagggcgacaagttgctgtttgttctctcaccgggcgatctcgtctacttgccccaagaaggcgaacatgttgccctgcctttggatgagaaccgtatctataagatggtgtcatgctcagtggcacgcagctattttgttccatattgttctgcatgtatgattagtgacaaaatagaatatggtccactcaacaagatggaacgttccttggatggcatcatgataaagaccacatgtatcaagctgaaagttgatcgtctcggacacatcagtgtctgagaaaaaaaataacagcctatgattaagaaaaccctttattttggaaatcctgcttatttatctctcgccaacgggcaacttgtcatcaagttgcccgaggtggagaaacaaagcaatctgccgactgtcttgaagaatagctctataactactctcccgatagaggacgtgggaatcatcgtacttgacaaccggcagatcacgctgacacatggactcgtaacggccttgatggctaattgcacagtcatcatctcttgtgatgaacatcatcttccctttggactaatgttgccaatgatgagtaacacaacattcaatgagcgagttcgttatcaactggaggctactctccctctaaaaaagcagttatggcagcaaaccgtcaaaagaaagatcgaaaatcaggcttatctcatcggcacgcgtacttccaagtccatagcatatatgcatgtgtgtgccgatcgggttaagagtggtgacagcgacaaccaagaagctttagccgcagcctattactggaagaatatcttccccgacattcctgacttcatcagagggcaggatggtcttccacccaacaatctgctcaactatggctactctatcctacgtgctgtcgtcgcacgctctttagtcattagcggattattgccagtgatgggcatccatcatcacaacaaatacgacgcttattgccttgccgacgacatcatggaaccctatcgtcccttcgtcgaccaaactgttctcgacatcatggcaaagaatgaacaaatagaagagctaaaaaaagaaattaaacgtgatcttctctcaataccaacagtagatgtgaagattggtggcaaaagaagtcctctcatggtggccgtggcccaaacgactgcgagcctagccaaatgctttagtggagaatcgagaaaaatcgcttatccttcgtttccatgaaaacccgacttaacgaatatcgtgtcatgtgggtattagtactttacgacttgcctacagaaaccgtccaacaacgcaaagatgccgcccttttcagaaagcacatcatgggtgatggtttcaccatgttccagttctctatctacctgcgtcactgccccagcatggacaatgcactggtacatattcgccgtgtgaagtccatcttacctaagtacggcaatgtaggcattctttgcatcaccgacaaacagttcggcgacattcagctattcatatgtaaacaagagaaaaatacggctcaaccctaccagcagcttgagctcttttagaaatacaaaagggattcccacccacaagcgagaatcccttccttcatcaactccgctttttcttttctactctttgtattaactctttattgttcaacgcattaaaacatttgtgctgttgatgtctctgcaaaggtaatcaattttttgctaatcacaacttgcgccagtcacgcgtcatcacgacatcggctgttgatgtctctgcaaaggtaatcaattttttgctaatcacaacgattcagaattcagagattcagagaattcgctgttgatgtctctgcaaaggtaatcaattttttgctaatcacaacggctcttctgaaagagcaatgccagaagaagctgttgatgtctctgcaaaggtaatcaattttttgctaatcacaacattttctctcagcttgacggatctgtctgggctgttgatgtctctgcaaaggtaatcaattttttgctaatcacaacggcttcggtgctcacatcgacaaagaaaggctgttgatgtctctgcaaaggtaatcaattttttgctaatcacaacttttttagggcagggaacaaagacaactgcgctgttgatgtctctgcaaaggtaatcaattttttgctaatcacaacgagcccggccagctgaacacctgcccccgttgctgttgatgtctctgcaaaggtaatcaattttttgctaatcacaaccgtgcaattttcacgcaatccccggcacaagctgttgatgtctctgcaaaggtaatcaattttttgctaatcacaacccgtcatcgattcaagcgatttggccacgagctgttgatgtctctgcaaaggtaatcaattttttgctaatcacaacattttctcgcagctggatggttcggtctgggctgttgatgtctctgcaaaggtaatcaattttttgctaatcacaacgaaagctgggcttctttttatttcattttcgctgttgatgtctctgcaaaggtaatcaattttttgctaatcacaaccaatcatgtcgtcaacatcagccataaggcgctgttgatgtctctgcaaaggtaatcaattttttgctaatcacaacacctgccttatagcagagaacttgattgttgctgttgatgtctctgcaaaggtaatcaattttttgctaatcacaactgctaacgggaaagagctcacagagctctggctgttgatgtctctgcaaaggtaatcaattttttgctaatcacaacaaggagcttcttcgatgataccgtagcgtagctgttgatgtctctgcaaaggtaatcaattttttgctaatcacaaccatagtgccgttttacgccccgccgtcctcgctgttgatgtctctgcaaaggtaatcaattttttgctaatcacaacgcactccgccctgatagtcgagcatccaagctgttgatgtctctgcaaaggtaatcaattttttgctaatcacaacaggttcacgcgcccggcttgttgcagcagggctgttgatgtctctgcaaaggtaatcaattttttgctaatcacaactgtaactatgaaatagttcaaaagccgctggctgttgatgtctctgcaaaggtaatcaattttttgctaatcacaacgcgcttttgctgtggcatacttaaagagtgctgttgatgtctctgcaaaggtaatcaattttttgctaatcacaacactgacctgacatttctacagtcgatccacgctgttgatgtctctgcaaaggtaatcaattttttgctaatcacaacaccgagtatcgcagtaccgatgcagcgggtgctgttgatgtctctgcaaaggtaatcaattttttgctaatcacaactctgccattgttcagagattgtttttcctggctgttgatgtctctgcaaaggtaatcatttttttgctaatcacaactgtgggcgaggactgtctaactttgcaaggctattgatgtctctgcaaaggtaatcatttttttgctaatcacaacaaaacaacgtaactatcactaagattgtaagctgttactgtctctgcaaaggtaatcaattctttcctaatcacaaccggatgggatgcagggagttatgttataagtaaaagtaaaagcataagaaaagccccggcacggctcagtgtcggggcttttcttttttatgcgactaaaagtctgtatgtcctttatcagcggcagatgactttctttccgttgtggatgtatataccacgtgaaggcttagccactcgctggccttgcagattgtaccatacatcctgcttctcgccactctcaacagcgttattgatagctgtcgtcgtgccgtcgttgatgccgatggccatgctcttggcactggcagagccctgctgtatcttgatatgtccaaagacaacctccagccaagtgccactgtttccataagcatctgctacgggggtccagcggaaatggtaataaccggtgtggttggcatagaaattcacaacaccataactggcaccataggtatttgcgctcaggctcttgcctacattgttgttgcaccgtatgatttgtgaacccaggcagttgttgctctcgtcaaagacttcgcacttcacataaggatttcctgcccatccgatagcgtagtagctgagattgtagttgccctttttgagcgaaagaccatagccgtttgttgtacccacctcggcataagcggtcttcgaagcgtcgctctgacggatgtagaggccggtgggcagataaccaccttggctgaactggaagatgcgggggcctgacgcagcagggccagcattgaccttttgccccgcgtcaagaatcttccagccctctggtactgtattggcattcttaaaagccagtgggttctccttataatagagtcctacattgcctacgagtgcttcctcccaattaccgccattgccctttgcgtcagcgaccggcgtaaagcgcagtttgtagttgcctttgatcatggaatagaatgagaggttgacccgggtgctacccttgatggcagtgttacgtgtgccgttgacacatccgctggccttgacaatggttgaggccaccacagtgttggtgggatcaaacacctccaccttcacgtaaggacttcccttccatgcagttacgttgcaattgagttgatactcaccatagaccagtggcagcgtatatccgctttgtccgccatattcgatatatcccgctttgtcggggctgatctcgcgcacatagaaggcgatggccatgtctccaccctgatagaactgcatcactctcgggccacggctctgactgcccacttgccgtaggcttccgttgtctacggctgtccatccggcggggatgacatcattgacgttgccccatgccttgacgagattgtcaccggttgtggtagaagatgaggtattgcccgtagatgacgaagacgaggaggaagactcactcttatgggcatagttctttttggagtactcgtaataccagtagaagcaagccttggcgcagcactcaacgttttcattgaaattagccttgatggtgccgttcttcaagaacgcgtcgatgtcaacataatcttcgttggagctcagcgtcatgctgatattaccgaagtgatccatcacagctttccacgcatttccccatttgctggtcgatgcggtgccccaggtgccgtagttgctggccacccattgtccgaactcattatattttcctgctccagctttttccggactccagtctatctcagagacgaggataggcttggaagtgaccacaggcacctgattttggaagttgcggatgaaggtattgtgatcatagctcttgtcgcttgccccataccatcccggatagacatggacagcatagccaaagttgccgtcggtgatgggatgcgaggcatagtcttgatattggctttgatagccggtaccagggatccatatcacgcccttaaatccgttttgtcggatgatattgacaatcggctggaaatagtcgtgcagggcagatgatgaggattgaccatattgattatagacatgcacaggctcgttggcaagttccaaagatacgactcctgaattgttcttgaagttggcattgcttgacacaatcccccataccgttttgagatattgctgataagcatcgcctaccttcagatctttcgggcatacccccggtgggcgcacgacgacgtaaagcccgtggttcaacgccttctgagcaataggccaatagagcgtctgcaggtacttacgcaggcggtcggcactgaatttcgagatgtcagcttctccgcttgcgtgcccattgttggtccagcaagggtcgagatgcagtcggaagatgttgcagtacgtacccttggcagggttttgaatggccccgaagaccttgtcaaagtagttgatacaagcggctaccgtgccgtcgttgcaggctgatccccaccggtaacggttgaaatagggattaggggtgtccatcacgccatgaagcacaacggtgtgtcctccttggtcaaccaattgcttgccactgacgtggagtggcgctaccacaccaaactgggcaaacgctcccatcggcatcactgccatggtcagggataatagaaagtgtttcataaaaacagttgaataaaaaatggtattaagattttgatttgcatcgcttgcaaaattatgttttttgcttattgcttgcttttcgacacgtaccaaaaactttatcaccagtgttttaccctaaaattctgattttaaacattgtaaacgtctcacaacccataaaaatatgaggagaatctctgttattggaacaaaaatttcgcttgaattttctttctaacaaaagatctttcgctacgtagattttaatcattcgctacttagcgaaagacctttttctatagcattacaacattgggaacactgcttcgagtccacgagaacatagctttgagtccacgagaacactgcttcggatccacaagaacactgcttcgagtccacgagaacatagcttcccaaattcttggcaacagttcactagagccgagagaaatatcaaagctgctatctcttgttttcgtcattgtaacacccaaattccaagactgatgactatatcgacccaatcatatagtgcgtggttagggcagggataacccctgcccctatggtgataccatcgtcgtctcccgatgggtaggggcggggagcatccccgccctaaccacgacctcaccgcatgcggcaccgctaacagggtaatactgccaaaacgatgtggatgtcaaccgccgaaatgaatttgcagaatagctacccccgaaaaagtaacgaaaacaggacaatgtcacgccagcactataagacaaaaaaatgccacaaactcttcacaagaatttgcggcatcttcttcaaatgtggagctggtgggattcgaacccacgtccaaacagggaaaccatacgctttctacacgtttattccagcctttggttttcgtgcgacggcaagacctggaccaccaaccggcgccttagcctctaaattttcatcctgccgtcgaggcccgacaagactatttccgatttatctgcaccgcttgatcctcagattcggaacaacatccttggagcgatgtctcgtcccatcatctgatgacgggattgagccagtaatctactgtacttcgattaggcagcgagagcgtaattgttttcgccaattaaatttttgttcactcagattaaagagctagccaacgaggctctgcgtgcttacgtaccatctcagcctgctgtcaaatccagtcaaccccagatgatattctttgcaaagttaagaatttatttccataccacaaaatattattaactataattattgaattcgctggcatcagtaacagtttagcaaagagcactcacacagcgtctccatgtgaactaggccacatgttacgtttctcccccgaataattgtcgctatagactttttgttgtacctttgcattcgagaaatacctaaacatggtaaaactttcttttagtcaagcaatattcttgcccaaagtgagtttataaacataaaaaagtcagaatatataaatatgaaaaagatactcttgggattggtcctgctactggtatccccactctctatctgcgctcagtcgtctatgaccgactcacaggtggcgaactatgtacaacgtgaggcggcccgaggcacttcacaagcacagatcgtcacccacctgatgcagagcggtgtcgacatctcacagatcagaagggtaagacgcgcttatgagcaacaagctaaaggcaaaggacttggaaacgtcacagaaaccacgacaacggaaaaccggctgagaaagagcaacggaaaaaccaaactgacaaaggcgcaaaccgagcaatacaacaagcaacgcgatgcaacaacctcgggacgcattcaaggcaacacacaatggcaggattcctacgacgagaacgaccaggacttcctccagatgcaacaagaggtcagcgacatcatgcccaccgacacagctaccctgctcaagcaattactctaccaacagcgcaaggacaagcataaggtattcggacgagacattttctcgaacaaaaacctcagcttcgagcccatcatgaacatcgccacaccgcagaactatcggctcggaccgggcgacgcggtgaacatcgatgtctacggcgcttcccagcgaagcatcacggctacggtaagccccgacggcgacatcgtcatcgagaacttcggacccatccatgtcggcggcctctctgtggcacaggccaccgcacgcatccgctcacagctcggtgcccgctaccaaagtagccgcatcaagctttctttgggacagacacgcaccgtgaccgtcaacgtcatgggcgaagtcgtcacaccgggcacctacaccctctcggcctttgccagtgtcttcaacgcactgtatatggcaggcggcaccaacgaccttggtacactgcgcaacatcaagatctaccgccacaaccgcctcatcagcgtctgcgacatctacgactatatcctcaacggcaagatgacgggcaacgtacgcctcaacgacggcgatgtcatcatcgtgggcccctatgactgcctcgtcaacatcaccggcaaagtcaagcggccgatgtactacgagatgaagcgcaacgagagcatagagaccttgctgcgctatgccggcggcttcacgggcgatgcctataagaaggcggtgcgcgtcaaccgcaagacaggacgcgagtatgccgtatataatgtcgaagagtttgacatgagctcgttccgcgtggccgatggtgacagcgtcagcgtggactctatcctaccccgctaccaaaacacggtagaggtcaaaggagccgtcttccgtccgggcatgtatcagcttggagccggcatcaacagcgtgcgcacactcatccagcatgccgaaggcctaaccgagcaggctttcaccgcccgtgccgtcatgcaccgcatgaatgccgaccgcacgctgcgtgtcatcgccgtagatgtggacggcatcatgaacggacgcgtggccgacatcccgctgaaagaaaacgacgtgctcttcatcccctccaaggaagaagccatgaccgagcgtaccatcaccatcaacggcgaggtgcactatcccggaatctataaatatgccgacaacgagacactcgaggactttgtgcttcaggccggaggactcaaggagacagcctccacagtaaaggtggacgtagcccgtcgtgtctctgatcccaaggcactgaccacagacagcgtcatcgcccgcatctacagttttgcactgaaagacggcttcgtcatcgacgggcaacagggctttgtgctccagcccttcgacgaagtctatgtacgccgtagccctgcctacagcatacagcagaatgtcactgtcgacggcaaggtgatgtttccgggatcctataccatggcctaccgcgacatgcggttgaccgatctggtgaagatggcaggcggcgtagcacccgacgcatatatcaaaggtgcccgcatcatgcgtgtacccaccgaggcagaacgcacacgcatggaggccgccttcaagatgcaacaagagcagttacgccagcaactcatgcagttggccgtcaacagcaacaataacagcatcatgcaaaactctaacgagacgctgcaaaagcaactcgagaagttccaggtgcccaacacctaccccgtcggcatagaactggacaaagctctgaaagatcccaagagcgatgccaacatcatcctgcgtgccggtgaccgtctcttgattccgtcctacacggcgacggtgaagatcaacggtgccgtgatgtatcccaacacggtcagctatgagcgtggggagagcgtccgccactatctcgatgccgctggcggcttcgcgcagaacgcacgtaagagcggtgtatacattatatatatgaatggcatggtcggcaaggtcagccgtggcgccaaggtagagccaggctgtgagatcgtcgtgccctcgaagctcacccgaaagatgagcgtggcagagacgatgagcctcggctccagct

SEQ ID NO: 468 - DNA, 24488 bp, synthetic construct
  source 1..24488: mol_type = other DNA
  misc_feature 1..24488: note = Synthetic
tgaccgacatcattcacgagcacagcctcgttgtgagtagcctcggtcaccacattggtcacctcacccatcaacagtggaccttccttaggatgaatgtctttctcgataactttctcctgctcctgctggcgatacacatcgaaagagtcgcgccattcacggtgtacattcttattcagcagacgtgtgatggctggcaacgactgtttgcagtcaccgatgacagcgacatccgtctttatcaccttgtctatctcggccttgtcaatatcgagatgaatcaccttagcctgaggagcatacttggaaggaacacccgtgatacggtcgctgaagcgcataccgatggctatcagcacatcacactcctgcgtcttcatgttggtggcataagagccatgcataccgagcatacccatattgagaggatgattgctgggcagagctgagagtccgagaagcgtacgtcctgcagggatatcggctttctccaagaactccaacagttcattgtgggcaccaccaagttccacgccatgacccaccaaggcaaaaggtttctttgccttgttgatgagttcggctgcctcagccacagcctgctcgtcaatcttaggataaggattataggatgtcaccttctcacacttcaccggttcccattcgcaagaagccacctgggcattcttggtgaagtcaagcacgacaggacccgggcgaccgctacgggcgatatagaaagcacggcttacagcccatgccacatcctcaggacgtctgatctgataagcccatttggagattggctgggtaacacccaccaggtctacttcctggaaagcatcagtacctaaggcaccaacacccacctgaccagcaataaccacaataggggttgagtccatcatggcatcagcaataccagtcagcgtattggttgcaccaggaccacttgtcacaagagtcactcccacctcaccgctgactcgggcataaccctgtgcagcatgagcagcagcctgctcgtgacgtaccaagatgtgatcaaacaccttattttctcctctcgtgtaaccatacagtgcatcaaacactggcatgatgctgccacccggatagccgaagatggttgtcaccccttctgcctgcaatgagcgcatcaatgcttctgctcctgaaattacttcttttgccatttatacttattgtttttatatgatgagggaagttaagtgggaactcacttaactttcctccgaattctcttaaatttctaaagatactactaatctatgattctcacaccacccttgtcggcagagcttacactctgtgcataggcacgcaaagccttgcttaccacacggttgcgcttcaatggctgttgtggacgggcattgagttcctcatcactcaacttcacattgatgctgcggttaggaatatcgatcacgatgatatcgccatcctttatcttgccgatgttaccacctgctgcagcctctggtgagatatgaccgatgctaagacctgacgtaccacccgagaaacgaccatcggtaatgagcgcacactccttgccaagatggcggctcttgatataagaggtaggataaagcatctcctgcataccaggaccacccttagggccttcgtgggtaataacgacacagtcgcccgagttcaccttgccatccaagattccctcgcaggcatcctcctgagagtcgaagcatacggcaggaccctcgaaatgccaaagcacagggtctacaccggcagtctttaccacacaaccgttctgggcaatattgccaaacagcacagcaagaccaccatccttggtataagcatgctccaaatcgcgaatacaaccattctcacggtcggtatccaggctctcccattgagcatcctgactacccatctgggtagagaacttacgaccaggtgcagaatgatagattctgtcggcctctgggtcgagttgaccagtggtgatatcatatttcttcatctgttcgtcaagagtatgaccatcaactcgcattacagagccgttgataagtcctcccttgttgagctcattcaatatacccatgattcctcctgcacggttgcactcctgcacactgtacttctgagtgttaggactcaacttgcagagacaaggcaccttgcggctcaactgatcgatgtcctccatcttgaagtcggcgccagcctcctgagccacagccaacaggtgaagcacggtattggtacttccgcccatggcgatatccaaagtcatggcattgaggaatgcatcacgggtagcgatattgcgtggcaatacactctcgtcgccatcctgataataagcataagcattcttaaccacctgacgtgctgcatccttgaagagctgaatgcggttcttgtgagtagccaggatggtaccattaccaggaaggctcagaccgatagcctcggtaagagagttcatggaattggcagtaaacatacccgagcaactaccgcatccaggacatgcacactgctctatctgagtcatctcctcatcagagacactggtgtcagcacccttgatcattgcagtgatcaggtcggcattctcgcctttccatcgtcctgcctccatagggccacccgaacagaatacagtagggatgttcagacgcatagaagccatcagcatacccggagtcaccttgtcacaattggagatgcaaatcatggcatcagccttatgtgcatttaccatatactctacagaatcggcgatgatatcacggcttggaagtgaatacaacataccatcgtgacccattgcaataccgtcgtctacggctatcgtattgaattcggctgcatagcaacccattgcttctatttccttcttgacaatctgaccgatttcatgaagatgagtatgacctggcacaaactgtgtaaagctgttcacaatggcaataataggtttgccaaactgctcatgtttcataccagcagctacccagagtgcacgggcacctgccattcttctgccttcagtacagacactacttcttaatggatgtttcatcatttttgtatcttcgtttattttgcctacaaagatactgagtttttatgtaatagccaacaaatttcgtataaactttcacaaatacgcgtattttgttacaaaaacaacctataatacttacaatctataagacatttgctatatttacttatcaatcagttactataaacaaaaaaaatccctaagaccgaagccttagggattccctattttgatattattcaatatcgtttttagcgtatcgctttcaattactcagcaacagagttgtcgttgaaagtagatacacggttgaactcaacctgcttgaagagcttgtctgttgcgcccatacccttagttgtcaaacgatcagcagcgatcttgtacttcttaacgagtacgttcttaacagcgtcagcacgcttctgagaaagagcctggttgaagtccttgttaccctctggagaagcgtaacccttgatctcaaccttagcatcctggtgattcttcatatactgagcgatcaactcgatgttaggcatctggctcttgtctacaacagccttgccctgacggaacaatacagttggctgcaagtttgtagcagtagctggcttcacatacttaggcttcttgttgcactcgtcgagagcattctgaagatccttgatctgcttgtccttagcagaaagctgagcgtccttgttgttcaagtcaccacgaaggctgttgatctggctgttcaaaccatcgatctcgttctggtcgcggagctgagcgattgtgaagttgtgagaaccgttagagttcttgaacttgtaaacgataccagcgttcaactggaatgcagacttgttgatgtcgtaagcaacaccctcatagccatagccgttcaaagaccagttcatagaaggctcaacatatacctgccatgccttagccttgcccaggttgaatgtgaagtcgatacctgccttagaagtaagagcgttaagctccttttcattatcaccagcagctgtaccgaatgtatgaccccaaccgaagccgaatacaggaacaacctcgaacaaacgtggctcacccttgtaaccagcaaaccagttgctcaagtttacagtaccgatcaaacctacgttcatgtagcgagctaaagtcttagactgtggcatgtagtgcttgcagtgatcgttgaagtaaacattaccctcagcagccaaaccgaatactggagtgaaccagcgaccgatacgaaggccagcgtttgagttcaggttgttcatccagctctcgccagtagtctttacctgagcaccaccgttgatgccgatgtagaagttgtcaaatgtcttgctctcagtaactgtctgagcatttactgaaactgccattgcagcggcagcaaacaataaacctaactttttcatgtctctctaaaaattaatttattaaaaatgttattgaaatctttattattgcgcaacacattgcacatttttgaaatcgagtgcaaagtaataaaaaaaaaacttaactaccaaacttttcctataatattttacatttgtcccgtgaaaactggaaaaaaagcacatattttcttctttttgtacgattgcaaaataactttaagactttcacaccgattattcacatcctatcacaacctcccagtctacttacattttcaagctaaaacacaagtttttccatgcttctacgcgcgcgtacattttttattatatatagagagtttcagtaggttctggagttagggaaacaaaaaaaaagaccgagtgcatcactacactcggcctccaacaaattagagagttataaaaaatcaagtatattgctacttgtagaattccttctttcctgcagccaatgtattcttcatcagcgagcagatggtcataggacctacaccaccaggaacaggggtgatataagagcaacgctctgccacctcgtcaaatttgacatcaccattcagacggaagccactcttacgggtagcatcaggcacgcgggttgtaccaacatctatcaccacagctccctctttcaccatatcggctgtaacgaagttgggctttccgatagctgcaatgatgatatccgcctcacggcactcctccttcaggttggcagagtgagaatggcaaaccgttacggtagcatcaccccactgtttctgcatcatgagttgcgccataggcttgcccacgatgttgcttctgccaagcactacacacttcttgccactggtaggaatatgataatgctgcaacagggtaagaatacccaacggagtggcagagatgaaacaaggcagacctatagccatgcgacctacattgatgggatgaaaaccgtccacatccttgcgataatcaatggccatgatgattttctgctcgtcaatatgggcaggaagaggcagttgcacgatgaagccatctacatcttcatccttgttcagcttgtccacacaggccaacaactcttcctcagtcacgtcgtcctcgtaacgaataagggtcgacttgaatccacacttctcacaggcaagcaccttattcttgacataggtctcgctgcctccgtcatgtcctacgagtacagcagccaggtgtggctgttttcctccgttggcaacaatttgtgccacctcttcggctatctgctccttaatggcatttgccgtagcctttccgtctatcagttgcatttcattcaatattaaataatcaatgttatgtgttatcacattcctggcatctttggcataccgggcattcccttcatacccttcatgcggctcatcatgcctgccattccgccaccagtcatcatctgcatcatcttgcgggtctggtcgaactgcttgatcagcttgttcacctcctggatattggtacccgagcccttggcgatacgctgacgacggctggtattgaggatacctgggttagaacgctccttaggagtcatactctgaatgatagcctcaacgctcttgaatgcatcatcaggaatatccacatcacggatggccttgcctaaaccaggaatcataccagccaaatccttgatattacccatcttcttgatttgctgtatctgagcatagaagtcgttgaagtcgaactgattcttgcgaatcttcttctccagtttctttgcctcctcaaggtcgaactgctcctgagcacgctctaccaacgaaaccacgtcacccataccgagaatacggtcggccatacgggcaggatggaacacgtcgatagcctccatcttctcgccagtaccgataaacttgattggcttggtcaccacagtgcggatactgagagcagcaccaccacgggtatcaccatcaagcttggtaagaaccacgccattgaaatcaagacggtcgttaaactccttggctgtattgacagcatcctgaccagtcatcgagtcaactacgaagagagtctcgtcgggacgaagatgattcttaagaccgctgatctcgttcatcatctgctcgtcaatggccagacgaccggcagtatcgacgatgacaacatcgttgccattggtcttagcctgctggatggcatggtcggcaatgacacaaacatccttgttctcaggctcactgtatacaggaacacccacttgctctcctaccaccttcaactggtcgatagcagcaggacgataaacgtcgcaagccacgagcaatggcttcttgcccttcttggtcttgagcatattggcaagctttccactaaaggtggtcttacccgaaccctgcagaccgctcatcagaatgatggcaggatgaccttcgagcttcagaggagcttcctcgcctcccatcaactcagccagctcgtcgtgaaccagctttaccatcaactgaccaggctttacagccgtgagcacattcataccaagtgccttttccttcaccttgttggtgaattccttagctaccttgaagttgacgtcggcatcgagcaaagcacggcgtacgtccttcatggtctctgccacgttgatttcggttatcttaccctcacccttcagaatcttgaaggatcgttccagtctatcacttaaattttcaaacattttaaattctttttttattttggctgcaaagttacgaaaataattccgaaaaccctatattagtaaccaaaaaagcacgtcaaatctgtcactttaggatacttaccgactgttctaccgacacgcgtaccttttttgacgttttttcatcatttacaggaagcgactccttcccttgttccttgttttttcctttaccttgctccttgccgggattcttttccgacacatttccttgcccatttctttctcctgcagcttttgccttttctgcatcagatgcagcggcaggttgctggcgaggttctataggctccacgctcgacttcatcatactgccgttagcctgatatttctttcctgtggccttctcgtaggcagccacaatggggtctttgcgatccatctcgccgaatatcttttgagcctctcgcaggtgcttgctgtcacgtctgcccctcttgtcaagcatcttggccaagtcgaagctcgctccgctgggagcatttgccccacctatctcagcctgccggtgcgcatcgttctgaatgcccttgatgccaggcatattctctccccatacttccacctctctgagttggtggctctgcggcagcagaaacaccgtatcggggagattcttcagatagatggtagtcttcagaaagcccggtttcgacaccgtagcactgtcaaactgatacttcatggtccagtaacctctgtagtcggtacgtgcccaatgattgttatcggtatgaatcaatgcttcacgcacaggcacatggtcttcggcattggctatgacgcaggttttctgtgccctgaccattgccactgcccaacataccagcacgatcatcaatatagtcttcttcattcgttttatcttattgaacttctacaacttacataagttgagttatgcctacaaaagtaaacaaaaaaataatatctcccaaaaccaccaatgagttttgggagatattaatgcgatttaaaagtctataacgttattctacgtctgtcgtgccgctcttctcgatgcgctttgcctcttcgagcaacttgatggcatcgacatattgggcaataccctgagccacctccttggcagccttcatggcaagcaccacggtctgaggacgatgaaccacgtcgcctccggcaaacacgcctctgcgggtggtcataccaaaaggacgctccaccaccttgacataacctttctcgtcaacctcaataccagcagtagtagagacaacacggttggcaggacgtgatccgatggccaagtagatgcggtcgaatttctctacacgctcaccttctggagtattgagtacacagcttcccagtcttccgttcttacccttgaggaaagcctcgacagtagttttccattcaaacttgacaccctccttcacagcctcatcatactcactctgtatggcaggcatctcttcctgtgtcttgcgatagagcactgtcacatcagcacccaggcgaatggcagtacgtgcagcatccatggccacatttcctccacctatcacgcccaccttctctccatcacgaagaggcaccatgtcgcgtgtcagggctccctcgttataggcattgacattgtgcaggaaataagtactctggctcactccatgcaacttggcaccaggtgtagagtccatattctgaggtacgctggttcctgttcccatgaaaatggcatcgtagcctgcacggaaaagactgtctattgtcacattgttctcacccaccatgcagttggtgataaactgtacaccgagagcctctatcttgctcacctcggcacgtaccacggccttgggcagtcgatattcaggaataccatacatcagcacaccaccaggctcggcctgtccctcgaagatcgttacattaaagccctgacgtgccaaatcaccagcaacagtaagtccggcaggaccagaaccgatgacagccacacgtccacgagtcttctgtggaagcttctcgcgagagaggttcatcttggtatcgaagtcggcaataaactgctccaacttgcctatctgcacaggttttcccttcttgcccagcacacagttgccctggcattgcttctcatgaggacacacacgtccacagatagcaggcagattactcttagcattgatgatagacatagccgcacccatattacccatagaaagttcatgcacaaagtcggggatatcatttccgataggacatcccttcttacattgtggcaccttacaatggaggcatcgcttggcttcctcaatagcctcacgtgtagtgaagccctcgtttaccacctggaaaccagccacctgttctgcagccgcagttgttttctctgctgttgtctgcaccttgttattctgttgctcaatctgttcactcataatctaatcttttaatcagttagaaaacaacttttatcaaattgtagtttgcgggtgcaaagttacagcaaatcgaagacaaaacaaaataaaaagtgaactttttgtttttattgttgagatgcagcttaactttaaataagttacgaataataattctatcattacttacccccatccatctcgctcaaaaaaaataaaaaagggcgagtcaccccgcccaaaatgtattcacaacggaataatccttattgtgattagctaaaaattactgcaaatataaaactttttcccaaataaacctaatccttttaatattttttattatatttgcaggaaataataactaaaagtaaagaaaatgagtaaaatattggggttagacttaggaaccaacagtataggttgggcattaattgattcaaaagaacaaaaaatcatcaaagctggaagccgtattatccctatggatgctgcaacgatgggcgattatgaaaaaggcaatttaaagtctgctgcctctgaaagaactgatttcagaggagctcgtaggctctatgaaagagccatactacgacgtgaaagattgttgagagttctccatacaataggcttcttgccaaaatcctttgaaaaacaaatcgacttcactgaacatcctggcaaatttctaaatcatggcgagcctttgcttccttattacaaagatgagcaaggaaaaaatacgtttttgttcaaagattcttttaatgaaatgctcagtgatttcaaaaaacatcaccccgatcttgtcagtgatggcaaactcatcccctacgactggactatctattacttgcgcaaaaaagccttaagccagcctattacaaaagaagaattggcatggattattctcaactttaacacaaaacgaggatactaccaactaagaggcatggaagatactgaagaaacagataaaacaaagatagaagtatataaggttttagaagttgcttctgttgaaaacataggtccgaacaagaagaaagaaggctacaattggtatcttattacatacgataatcatgcaacccaaagagcctcatcaccaactcctccacaaaaagtaggcaaccttgtcgaggttgttgtcacaacaactcttgataaagatggcaacataaagaaagacaaagatggctttcctatgataaagcttcgtacccccaaagaagatgattggactctgatgaaaaagcgtacggaaaagaatttggcaaatagtcaccaaactgtaggctcattcatctatgagcatatattgtctactcctaatattaaggtgagaggaaaacttatccacactattgagagaaaattttataaggaagaactttgtcaaattcttgagaagcaaaaggaattcattcctgagctaaaaaatatagaactctacaaaaaatgcgtgcatgagctttacaaaaacaacgaagcccatgttgaatcgcttatgaatgaagattttaccaacttgtttgtcaacgatatcatattctaccaacgccctttaaagagcaagaagagtttgatagccaactgcccttttgagtcttatcactataaggataaaaatggtaacattcaatcgcacccgattaaatgtattcccaagtctcatcctctttatgaagaattccgcctttggcaatttttgtctaatctgcgcatttacaagaaaaatgtagaaataaacggcaagattgtaaccgattatgatgtaacatcccaattcttacaaactcctaacgattattgtgacttattcgaatggttacaaaacaaaaaggaaatcaaacaagaccaacttctaaaatataagtctttcggcatcaacaaggaggttagtaactaccgttggaactatgtggaagataaaacatatccctgctgttccacaagattcgaaattaacaaacgcctacaaagtctgaatctacaagatttagataacaacgactatacccatctttggcacattctttattctgttgacgaccccattatgtgccaaaaagctcttcataagtttgccataaagcatgattttcaagaagaagaatttgttaataagttcaagcaatactctcctgacagcaaagattatggtgcctattcggaaaaagctatcaaacgcctccttgccttaatgcgaacaggaagacattgggacgagaagaacatagacacaaagacactctcaagaatcaacaacctcatcgacggagttgttgacgatgaaatatcagaccgagttagagagaagttagccaacaaacaacatatctccgacttccaaggtttaccgctttgggctgcaagttatgtcatttacaatcgccattcagaagcatcagaaaccatcaaatggcaaaagccagaagatatagacacctatctccaaaacaaccttaagcaacactccttacgcaaccctgtagtagaaaagataatctgtgaaacactccgagttgtcagggatatttggaaaaattttggcgatattgatgaaatacatgtagaaatggggcgtgaactgaagcaggatgcaaaaagcagaaacaaggatagccaaagaatcattgagaatgagcgaacaaaccttagaatcagagctttgcttcaagagtttgctaatcataattacatgattgaaaacgtacgtccatactctcccagccaaatagagacactaaaaatttacgaaaattgtgtactctccgactcttcgatagaaaggcctgacgacattcaaaagataatgaacgacttaggcaacgccaaaactattcacataaagcagtctgacgttttaagatacaaaatgtggttggaacaaaactacaagtcaccatatacaggacaaatcatacctttgtccaaactcttcacaccagcctatgaaatagaacatattattccacaatccagatactttgatgattcactatccaacaaagtaatatgcgagagcgaagtcaacaaagcaaaagaccgtatgcttgcatacgaattcatatcacaaaaaggtggcagcatcattaagggaaactttggacaagattttaagattttggacaaaaagcaatacgaagattttgttcaacaccactatgctaacaatcgcacaaaaatgaagaagttgttgcttgatgacattccagaaggtttcattcagcgccaactaaacgatagtagatatatgagcaaaaagatgctcagtatcttatcatgccttgtacgagaagaaggagaacaagaaactacctccaagcatgtaataccaactaatggcgccatcactgacagactaaaaaaagaatggggcatcaatgatatatggaaccaacttgttacacctcgatttgagcgcctcaacgacaagactggcacacaagcttatggacaatggattaataaggatggtaaccgcttcttccaaacaaacattccattagatctgtctgtaggtttcagcaaaaagcgcatcgaccataggcatcacgccatggatgctattattattgcttgtacaaacagagacatcgtcaactatctgaataatatcgctgccctatctaacaaagaaaaggagaggtatgatctcaagcacaaactatgcaccaaggtcaagaccgataataatggtaactatatttggcagttcaaaaagccttgggaaacatttacccaagatgttagcggagtacttgatggcatcattgttagcttcaagcaaaatttgcgcatcatcactaagatgagtaattattatacccattatgttgatggaaagaaggttgtcgataaacaaatcaagggagatagttgggctattcgtaaatccatgcacgaagctactgtatcaggacttatcagcttacaaaaatgcaaacaggtaaaattatctgtagccttagagcaatggcagaatattgcagacaaagaactgagaaaagaaatcgcaaacctcatcaaactatatcataagttcgataaaaaactattcataaaatacttcaaagatagagacaacaaattaaatggtagagatatttccaacgtcagaatatactactatactggcacctgtgggaaggaaagtgttaccgctacaagagtcgctattgatgaatcttttgacacaaagaagattgagtccatttctgatagtggtattcaaaagattatgcttgctcacttgaaaaaatacaatgatgaaaaaggaaactctcatccagaagtagccttctcacctaaaggtattgtagacatgaaccaaaacatcaaggagctgaatggcggaaaagagcataaacccatatataaggtaagaaagaccaaaactctcggcatgaaatttgccattggagaagtaggtaataaaaatcaaaaatttgtagaaacagacaaaggaacaaacctattctttgctatatacgtgaatgaagaaggtgaacgttcttttgaaagcatacctctcaatattgctatcgaaagattaaagaatcatctgaaagtagctgaagaaatcaaagaagatggtagaaagttgctttttaccctctcacctaacgatttggtatatctaccagatgcaaaagatggcaaaaacatttataaaatggtatcttgctatggaaatcgagtattctttataccagagacttgggctactcctatcaataacggatacgaacttggttctttaaataaagttgaaatgtcattggaaggtatcaatatcaagcaagaatgtgaaaagatagaggttgatcgccttggtcgaataatcaaaacctataaatagcatcgcctatgataaaaaaaacattgtattttgggaatccagcatacttgtcgttaaacaacaagcagttagttatcaaattgccagaagtcgaaaagaacaacgaacttcccgaaatcatcaaaaagtcttccataaagacgattcccatagaagatatcggtgttgtcattttagatcataagcaaataactattactcaagctcttattgcagcactgttagacaacacggtagcactcatcacttgtaatgacaagcgcatgccaacaggtatgctcttgcctttacaaggctgtaccacccaaaatgaaagattcagaaagcaaatagaggcttctctacctcttaaaaagcaactttggcaacaaacagtaaaagccaaaatagaaaaccaagctacactcttggaaagccagacaaaacaaatagcaaaaaatctcagaaagatggctgcagaagtaaaaagcggagactctgacaactatgaggcgcaagcagccgtcttttattggagaaatatatttcctactataccagactttattagaggacaagaagaagacccaccaaacaatcttcttaactatggatatgcgatactaagagccgttgtagcacgagcacttgtcgcaagtggcttattacctgtatatggcattttccatcacaacaaatacaacgattactgcttagctgacgacattatggaaccatatcgtccttttgtagaccaacttgtagtaactatcatcaattcgggcgaaaatatagaaaacataaataccgatttaaaacgcaaactattacaaataccagttatagatgttcttattggaggtaaaagaagccctcttatgattgctgttgctcaaacgacagcaagtttagcaaaatgctttaacggagaatcaagaagaatcagttatcctcagtttatatgatagacagattaaacgaatatcgggttatgtggatattggtattatacgacttacctaccgaaaccaaaaaagatagaaagatagcagcaaagtttcggaaaaacattatgggcgatgggtttaccatgtttcagttttccatttacatacgccattgtgcaagcatggacaatgccaaagttcatattaaacgagtacaatctctacttccggataaaggtcatgtaggaatcctttgtataactgacaagcaatttgctgatatcaaaatattctattgtcagaaagaaaaactacctaatgctccttatcagcaacttgaacttttttaaaaaacaggaatgcagattcttaccttttcgaagaatctgcattcccaagacaactctattttttaattctaatatcagcgctatatatctaatttacaacacaatatagaattcgggttgtttcttcttttgcaaagatactaattttttagctaatcacaacccacaatgagaggtaagtctaatttcgtgtgttgtttcttcttttgcaaagatactaattttttagctaatcacaacatttgtatggtcgcattgcgaggaacgtgagttgtttcttcttttgcaaagatactaattttttagctaatcacaactaggtactggtgcttctgctacttccccaagttgtttcttcttttgcaaagatactaattttttagctaatcacaactcaatgcctcctgtccttgctgagtactctgttgtttcttcttttgcaaagatactaattttttagctaatcacaacgtcaagtctgcattggtcgtaacatcaatcgttgtttcttcttttgcaaagatactaattttttagctaatcacaacccacacgcacaacgtgccacgcttcttccagttgtttcttcttttgcaaagatactaattttttagctaatcacaacctatcaatctattatccagtacgtcacgaagttgtttcttcttttgcaaagatactaattttttagctaatcacaacaaccgaacgctttttattacacgagtaaatgttgtttcttcttttgcaaagatacaatttttttagctaatcacaaccaataactctaaattaaatgaaatgaagaagttgtttcttcttttgcaatgatgctaattttttagctaatataagaaactggcttatatagaatgtcatccgcaagagaaaatcactgacgaaacctgggacaacttagaagaaactcttgagggaatgattccatctttggcaaatatcaaattgaaactaagcaaaaaggaatatcgtatttgcctgctgtcaagactgcacttctccccctctgccatcagttgcttcatgcaatgcaacttgcccgacatttccatgtcgcgtaaacgtatgctgtcgaaactgtgtgaaaaggacggaaaacccaaagagctggatgaatatatccaacatttgtaactcaactttcgcaagatataccttgacaaaaacaagaatactcccgacgttcgaacagacttacgtttttgaagtgtgatgaagggtggaagtgtacccttcaccctctgaacccccgataaacacaggggattccgaggaatagatgaagggttttgaagaggtcttccgactttttctaattctttatttcaatatcttcctttacgttattgcgtatcttggtgaggaaagctttcatgcgaccggcatccttatggtcgatgatatcgatcagctcggcaagctcctcacgaatctgactcaactgtcctgaagtataggggttgaagagaatttcttgcaacagatagtcgtcctcgttgagtacacccttggcaatgttcatgtgacgtttgaaggtagtacccggagcatcctgatgcttcatcacagcagcaaaaacgaaagtgctggcaaaaggaatactcagcgagtaagccaccgtctggtcgtgctcatcgaaggtgtattcgtgcatgttgagccccaactgctggtacaaatccttgaagaatatcttgcccatatagtcgccttccttgatgatgacggcattctcctctgacaactgattcagattggcaaaggtaggaccaaacatcgggtgcgtgctgacaaaacggaaaccactcttcgtataaaactcgtgcaggcctgtcttcacactggctatatcgctgatgatacagtccttgggcaaccagggcaacacctcctcaaaggcaggcaaggtgtacttcaccgtcacggcattgatgacgagctcgggtttgaactcggctatctcctccaacttggtgaagcgcagacagttgtaggtaaagcgcaaccgcttggcatccttctcgtatacggccacctcgtggtcgaagctgagcaggtcgatgaagaaacttcccatcttgcctgctcccattatcaatattttcatatctctttataagtaaagaacgaagcgtatgaattacttctggttcaggatttccaactgctggcgaacactctcctcgtggatgtgctcgaatatctgggcagcaaactcaggactcatgccacagagtgaagcctgtgcaccacgcttgtcgagaatctcgttgtagcggttggtctgcagaactgtcatattgtgctccttcttgtatgtaccaatctcacggcacacacgcatgcgctttgccaaaagctccatcaactgattgtccagttcgtcgatctgtccacgcaactgatgcagtccctctgtagagtagtgctcatcgcgaacgacaagcagactgagaatgtagtcgagtacatcgggagtaacctgctgcttggcatcgctccatgcatcgtcaggactgcagtggctctcgacgataagaccatcaaaaccgagatccatagcctgctgacacaatggtgctatcaagtcgcgacgtccaccgatgtggcttgggtcgcagacaataggcaactgaggaatgcggcgatgcagttcgattggaatctgccacataggcaggttgcgatagatcttcttgtcgaagcttgagaaaccacgatggatggctcccaatcgcttgataccagcctgattgatacgctgcaaggctcctatccaaagttccaggtcgggattgacagggttcttgaccaacacaggcacatcgacacctttcagactatcggccaatgcctgcatggcgaatgggttggcagaagtgcgggcacctatccacagcacatcgatgccatacttaagagccagctccacatgctcgggtgttgccacctcggtagctgtcagcatgccggtctcctcctttacctgcttcatccagggaagagcagtctcgccatttccctcgaagcctcctggcttggtacgtggcttccacacacctgcacggaacatgtggcatcccttttcagccaactgcttggcggttgtcataacttgttcctcggtttcggcagaacatggtcctgctattacgatgggacgttcctgatcactgggaagacgtaaaggttctaattctaattccatatcttaatcttttatattttttaatgtgaatgttttctgcttacttatttttttataaggtgaagactctatgcgaagagcttcttgatgcgctgcaaggcttccttcatcttgtcgtccttggcacacaggctgatgcgtacataacgcttgccgttgcttccgaagataaagcctggggtaatgaacacccgtgcctcgtggagcactttctcggtcaggtcttccacatcggcatagctctcaggtatcttaccccaaaggaacatgcccacctgcttaggatcgtaggtacagcccatcacgtccatgatctgttcggcaatgtcgcgacgacgacgatagttgtcgatgttgttttcgtggtgccattcatcgctgttacctatcatggcctcggcagcagctaattgtatgcctcggaacgagccattgtcgatattgctcttcaccttgagaatccacgagatgaaagtcttgttgctcgaaatcatcgccacacgccatccgggcatattatgactcttgctcagcgaattgaattcgatacagcagtcttttgctcccggcacctgcatgatgctcatggggtgctcattgaggatgagtgagtaaggattgtcgttcactacaacgatattgtgcttcttggcaaactctaccagtcgctcgtaagtctccatgcgggcattgcctcctgtaggcatattgggatagttggtccacatcagcttgacatgactcaggtccatcttctccaaggcttcgaagtcaggctgccatccattgtcttctctgagatcataataagttatcttggtacccaaaatcttattgatggcagtataggtgggatagccaggattaggaatcagcacctcgtcgccaggattgcagaaagccagggtaacgtgcaggatgccttccttgctgcctatcagcggctgtatctctgtagcccagtcgaggtctacatcgtaccatctcttatagaattctgccattgcctttcgcagttcaggaatgcccactgtgggctgatatccatgtgtgtcggacttctgagccacttcgcatagtttgtcgatggtctgctttgacggtggcatatctggacttccgatggcaaggctgatgatgtcttttccctcggcattcaactgggctacttctttcagtttgcggctgaagtagtattcctgtatctcagttactctattggctggctgtatcattgtatctaatgttttaatttttaatattcaatgttttgttttgaatgtaaagtataatcggcagcaaggctctttttacccttttacctttttacttttttacttttataacttttttcaactcctactctctttcctcgtactcgccgagaaccttgattttcttcaccagtggtgtgatggcatcaatactctggcggtatcgggtaaggttgtcgaaggtgaggtctacatagaagagatattcccactcatgtccgatgacgggcagcgactgaatcttggtcaggttcacatcgtagaagctcaggatggtgagcaccttggagagcgatcccttgtcgtgggaaaggctgaagacgatgcttgccttgttggccttctcaatgggtcgaaggagagctgccttctgcggattgctcaccacgaggaagcgcgtgtagttgtgcggattgtcgtggatgccttcttgcagcaccttcatgccatacatctcggctgcataagttgagcagatggcagcccatccccttacctgatgcttggcaataaaggcagccgaacctgcggtatcttcagcctctacagctttcaggtcgggatgattggcgaggaatctgccacactgcatcaatgccacaggatgggaatgaacctcctgaagtgtactccagtcatcatcgggcaaacagcagatgctgtgctctatatggagtcggtgctcgcctactactgtcgttccactttggcgcagaagctcatagttgtggagcagactgcccgctatggtattctcgatggctacgataccgatgactgtaggatcgcgcttgatgttttcgaacacctcctcgaaggtggcgcaacaaatcagttccacctgttcatcaccgaaatattgatgggcagctatgtcatgaaacgaccccaactcgccttgtattgctattctcttcatctatattgtttgtatctgttatgaaaaacggtcctcactctccaaggagcgggaccgtttcgatagatttcttaatcttaatatcctaagttgaaattatacgcaacttcccgctttacaattgcttgcaaagtaaaaataaaagctataaaagtatgcgttaaacttcttcattgttctttcttttatttattgtctactacaatgggggattccctcaattgtgttatacgattgcaaaagtagcatttttatttgtatccaccaaacaaattgacagattttttacacaaaaccttgcaatttattgttttcgtgcataaagatgcttatatctttcaagattttctgctctatggaaattctacaggaagccctcatctgtcaacgaagccgccttcatatgacatcgaagccgctttcatctgccaacgaagcctattgcgtttgccatcgaagcctattgcgtttgccagccctatataccttattatatattgtctattttttgacttccgtagctttgatgataacaacatcctgcagaggacggtcattattgcttttgtcggtctccacattctggattttctctaccacatccagtccttcaagcacttcgccaaagactgtgtagccaccatcaagatggggcacgccgccatatttcacatatcctgcctgcacctgttcattgggaatggcgtacaccttgtcctcgcctttcatcttctgcaccagatattccatctgccgtgcagagaaattgcgtccccaggtgatgtagaaatcgcaaggtgccgaagctttctgtggattcacgtcatcgccctcacgggcagcacagagctgtccgcgcttgtgataatatttgggataacgtatctcggcaggcacagtgtaggcagtatcgaagcgctccaccttgccgggcgtcacctttcgtgtgccaggattgccgccctgaatcataaagttcttgatgactctctgaaagatgcaaccatcataatagcccatcctcacccacttcaggaaattgtctcgatgaagaggtgtatcgttgtaaagcgccacgcggatattacccatgtttgtttctatcagcacctctggacaggtggcatcctgatggaaagcggccgtatcgggtacgacattatcggtctgcgcacaagccatcagaggcagaagcagacagtacattataaacaaaaaagttcttctcatattcatactttttattattacaagacaaaggtaatgcttttttaaccaaaacattcctatttattgttttttaatataaacatctgatcgctttcgtctaaaaagttgtaagtttgtacgtgaataacaagaatatcaggctcacgaaagcctaaaaagttgaatcattatgaaaagtaaaatagcatatttcttcatgctcatcctctgctgtgcttctgttcatgcacagcaggttcatctcggtccgctccacagtagcgacaatccacgtgaagactggctgttgccaggcgacaccatcttccaggccgaacagcctctcatatacaagggtaagccggtaaagaatacccaatactccgttgccaagaaaagtttgatggctttggctccattccaggatacaaacagcaaatcgatgtatgctggcgacaggtcggtgtatgctggcgacagcagtttcttctacaatcccgtaagcatgatgcccttcagtacgtatggttacggactgcaccggggactgaacgtatcgctcgacctttctgcctttgccacctttggcaagaacctgccacacaagggcggtttctcgcagaacatcaacgccacctatctggctccgctcaccaaagacggcaagttgtggatagcaggcggtggctatttcaacaacaccttctggggaagcgacagctatcgtgatgtaggcctgtacgccatccttggctatcggttcaacgagcactgggaagcctacgtttacggccaactgagcgtgaacaacaattacagccgatacggcaatctctatagaggttatccctattatggatggggttggcctgcaacaggtgtcatgccgttgggctatggcatgggggcagccggtgccaatgtactgggagcaggagtgaaatacaatgtcaacaagaatttctctatcggactgaacgtagaaggcatctggtacaacaacaagactccagtctacttcgaccaatacaattatcccggcaggactgattaacgtcggatgcttatcgcatcaagtcaaatcgtgaacgtctgtattaaatgaggaagttaaggagttaagacagaaaaaggggcaacagtttcagttgtccctttttctttttatgcatcaattctgttgttgccttatccataacaatgccctcctaaggacatggaatggctgcagctgaccagaaaagcattattcattgaccagtatctggacgatacggtcggcagatcttccgtcccatctgtcgggaatgcccgctttcttccattcgcctctcagcaagaccttcgtcatcagtacaagacggtcagcatcctcgcccaccagcacattggtaccgatcttcacggtctcgatatgctcggtatagctattgagcgtgatacaaggcacaccgttgaaggtggcttcttctgccacatttcctgagtcggtaacgatgcccatggcgtgagctgtaagatagctgaaatccaaatagccctgagcctctatcagcatgatgccctccaagcccatagcctctacctcctggcgagccttgccacgaagcggagccactacaggcacaccagcctcatgagcagaggaaaccacggcagacactaagctgcgcatctcctcgctattattgatgatggccttgcggttgagcgtcagcacgatgtactgtccctccttcagttgcttgtcgtccatcagctgtggacgcttcatgcgctgctgcagaaaacggatattatcgatgagcacattgcccaccatatagaccttggaaagctcggcgccctctttgttggcgatgctgttgttggaaatacccgcagtaaagaggatatcagacagtccgtcgataaccagtcggttgatttccttgggcatagtgatgtcgaagctacgagtgcctgcggcgatatgtgccaacagaatgccttgcttcttagtaacgatggctgcagccatggtagaggcaaggtcgtcgaccactataaccacatccgtaggattctgctgcagataaagctcgaacttagacatg
